United States Patent Application Publication US 2023/0026259 A1 - sequence listing, part 22

SEQ ID NO: 102718 - DNA, 854 bp, Homo sapiens
  Payload ID: 37
  Gene Symbol: HIBCH
  Gene Name: 3-hydroxyisobutyryl-CoA hydrolase
  ENST ID: ENST00000410045
  CDS Start-End: 261-752
gctagtatctgcaatgagtagacagacattctcagggctgtagaggatatgaaaaagaggaatatactttggggatgcgattagaagtgggtacaaaagataaataaccatctctctcatctggcagaggtaaagtatggtaagtgtaaaaacaatacaaagaaaatactcaaagaattgaaaggaggaagagcttacctgtaagaaaggactagaagcttttttatgaaggttgcagtacagccggccttaagttggccatgttagaggaagatttgttagccttgaaatctccttcaaaagaaaatattgcatctgtcttagaaaattaccatacagagtctaagattgatcgagacaagtcttttatacttgaggaacacatggacaaaataaacagttgtttttcagccaatactgtggaagaaattattgaaaacttacagcaagatggttcatcttttgccctagagcaattgaaggtaattaataaaatgtctccaacatctctaaagatcacactaaggcaactcatggaggggtcttcaaagaccttgcaagaagtactaactatggagtatcggctaagtcaagcttgtatgagaggtcatgactttcatgaaggcgttagagctgttttaattgataaagaccagagtccaaaatggaaaccagctgatctaaaagaagttactgaggaagatttgaataatcactttaagtctttgggaagcagtgatttgaaattttgaggtgacaggcttttaaggtatattttgtagcatgggttggcaatctacagcatgtgggccaaatccagcctgctgcctgtttttatataccctgtaagctaa

SEQ ID NO: 102719 - DNA, 511 bp, Homo sapiens
  Payload ID: 37
  Gene Symbol: HIBCH
  Gene Name: 3-hydroxyisobutyryl-CoA hydrolase
  ENST ID: ENST00000409820
  CDS Start-End: 127-511
gcaatgagtagacagacattctcagggctgtagaggatatgaaaaagaggaatatactttggggatgcgattagaagtgggtacaaaagataaataaccatctctctcatctggcagaggtaaagtatgttggccatgttagaggaagatttgttagccttgaaatctccttcaaaagaaaatattgcatctgtcttagaaaattaccatacagagtctaagattgatcgagacaagtcttttatacttgaggaacacatggacaaaataaacagttgtttttcagccaatactgtggaagaaattattgaaaacttacagcaagatggttcatcttttgccctagagcaattgaaggtaattaataaaatgtctccaacatctctaaagatcacactaaggcaactcatggaggggtcttcaaagaccttgcaagaagtactaactatggagtatcggctaagtcaagcttgtatgagaggtcatgactttcatgaaggcgttagagctg

SEQ ID NO: 102720 - DNA, 826 bp, Homo sapiens
  Payload ID: 37
  Gene Symbol: HIBCH
  Gene Name: 3-hydroxyisobutyryl-CoA hydrolase
  ENST ID: ENST00000409934
  CDS Start-End: 6-826
cggcgatgccgggcatgcctggccgggcccggccgggggcggcctcgctgccggggcagggacctcgcaggccggcgcgcagaggcgaggaaccctcccggcgccatcgactcacctacccgcggagaggcgacggcgcgcgccgctcaccagcccgggccccagatccaaggaggaggggcagcggcgcggggaccctgtggtttaatgcattcaaaaggactaataccatactgcaccatttgagaatgtccaagcacacagatgcagcagaagaggtgctattggaaaaaaaaggttgcacgggagtcataacactaaacagaccaaagttcctcaatgcactgactcttaatatgattcggcagatttatccacagctaaagaagtgggaacaagatcctgaaactttcctgatcattataaagggagcaggaggaaaggctttctgtgccgggggtgatatcagagtgatctcggaagctgaaaaggcaaaacagaagatagctccagttttcttcagagaagaatatatgctgaataatgctgttggttcttgccagaaaccttatgttgcacttattcatggaattacaatgggtgggggagttggtctctcagtccatgggcaatttcgagtggctacagaaaagtgtctttttgctatgccagaaactgcaataggactgttccctgatgtgggtggaggttatttcttgccacgactccaaggaaaacttggttacttccttgcattaacaggattcagactaaaaggaagagatgtgtacagagcaggaattgctacacactttgtagattctga

SEQ ID NO: 102721 - DNA, 396 bp, Homo sapiens
  Payload ID: 37
  Gene Symbol: HIBCH
  Gene Name: 3-hydroxyisobutyryl-CoA hydrolase
  ENST ID: ENST00000399855
  CDS Start-End: 1-116
ttttaattgataaagaccagagtccaaaatggaaaccagctgatctaaaagaagttactgaggaagatttgaataatcactttaagtctttgggaagcagtgatttgaaattttgaggtgacaggcttttaagaccgcctatgggcagcatccagagcggaccagctccctgtgctggaggactccagtgtgaggcctgctgcttcctttctacattggcctgaaaccagcccaactcagtggtcataatcttctgggcctaccgaagagcaaaagcctacttctagttcttccagttgccagttcaagggctttatctgtcacttcctttgggaacaggtagagtgctttgatttagaatgatggcaataaatgagaaaccaatttgaaattgga

SEQ ID NO: 102722 - DNA, 502 bp, Homo sapiens
  Payload ID: 37
  Gene Symbol: HIBCH
  Gene Name: 3-hydroxyisobutyryl-CoA hydrolase
  ENST ID: ENST00000416732
  CDS Start-End: 1-360
cagtctaagattgatcgagacaagtcttttatacttgaggaacacatggacaaaataaacagttgtttttcagccaatactgtggaagaaattattgaaaacttacagcaagatggttcatcttttgccctagagcaattgaaggtaattaataaaatgtctccaacatctctaaagatcacactaaggcaactcatggaggggtcttcaaagaccttgcaagaagtactaactatggagtatcggctaagtcaagcttgtatgagaggtcatgactttcatgaaggcgttagagctggtaagtggcaaatgggaacttaccattttggggaaatgggatttgtgagcatatgctgttaattaaagaagatacagattatgcatcccaaatcctaaaatccaaaatgtaccaaaatctgaaactatttgagcaccaacatgacactcaaatgttcattggaccataagtataatgcaaatattccaaaatctgaaaaaaaaa

SEQ ID NO: 102723 - DNA, 202 bp, Homo sapiens
  Payload ID: 37
  Gene Symbol: HIBCH
  Gene Name: 3-hydroxyisobutyryl-CoA hydrolase
  ENST ID: ENST00000414928
  CDS Start-End: 1-159
gatgtgggtggaggttatttcttgccacgactccaaggaaaacttggttacttccttgcattaacaggattcagactaaaaggaagagatgtgtacagagcaggaattgctacacactttgtagattctgaaaagaatggagatgacactattacatagtagttgaaactccttgtgttacatgtggcagaagacccaattc

SEQ ID NO: 102724 - DNA, 1308 bp, Homo sapiens
  Payload ID: 37
  Gene Symbol: HIBCH
  Gene Name: 3-hydroxyisobutyryl-CoA hydrolase
  ENST ID: ENST00000622246
  CDS Start-End: 63-1205
gtccgggagattctcgctctgctgctttagcttcggagtgtttggcgatggggcagcgcgagatgtggaggctcatgtcgaggtttaatgcattcaaaaggactaataccatactgcaccatttgagaatgtccaagcacacagatgcagcagaagaggtgctattggaaaaaaaaggttgcacgggagtcataacactaaacagaccaaagttcctcaatgcactgactcttaatatgattcggcagatttatccacagctaaagaagtgggaacaagatcctgaaactttcctgatcattataaagggagcaggaggaaaggctttctgtgccgggggtgatatcagagtgatctcggaagctgaaaaggcaaaacagaagatagctccagttttcttcagagaagaatatatgctgaataatgctgttggttcttgccagaaaccttatgttgcacttattcatggaattacaatgggtgggggagttggtctctcagtccatgggcaatttcgagtggctacagaaaagtgtctttttgctatgccagaaactgcaataggactgttccctgatgtgggtggaggttatttcttgacgactccaaggaaaacttggttacttccttgcattaacggattcagactaaaaggaagagatgtgtacagagcaggaattgctacacactttgtagattctgaaaagttggccatgttagaggaagatttgttagccttgaaatctccttcaaaagaaaatattgcatctgtcttagaaaattaccatacagagtctaagattgatcgagacaagtcttttatacttgaggaacacatggacaaaataaacagttgtttttcagccaatactgtggaagaaattattgaaaacttacagcaagatggttcatcttttgccctagagcaattgaaggtaattaataaaatgtctccaacatctctaaagatcacactaaggcaactcatggaggggtcttcaaagaccttgcaagaagtactaactatggagtatcggctaagtcaagcttgtatgagaggtcatgactttcatgaaggcgttagagctgttttaattgataaagaccagagtccaaaatggaaaccagctgatctaaaagaagttactgaggaagatttgaataatcactttaagtctttgggaagcagtgatttgaaattttgaggtgacaggcttttaaggtatattttgtagcatgggttggcaatctacagcatgtgggccaaatccagcctgctgcctgtttttatataccctgtaagctaag

SEQ ID NO: 102725 - DNA, 1101 bp, Homo sapiens
  Payload ID: 38
  Gene Symbol: HMGCL
  Gene Name: 3-hydroxymethyl-3-methylglutaryl-CoA lyase
  ENST ID: ENST00000235958
  CDS Start-End: 1-548
ggaaggcgcttccgcggcgactggtgggcttggcgtccctccgggctgtcagcacctcatctatgggcactttaccaaagcgggtgaaaattgtggaagttggtccccgagatggactacaaaatgaaaaggtcaccaagaagttctactcaatgggctgctacgagatctccctgggggacaccattggtgtgggcaccccagggatcatgaaagacatgctatctgctgtcatgcaggaagtgcctctggctgccctggctgtccactgccatgacacctatggtcaagccctggccaacaccttgatggccctgcagatgggagtgagtgtcgtggactcttctgtggcaggacttggaggctgtccctacgcacagggggcatcaggaaacttggccacagaagacctggtctacatgctagagggcttgggcattcacacgggtgtgaatctccagaagcttctggaagctggaaactttatctgtcaagccctgaacagaaaaactagctccaaagtggctcaggctacctgtaaactctgagccccttgcccacctgaagccctggggatgatgtggaaataggggcacacacagatgattcatggatggggacatggaaatgagaataggttaaatggtgcaggtacctcatagccagctctacacagaggtctctcctggcagaaagcaggcgaagggcaggaggagctgcttggcagaaggacctcctgcccagacctgaggagtgagaggctttgagggctgaagtctccctttgttacggaccctggcccaggagttgaatgcctgaggacgtgtgggaaccccgttccctacttagcatgatccttgagtctcctctctggatggaatccgcgagctggccacctggccaccctctacacggctccaccctgccatggccgtggggcccttgctctctgacttctcaggacacaggtcatggaggttcttcccaagctggcagaggccatttgtggaaagtggagagctacgtggtggccgtctgccaactccagcatctctggaaaatctccacgctgaatgtgatttttgaaaacagcttatgtaa

SEQ ID NO: 102726 - DNA, 2151 bp, Homo sapiens
  Payload ID: 38
  Gene Symbol: HMGCL
  Gene Name: 3-hydroxymethyl-3-methylglutaryl-CoA lyase
  ENST ID: ENST00000374487
  CDS Start-End: 323-556
agtgccaggctgctcaaacctctaggggggcatacagacaggcagaggctgtgggcctccaaccccacggcagcatgtaggggtggatgcttacagctcctggagccccagtgggcgtgtgttacagggtgctcttttagttttgctgtctataggcgacttgtgttagttaaccagctcgagtgggctctcaaccttgtcataggacagagagggctttctatatgccgggttcttgccttggtgtaccagaagaattggatcacacctgggcttagagaatgggtgcaaggttttattgagtagaggtagctcttagcagatgttggaagccagaagagaatggagtaggaaggttttcccctggagtggggccactcagcagcccgggacccccttccacagtcccagccaaactctgcgtcgttctgctggtcagcggcctgctggcgtgccagtgcctgctgatgtgctcctctggacgtccagccgcctgtgtgttcctccactgatgtgctcctctccatgtccggctacctgtgtgtctgcctgctaaggtatgaaatctaaggatgccccctctctggagctgcctgcctgtgtttgaatcctgaagatcgtgatgcgtgagttaatccgtgctaagaactcggaacagtcagcacctcatctatgggcactttaccaaagcgggtgaaaattgtggaagttggtccccgagatggactacaaaatgaaaagaatatcgtatctactccagtgaaaatcaagctgatagacatgctttctgaagcaggactctctgttatagaaaccaccagctttgtgtctcctaagtgggttccccagatgggtgaccacactgaagtcttgaagggcattcagaagtttcctggcatcaactacccagtcctgaccccaaatttgaaaggcttcgaggcagcggttgctgctggagccaaggaagtagtcatctttggagctgcctcagagctcttcaccaagaagaacatcaattgttccatagaggagagttttcagaggtttgacgcaatcctgaaggcagcgcagtcagccaatatttctgtgcgggggtacgtctcctgtgctcttggctgcccttatgaagggaagatctccccagctaaagtagctgaggtcaccaagaagttctactcaatgggctgctacgagatctccctgggggacaccattggtgtgggcaccccagggatcatgaaagacatgctatctgctgtcatgcaggaagtgcctctggctgccctggctgtccactgccatgacacctatggtcaagccctggccaacaccttgatggccctgcagatgggagtgagtgtcgtggactcttctgtggcaggacttggaggctgtccctacgcacagggggcatcaggaaacttggccacagaagacctggtctacatgctagagggcttgggcattcacacgggtgtgaatctccagaagcttctggaagctggaaactttatctgtcaagccctgaacagaaaaactagctccaaagtggctcaggctacctgtaaactctgagccccttgcccacctgaagccctggggatgatgtggaaataggggcacacacagatgattcatggatggggacatggaaatgagaataggttaaatggtgcaggtacctcatagccagctctacacagaggtctctcctggcagaaagcaggcgaagggcaggaggagctgcttggcagaaggacctcctgcccagacctgaggagtgagaggctttgagggctgaagtctccctttgttacggaccctggcccaggagttgaatgcctgaggacgtgtgggaaccccgttccctacttagcatgatccttgagtctcctctctggatggaatccgcgagctggccacctggccaccctctacacggctccaccctgccatggccgtggggcccttgctctctgacttctcaggacacaggtcatggaggttcttcccaagctggcagaggccatttgtggaaagtggagagctacgtggtggccgtctgccaactccagcatctctggaaaatctccacgctgaatgtgatttttgaaaacagcttatgtaattaaaggttgaatggcacatcat

SEQ ID NO: 102727 - DNA, 1600 bp, Homo sapiens
  Payload ID: 38
  Gene Symbol: HMGCL
  Gene Name: 3-hydroxymethyl-3-methylglutaryl-CoA lyase
  Uniprot ID: P35914
  ENST ID: ENST00000374490
  CDS Start-End: 45-1022
cacgcggggcccagctggactgccgcgggggattctgggccaagatggcagcaatgaggaaggcgcttccgcggcgactggtgggcttggcgtccctccgggctgtcagcacctcatctatgggcactttaccaaagcgggtgaaaattgtggaagttggtccccgagatggactacaaaatgaaaagaatatcgtatctactccagtgaaaatcaagctgatagacatgctttctgaagcaggactctctgttatagaaaccaccagctttgtgtctcctaagtgggttccccagatgggtgaccacactgaagtcttgaagggcattcagaagtttcctggcatcaactacccagtcctgaccccaaatttgaaaggcttcgaggcagcggttgctgctggagccaaggaagtagtcatctttggagctgcctcagagctcttcaccaagaagaacatcaattgttccatagaggagagttttcagaggtttgacgcaatcctgaaggcagcgcagtcagccaatatttctgtgcgggggtacgtctcctgtgctcttggctgcccttatgaagggaagatctccccagctaaagtagctgaggtcaccaagaagttctactcaatgggctgctacgagatctccctgggggacaccattggtgtgggcaccccagggatcatgaaagacatgctatctgctgtcatgcaggaagtgcctctggctgccctggctgtccactgccatgacacctatggtcaagccctggccaacaccttgatggccctgcagatgggagtgagtgtcgtggactcttctgtggcaggacttggaggctgtccctacgcacagggggcatcaggaaacttggccacagaagacctggtctacatgctagagggcttgggcattcacacgggtgtgaatctccagaagcttctggaagctggaaactttatctgtcaagccctgaacagaaaaactagctccaaagtggctcaggctacctgtaaactctgagccccttgcccacctgaagccctggggatgatgtggaaataggggcacacacagatgattcatggatggggacatggaaatgagaataggttaaatggtgcaggtacctcatagccagctctacacagaggtctctcctggcagaaagcaggcgaagggcaggaggagctgcttggcagaaggacctcctgcccagacctgaggagtgagaggctttgagggctgaagtctccctttgttacggaccctggcccaggagttgaatgcctgaggacgtgtgggaaccccgttccctacttagcatgatccttgagtctcctctctggatggaatccgcgagctggccacctggccaccctctacacggctccaccctgccatggccgtggggcccttgctctctgacttctcaggacacaggtcatggaggttcttcccaagctggcagaggccatttgtggaaagtggagagctacgtggtggccgtctgccaactccagcatctctggaaaatctccacgctgaatgtgatttttgaaaacagcttatgtaattaaaggttgaatggcacatcataa

SEQ ID NO: 102728 - DNA, 1354 bp, Homo sapiens
  Payload ID: 38
  Gene Symbol: HMGCL
  Gene Name: 3-hydroxymethyl-3-methylglutaryl-CoA lyase
  Uniprot ID: P35914
  ENST ID: ENST00000436439
  CDS Start-End: 14-778
attctgggccaagatggcagcaatgaggaaggcgcttccgcggcgactggtgggcttggcgtccctccgggctgtcagcacctcatctatgggcactttaccaaagcgggtgaaaattgtggaagttggtccccgagatggactacaaaatgaaaagaatatcgtatctactccagtgaaaatcaagctgatagacatgctttctgaagcaggactctctgttatagaaaccaccagctttgtgtctcctaagtgggttccccagatgggtgaccacactgaagtcttgaagggcattcagaagtttcctggcatcaactacccagtcctgaccccaaatttgaaaggcttcgaggcagcggtcaccaagaagttctactcaatgggctgctacgagatctccctgggggacaccattggtgtgggcaccccagggatcatgaaagacatgctatctgctgtcatgcaggaagtgcctctggctgccctggctgtccactgccatgacacctatggtcaagccctggccaacaccttgatggccctgcagatgggagtgagtgtcgtggactcttctgtggcaggacttggaggctgtccctacgcacagggggcatcaggaaacttggccacagaagacctggtctacatgctagagggcttgggcattcacacgggtgtgaatctccagaagcttctggaagctggaaactttatctgtcaagccctgaacagaaaaactagctccaaagtggctcaggctacctgtaaactctgagccccttgcccacctgaagccctggggatgatgtggaaataggggcacacacagatgattcatggatggggacatggaaatgagaataggttaaatggtgcaggtacctcatagccagctctacacagaggtctctcctggcagaaagcaggcgaagggcaggaggagctgcttggcagaaggacctcctgcccagacctgaggagtgagaggctttgagggctgaagtctccctttgttacggaccctggcccaggagttgaatgcctgaggacgtgtgggaaccccgttccctacttagcatgatccttgagtctcctctctggatggaatccgcgagctggccacctggccaccctctacacggctccaccctgccatggccgtggggcccttgctctctgacttctcaggacacaggtcatggaggttcttcccaagctggcagaggccatttgtggaaagtggagagctacgtggtggccgtctgccaactccagcatctctggaaaatctccacgctgaatgtgatttttgaaaacagcttatgtaattaaaggttgaatggcacatcat

SEQ ID NO: 102729 - DNA, 2475 bp, Homo sapiens
  Payload ID: 39
  Gene Symbol: HMGCLL1
  Gene Name: 3-hydroxymethyl-3-methylglutaryl-CoA lyase-like 1
  Uniprot ID: Q8TB92
  ENST ID: ENST00000274901
  CDS Start-End: 160-1182
cctctcggcgccgccgcagtgcgcagaacagctctggtcctcacagccagtgcaccggaggggcgcgctcccgagctggcgcagtttcccagcgcggtgcccgcccctcatcctcctccagtctccctcccctcgccgactgccgccccaggctccgccatggggaatgtgccatccgcggtgaagcactgcctcagctaccagcagcttctccgggagcatctctggatcggggattcagtggcaggggcgctcgaccccgcgcaggaaacatcccagttatctggactccctgagtttgttaaaatagtagaagttgggcctagggatggattgcagaatgaaaaggttatagttcctacagatataaaaattgaatttatcaatcgactttcccaaactggcttgtctgtaatagaagtgactagctttgtgtcttccagatgggtaccacagatggctgatcacactgaagtaatgaaaggcattcatcaatatccaggagttcgctatcctgtccttactcctaatcttcagggttttcaccatgctgttgctgctggagctactgagatatcagtttttggagctgcatctgaatcctttagcaagaagaatattaactgttccattgaagaaagtatgggaaaatttgaggaggttgttaagtctgcaagacacatgaatattccagcacgagggtatgtgtcttgtgctctgggctgtccatatgaaggaagtattacaccgcaaaaagtgacagaagtgtctaagagattgtacggcatgggttgttatgagatctctctaggagacacaattggagtgggaactccaggaagtatgaaaagaatgttggaaagtgtgatgaaagaaatcccaccaggtgctcttgctgttcactgtcatgacacatacggacaagccttagcaaatatccttacggcccttcagatgggaattaatgtggtggactccgcagtatccggattaggtggctgcccttatgcaaaaggtgcttctgggaatgtagccactgaggatttgatatatatgcttaatggcctggggctcaatacaggtgtgaatctatacaaagtgatggaagctggtgactttatttgcaaagctgtgaataaaaccacaaactctaaagtagcacaagcctccttcaatgcttgacttgaatggatttatgacgtaccgttgagaagatcaatttcagctacaatactcatctgaaaatcattaatgccaacttgctctgatatgtgaagtaatggacaagagtgggaaaaaagagatccttttcaaaaagattataactggatagattaagtcaacaaaatgcaatatcagtcatcaggtaaattgcaagctgaggataaataataaaacttgtcataattttgaacttggaaaaaagtttcttttgctctcatagaaataactttttaatttagtagatgggaaaattgacttcgtatttccccaagtatcaaatactgtgttaatacttaatcaagcaggcttaacactgtgtacatattgtcagtagtttatgagctcctgcatagtatgcagagtgtgtggcctcaatattatacattatgcctctggatctcaactactcatttgccaagtcagttatgttatggaccaaaagccaaatctccatctgaccctacataattttagcaatagaacttttatatttcaagtatggctaacatctgttaactatttcagtgactttatctggttccaagaggctgtggccaatggcaagatgccatatcctggaaacatattacgacctcccatgtttgttacatgcatccagtttaccacactttacctgtcatcagttatagtaaaaaccagcatggtgttactcaactattgagaaattgtaagctatttttttttgtcctgatgtctaaattgcagtgataagaataggttgatacatgtatcataatctacctttataattttcagatcactttcaaattgcccaaggaaatattgtgatcctaagaatattaagataattttaggttaatgaaatacccattttccttttattcatggtgctttgcttacccacattattttttggtgtattttttagtggttattttagaagttgaagtggctgaaattttgtctattgtcttagaattgattgccagaaattgcaagatgtaatatatcaaagtcagggatgaggagcaggaggactattcaagataaacttctgtaacctatgcatattttatgggggcagtattattacaaatggatctgaaatgtcagttctagtatttagagagacttctctaataataccgggtgatattatctttgagtaaatttgaatataaattgaaacataaaaatgagtattgtgaactttctaggaaatattcattaaaaccattgaaataaaaataaattcaagaaagtaagaag

SEQ ID NO: 102730 - DNA, 1314 bp, Homo sapiens
  Payload ID: 39
  Gene Symbol: HMGCLL1
  Gene Name: 3-hydroxymethyl-3-methylglutaryl-CoA lyase-like 1
  Uniprot ID: Q8TB92
  ENST ID: ENST00000308161
  CDS Start-End: 126-1052
tggtcctcacagccagtgcaccggaggggcgcgctcccgagctggcgcagtttcccagcgcggtgcccgcccctcatcctcctccagtctccctcccctcgccgactgccgccccaggctccgccatggggaatgtgccatccgcggtgaagcactgcctcagctaccagcagcttctccgggagcatctctggatcggggattcagtggcaggggcgctcgaccccgcgcaggaaacatcccagttatctggactccctgagtttgttaaaatagtagaagttgggcctagggatggattgcagaatgaaaaggttatagttcctacagatataaaaattgaatttatcaatcgactttcccaaactggcttgtctgtaatagaagtgactagctttgtgtcttccagatgggtaccacaggttgctgctggagctactgagatatcagtttttggagctgcatctgaatcctttagcaagaagaatattaactgttccattgaagaaagtatgggaaaatttgaggaggttgttaagtctgcaagacacatgaatattccagcacgagggtatgtgtcttgtgctctgggctgtccatatgaaggaagtattacaccgcaaaaagtgacagaagtgtctaagagattgtacggcatgggttgttatgagatctctctaggagacacaattggagtgggaactccaggaagtatgaaaagaatgttggaaagtgtgatgaaagaaatcccaccaggtgctcttgctgttcactgtcatgacacatacggacaagccttagcaaatatccttacggcccttcagatgggaattaatgtggtggactccgcagtatccggattaggtggctgcccttatgcaaaaggtgcttctgggaatgtagccactgaggatttgatatatatgcttaatggcctggggctcaatacaggtgtgaatctatacaaagtgatggaagctggtgactttatttgcaaagctgtgaataaaaccacaaactctaaagtagcacaagcctccttcaatgcttgacttgaatggatttatgacgtaccgttgagaagatcaatttcagctacaatactcatctgaaaatcattaatgccaacttgctctgatatgtgaagtaatggacaagagtgggaaaaaagagatccttttcaaaaagattataactggatagattaagtcaacaaaatgcaatatcagtcatcaggtaaattgcaagctgaggataaataataaaacttgtcataattttgaacttggaaaaaagtttcttttgctctcatag

SEQ ID NO: 102731 - DNA, 1171 bp, Homo sapiens
  Payload ID: 39
  Gene Symbol: HMGCLL1
  Gene Name: 3-hydroxymethyl-3-methylglutaryl-CoA lyase-like 1
  ENST ID: ENST00000370850
  CDS Start-End: 112-825
agtgcaccggaggggcgcgctcccgagctggcgcagtttcccagcgcggtgcccgcccctcatcctcctccagtctccctcccctcgccgactgccgccccaggctccgccatggggaatgtgccatccgcggtgaagcactgcctcagctaccagcagcttctccgggagcatctctggatcggggattcagtggcaggggcgctcgaccccgcgcaggaaacatcccagttatctggactccctgagtttgttaaaatagtagaagttgggcctagggatggattgcagaatgaaaaggttatagttcctacagatataaaaattgaatttatcaatcgactttcccaaactggcttgtctgtaatagaagtgactagctttgtgtcttccagatgggtaccacaggtgtctaagagattgtacggcatgggttgttatgagatctctctaggagacacaattggagtgggaactccaggaagtatgaaaagaatgttggaaagtgtgatgaaagaaatcccaccaggtgctcttgctgttcactgtcatgacacatacggacaagccttagcaaatatccttacggcccttcagatgggaattaatgtggtggactccgcagtatccggattaggtggctgcccttatgcaaaaggtgcttctgggaatgtagccactgaggatttgatatatatgcttaatggcctggggctcaatacaggtgtgaatctatacaaagtgatggaagctggtgactttatttgcaaagctgtgaataaaaccacaaactctaaagtagcacaagcctccttcaatgcttgacttgaatggatttatgacgtaccgttgagaagatcaatttcagctacaatactcatctgaaaatcattaatgccaacttgctctgatatgtgaagtaatggacaagagtgggaaaaaagagatccttttcaaaaagattataactggatagattaagtcaacaaaatgcaatatcagtcatcaggtaaattgcaagctgaggataaataataaaacttgtcataattttgaacttggaaaaaagtttcttttgctctcatagaaataactttttaatttagtagatgggaaaattgacttcgtatttccccaagtatcaaatactgtgttaatacttaatcaagca

SEQ ID NO: 102732 - DNA, 2445 bp, Homo sapiens
  Payload ID: 39
  Gene Symbol: HMGCLL1
  Gene Name: 3-hydroxymethyl-3-methylglutaryl-CoA lyase-like 1
  Uniprot ID: Q8TB92
  ENST ID: ENST00000370852
  CDS Start-End: 45-206
ctccagtctccctcccctcgccgactgccgccccaggctccgccatggggaatgtgccatccgcggtgaagcactgcctcagctaccagcagcttctccgggagcatctctggatcggggattcagtggcaggggcgctcgaccccgcgcaggagcttcagtctgtgatgctgatgctgcaccatggacctctcaggaagccctgatccccatcatatttgagggcacctctccctcttttactaaaggaaacatcccagttatctggactccctgagtttgttaaaatagtagaagttgggcctagggatggattgcagaatgaaaaggttatagttcctacagatataaaaattgaatttatcaatcgactttcccaaactggcttgtctgtaatagaagtgactagctttgtgtcttccagatgggtaccacagatggctgatcacactgaagtaatgaaaggcattcatcaatatccaggagttcgctatcctgtccttactcctaatcttcagggttttcaccatgctgttgctgctggagctactgagatatcagtttttggagctgcatctgaatcctttagcaagaagaatattaactgttccattgaagaaagtatgggaaaatttgaggaggttgttaagtctgcaagacacatgaatattccagcacgagggtatgtgtcttgtgctctgggctgtccatatgaaggaagtattacaccgcaaaaagtgacagaagtgtctaagagattgtacggcatgggttgttatgagatctctctaggagacacaattggagtgggaactccaggaagtatgaaaagaatgttggaaagtgtgatgaaagaaatcccaccaggtgctcttgctgttcactgtcatgacacatacggacaagccttagcaaatatccttacggcccttcagatgggaattaatgtggtggactccgcagtatccggattaggtggctgcccttatgcaaaaggtgcttctgggaatgtagccactgaggatttgatatatatgcttaatggcctggggctcaatacaggtgtgaatctatacaaagtgatggaagctggtgactttatttgcaaagctgtgaataaaaccacaaactctaaagtagcacaagcctccttcaatgcttgacttgaatggatttatgacgtaccgttgagaagatcaatttcagctacaatactcatctgaaaatcattaatgccaacttgctctgatatgtgaagtaatggacaagagtgggaaaaaagagatccttttcaaaaagattataactggatagattaagtcaacaaaatgcaatatcagtcatcaggtaaattgcaagctgaggataaataataaaacttgtcataattttgaacttggaaaaaagtttcttttgctctcatagaaataactttttaatttagtagatgggaaaattgacttcgtatttccccaagtatcaaatactgtgttaatacttaatcaagcaggcttaacactgtgtacatattgtcagtagtttatgagctcctgcatagtatgcagagtgtgtggcctcaatattatacattatgcctctggatctcaactactcatttgccaagtcagttatgttatggaccaaaagccaaatctccatctgaccctacataattttagcaatagaacttttatatttcaagtatggctaacatctgttaactatttcagtgactttatctggttccaagaggctgtggccaatggcaagatgccatatcctggaaacatattacgacctcccatgtttgttacatgcatccagtttaccacactttacctgtcatcagttatagtaaaaaccagcatggtgttactcaactattgagaaattgtaagctatttttttttgtcctgatgtctaaattgcagtgataagaataggttgatacatgtatcataatctacctttataattttcagatcactttcaaattgcccaaggaaatattgtgatcctaagaatattaagataattttaggttaatgaaatacccattttccttttattcatggtgctttgcttacccacattattttttggtgtattttttagtggttattttagaagttgaagtggctgaaattttgtctattgtcttagaattgattgccagaaattgcaagatgtaatatatcaaagtcagggatgaggagcaggaggactattcaagataaacttctgtaacctatgcatattttatgggggcagtattattacaaatggatctgaaatgtcagttctagtatttagagagacttctctaataataccgggtgatattatctttgagtaaatttgaatataaattgaaacataaaaatgagtattgtgaactttctaggaaatattcattaaaaccattgaaataaaaataaattcaag

SEQ ID NO: 102733 - DNA, 2532 bp, Homo sapiens
  Payload ID: 39
  Gene Symbol: HMGCLL1
  Gene Name: 3-hydroxymethyl-3-methylglutaryl-CoA lyase-like 1
  Uniprot ID: Q8TB92
  ENST ID: ENST00000398661
  CDS Start-End: 133-1245
acagctctggtcctcacagccagtgcaccggaggggcgcgctcccgagctggcgcagtttcccagcgcggtgcccgcccctcatcctcctccagtctccctcccctcgccgactgccgccccaggctccgccatggggaatgtgccatccgcggtgaagcactgcctcagctaccagcagcttctccgggagcatctctggatcggggattcagtggcaggggcgctcgaccccgcgcagacttctcttctaacaaaccttcactgctttcagcccgatgtctctggcttctcagtctccttggcaggcacggtggcttgtatccactgggaaacatcccagttatctggactccctgagtttgttaaaatagtagaagttgggcctagggatggattgcagaatgaaaaggttatagttcctacagatataaaaattgaatttatcaatcgactttcccaaactggcttgtctgtaatagaagtgactagctttgtgtcttccagatgggtaccacagatggctgatcacactgaagtaatgaaaggcattcatcaatatccaggagttcgctatcctgtccttactcctaatcttcagggttttcaccatgctgttgctgctggagctactgagatatcagtttttggagctgcatctgaatcctttagcaagaagaatattaactgttccattgaagaaagtatgggaaaatttgaggaggttgttaagtctgcaagacacatgaatattccagcacgagggtatgtgtcttgtgctctgggctgtccatatgaaggaagtattacaccgcaaaaagtgacagaagtgtctaagagattgtacggcatgggttgttatgagatctctctaggagacacaattggagtgggaactccaggaagtatgaaaagaatgttggaaagtgtgatgaaagaaatcccaccaggtgctcttgctgttcactgtcatgacacatacggacaagccttagcaaatatccttacggcccttcagatgggaattaatgtggtggactccgcagtatccggattaggtggctgcccttatgcaaaaggtgcttctgggaatgtagccactgaggatttgatatatatgcttaatggcctggggctcaatacaggtgtgaatctatacaaagtgatggaagctggtgactttatttgcaaagctgtgaataaaaccacaaactctaaagtagcacaagcctccttcaatgcttgacttgaatggatttatgacgtaccgttgagaagatcaatttcagctacaatactcatctgaaaatcattaatgccaacttgctctgatatgtgaagtaatggacaagagtgggaaaaaagagatccttttcaaaaagattataactggatagattaagtcaacaaaatgcaatatcagtcatcaggtaaattgcaagctgaggataaataataaaacttgtcataattttgaacttggaaaaaagtttcttttgctctcatagaaataactttttaatttagtagatgggaaaattgacttcgtatttccccaagtatcaaatactgtgttaatacttaatcaagcaggcttaacactgtgtacatattgtcagtagtttatgagctcctgcatagtatgcagagtgtgtggcctcaatattatacattatgcctctggatctcaactactcatttgccaagtcagttatgttatggaccaaaagccaaatctccatctgaccctacataattttagcaatagaacttttatatttcaagtatggctaacatctgttaactatttcagtgactttatctggttccaagaggctgtggccaatggcaagatgccatatcctggaaacatattacgacctcccatgtttgttacatgcatccagtttaccacactttacctgtcatcagttatagtaaaaaccagcatggtgttactcaactattgagaaattgtaagctatttttttttgtcctgatgtctaaattgcagtgataagaataggttgatacatgtatcataatctacctttataattttcagatcactttcaaattgcccaaggaaatattgtgatcctaagaatattaagataattttaggttaatgaaatacccattttccttttattcatggtgctttgcttacccacattattttttggtgtattttttagtggttattttagaagttgaagtggctgaaattttgtctattgtcttagaattgattgccagaaattgcaagatgtaatatatcaaagtcagggatgaggagcaggaggactattcaagataaacttctgtaacctatgcatattttatgggggcagtattattacaaatggatctgaaatgtcagttctagtatttagagagacttctctaataataccgggtgatattatctttgagtaaatttgaatataaattgaaacataaaaatgagtattgtgaactttctaggaaatattcattaaaaccattgaaataaaaataaattcaagaaagt

SEQ ID NO: 102734 - DNA, 2437 bp, Homo sapiens
  Payload ID: 39
  Gene Symbol: HMGCLL1
  Gene Name: 3-hydroxymethyl-3-methylglutaryl-CoA lyase-like 1
  ENST ID: ENST00000428842
  CDS Start-End: 19-474
gccgccccaggctccgccatggggaatgtgccatccgcggtgaagcactgcctcagctaccagcagcttctccgggagcatctctggatcggggattcagtggcaggggcgctcgaccccgcgcaggaaacatcccagttatctggactccctgagtttgttaaaatagtagaagttgggcctagggatggattgcagaatgaaaaggttatagttcctacagatataaaaattgaatttatcaatcgactttcccaaactggcttgtctgtaatagaagtgactagctttgtgtcttccagatgggtaccacaggttgctgctggagctactgagatatcagtttttggagctgcatctgaatcctttagcaagaagaatattaactgttccattgaagaaagtatgggaaaatttgaggaggttgttaagtctgcaagacacatgaatattccagcacgagggtacttatgaaatcccacaaattctgttttgttaatgtttattgttaaagcttactcaaaaattatctagagattcttatatcatttataaaaatatacatagaatatcatatttctattttgtttaatcagggtaatcactatatagttacatctcattaacatcactgctgattattagtgagtatctagcttgtggaatgtgtcatgcagttgaaatcagaggaactagcatgcaaatctggcattattaactattttattaacactctagcacccaaatgcagccctcttatctcagcctacatgtgctgataagttggtataaactcacaacagcttttggaaaagaatcacctaatgtggttttcaaattttttttaaaacatgactttttcttcaaagagtattttatgtagaacttcaatagaatacagcagatataaaattgagctgctctgggaaatcattttatccattctttctccccctcaatggctgacttttctacttcctctgggtgatcccaaatcacctccatagtatcttgcagaacactgtttaaaaatacttgataaattgcttatagaagataaatataaactttcagttctctactattttctattatatgtgatttctataaatttaggagtatcagagatatcaatccctttctcctcgccttgcctttttcttgtggaaacttatcagctgttcattctaagagatgttgattacaggacatggaaaataaaaactgacccaagatccacaaacctaattttctctctcaggagtttagaaatggtataccaaacatggttacttgtattgaaagattatgtgattttgtcactgagttcactattttggggttcctaggatggagccacatgcaaaccagtgacaggacagagtagtagaaagcagaaatggaaaaaggaggctcctagcggtgatgagaggtatgggggagggaggagagggaaaaatctgccttggtgcttgtctgcttccaggaccaatagttgcctcaagtattataaccaggcctatgggttgtgaaacctataatgcatttttgtgtgtgtttgtttcttaaggaagaatttgtttctaagacattagctactttttctattaattttataaatatggagatatgatgaacacacatcgtaacaagttaaagtgcatagcgattggtaatagaaggttgaaagctggggatggatttgggtgcaggctgtacttcccttagttgaggtgagcaaagttcatggtagcgggaaagattcaacagttaatgagaaagataagtgagtcaattgtgactgaaaatattagtgaaatgattggaatttcaatcaaggtgttttgggggaacaattagagttagactatacctagtaaaatattttgttagtttgttttctatttatatttttcctgtcctccatagtaagtctacatgagtttctaaaatttgaaattacttttgtaattaagatagatgcatatcatgtaaggactatatgagaaaaatttaaaatccaaggcaatgtacttccaaagacataaaataaaggatatttatttttcaggcaaaagttacaaaaccacaatcaaaaaggagagatatactattggtttctcaattcgaatataaataagttgtctcaattttctttaaaataaagagaaagatgaagaccctattctacttcaatatgtgtttaaagtgtggagtataagctttaaagtaattctcattggaaagttaaaaagtatgtgactataagaagtaaattgcttatgtagcttgctcttcaaataggaagggtttttttagtgttgaaagatggatgcaaatataagttgtaggaagtaaccttttattatcttagctttctgttgtaaaatggaatagttaatgtaactgggctaataaaaatcttaaaccctcttaa

SEQ ID NO: 102735 - DNA, 884 bp, Homo sapiens
  Payload ID: 39
  Gene Symbol: HMGCLL1
  Gene Name: 3-hydroxymethyl-3-methylglutaryl-CoA lyase-like 1
  ENST ID: ENST00000508459
  CDS Start-End: 51-575
atcctcctccagtctccctcccctcgccgactgccgccccaggctccgccatggggaatgtgccatccgcggtgaagcactgcctcagctaccagcagcttctccgggagcatctctggatcggggattcagtggcaggggcgctcgaccccgcgcaggaaacatcccagttatctggactccctgagtttgttaaaatagtagaagttgggcctagggatggattgcagaatgaaaaggttatagttcctacagatataaaaattgaatttatcaatcgactttcccaaactggcttgtctgtaatagaagtgactagctttgtgtcttccagatgggtaccacagatgggaattaatgtggtggactccgcagtatccggattaggtggctgcccttatgcaaaaggtgcttctgggaatgtagccactgaggatttgatatatatgcttaatggcctggggctcaatacaggtgtgaatctatacaaagtgatggaagctggtgactttatttgcaaagctgtgaataaaaccacaaactctaaagtagcacaagcctccttcaatgcttgacttgaatggatttatgacgtaccgttgagaagatcaatttcagctacaatactcatctgaaaatcattaatgccaacttgctctgatatgtgaagtaatggacaagagtgggaaaaaagagatccttttcaaaaagattataactggatagattaagtcaacaaaatgcaatatcagtcatcaggtaaattgcaagctgaggataaataataaaacttgtcataattttgaacttggaaaaaagtttcttttgctctcatagaaataactttttaatttagtagatgggaaaattgacttcgtatttcc

SEQ ID NO: 102736 - DNA, 569 bp, Homo sapiens
  Payload ID: 39
  Gene Symbol: HMGCLL1
  Gene Name: 3-hydroxymethyl-3-methylglutaryl-CoA lyase-like 1
  ENST ID: ENST00000515546
  CDS Start-End: 112-231
agtgcaccggaggggcgcgctcccgagctggcgcagtttcccagcgcggtgcccgcccctcatcctcctccagtctccctcccctcgccgactgccgccccaggctccgccatggggaatgtgccatccgcggtgaagcactgcctcagctaccagcagcttctccgggagcatctctggatcggggattcagtggcaggggcgctcgaccccgcgcaggagaaggagtagaaacattgaaggatgtaatgatcccctcagggttaagcagcttctctgttgcaatgtctaagctatggtctccggtttaggattcagtgttcgggctcttttttccaccaatagaaacatcccagttatctggactccctgagtttgttaaaatagtagaagttgggcctagggatggattgcagaatgaaaaggttatagttcctacagatataaaaattgaatttatcaatcgactttcccaaactggcttgtctgtaatagaagtgactagctttgtgtcttccagatgggtaccacagatggctgatcacactgaagtaatgaaaggcattcat

SEQ ID NO: 102737 - DNA, 1024 bp, Homo sapiens
  Payload ID: 40
  Gene Symbol: KDSR
  Gene Name: 3-ketodihydrosphingosine reductase
  Uniprot ID: Q06136
  ENST ID: ENST00000326575
  CDS Start-End: 87-893
gattctcgcctcgccgcagcccagccctgcgcgccttgcccggcggcccccgcccggccgctccgggcccctggccccgcggagcgatgctgctgctggctgccgccttcctcgtggccttcgtgctgctgctgtacatggtgtctccgctcatcagccccaagcccctcgccctgcccggggcgcatgtggtggttacaggaggttccagtggcatcgggaagtgcattgctatcgagtgctataaacaaggagcttttataactctggttgcacgaaatgaggataagctgctgcaggcaaagaaagaaattgaaatgcactctattaatgacaaacaggtggtgctttgcatatcagttgatgtatctcaagactataaccaagtagagaatgtcataaaacaagcacaggagaaactgggtccagtggacatgctggtaaattgtgcaggaatggcagtgtcaggaaaatttgaagatcttgaagttagtacctttgaagtgaagccatataatgtctacatcacagttgcttacccaccagacacagacacacctggctttgccgaagaaaacagaacaaagcctttggagactcgacttatttcagagaccacatctgtgtgcaaaccagaacaggtggccaaacaaattgttaaagatgccatacaaggaaatttcaacagttcccttggctcagatgggtacatgctctcggccctgacctgtgggatggctccagtaacttctattactgaggggctccagcaggtggtcaccatgggccttttccgcactattgctttgttttaccttggaagttttgacagcatagttcgtcgctgcatgatgcagagagaaaaatctgaaaatgcagacaaaactgcctaatcttcttaccccttggaagaagactgtttccaaataatttgaacagcttgctgctaaatgggacccaatttttggcctatagacacttatgtattgttttcgaatacgtcagattggaccagtgctcttca

SEQ ID NO: 102738 - DNA, 5447 bp, Homo sapiens
  Payload ID: 40
  Gene Symbol: KDSR
  Gene Name: 3-ketodihydrosphingosine reductase
  Uniprot ID: Q06136
  ENST ID: ENST00000406396
  CDS Start-End: 393-1391
ggcgcgctcgcatctggcgctgtccggagcccgctcgcgacgcacagggacgggaggcccggtttccacgggagaggctgcggactgcgggccccgtcccgaggccgggggagtgggagacacccggcgacccccgagaggcgattctggcagtggtggcggtggcggtggcggtggcggcctactcgccccctggaagcaccgccccgcctgggtggcgcgcgcgccggctcctcctcttcccctccgccgcggcccgccccggcccgcaaacccaaacactccaggcgcccgcccgccgcgcgtgattctcgcctcgccgcagcccagccctgcgcgccttgcccggcggcccccgcccggccgctccgggcccctggccccgcggagcgatgctgctgctggctgccgccttcctcgtggccttcgtgctgctgctgtacatggtgtctccgctcatcagccccaagcccctcgccctgcccggggcgcatgtggtggttacaggaggttccagtggcatcgggaagtgcattgctatcgagtgctataaacaaggagcttttataactctggttgcacgaaatgaggataagctgctgcaggcaaagaaagaaattgaaatgcactctattaatgacaaacaggtggtgctttgcatatcagttgatgtatctcaagactataaccaagtagagaatgtcataaaacaagcacaggagaaactgggtccagtggacatgctggtaaattgtgcaggaatggcagtgtcaggaaaatttgaagatcttgaagttagtacctttgaaaggttaatgagcatcaattacctgggcagcgtgtaccccagccgggccgtgatcaccaccatgaaggagcgccgggtgggcaggatcgtgtttgtgtcctcccaggcaggacagttgggattattcggtttcacagcctactctgcatccaagtttgccataaggggattggcagaagctttgcagatggaggtgaagccatataatgtctacatcacagttgcttacccaccagacacagacacacctggctttgccgaagaaaacagaacaaagcctttggagactcgacttatttcagagaccacatctgtgtgcaaaccagaacaggtggccaaacaaattgttaaagatgccatacaaggaaatttcaacagttcccttggctcagatgggtacatgctctcggccctgacctgtgggatggctccagtaacttctattactgaggggctccagcaggtggtcaccatgggccttttccgcactattgctttgttttaccttggaagttttgacagcatagttcgtcgctgcatgatgcagagagaaaaatctgaaaatgcagacaaaactgcctaatcttcttaccccttggaagaagactgtttccaaataatttgaacagcttgctgctaaatgggacccaatttttggcctatagacacttatgtattgttttcgaatacgtcagattggaccagtgctcttcaggaatgtggctgcaagcaaggggctagaagttcacctcctgacagtattattaatactatgcaaatatggaataggagaccatttgattttctaggctttgtggtagagaggtgaaggtatgagaattaatagcgtgtgaacaaagtaaagaacaggattccagaatgatcattaaatttgtttctatttattcttttttgcccccctagagattaagtccagaaatgtactttctggcacataaagaaatcttgaggactttgtttaaaccttccataaaaaaacaattttcggtttctcgggttctctctctctctctctctgtctctctgtctctctgtctctctgtctctctgtctctctgtctctctctctctctctctttctttctttgtgtattttattcaagatgagttggacccattgccagtgagtctgaatgtcactgacagccctgtgttgtgctcaggactcactctgctgctggtggaaactcatggcttctctctctctttgatcccataaagctacgagggggacgggagagggcagtgcaatgggaagtaaagagatattttccagtaggaaaagcaatgctttcttgtctttagactcaaatgcttagggaacgtttcatttctcattcatggggaaaggcagcctccttaaatgttttctgaagagcggtaaaatctagaagcttaagaatttacagttccttcaataaccatgatgacctgaagttcacctatcccattttagcatctacttgtttttcccatctcttcctttccaattttgcttatactgctgtaatatttttgtaaaaaaaaaaaaaaaggaaaaaaaagaccagctaaaattttcgacttgactttttaacttaactcatgaattaattaaagcaaatgaaaaaattaaaaagtgtgactttttctcggagcatatatgtagcttttaggaaaggctgatgatggtataaagtttgctcattaagaaaaaaagacaaggctgattttgaagagagttgcttttgaaataaaatgatcacctgttctttatgtgactctcccactgaacctgcagacattatttttataccacatgctaaggaagcccactcatctaactctgtagccctggaaaccctcttggcccctgaatgttgtttccaggttataggatctgtgttcattagtggattttgacagcaagtgcctctgatgagttttagccaacattccccgttgcatcctgctcattgttcacactcctctgacttgaggagagctgccttcaccttgatcttgtaacctgtcttccttgcatatacggtagcacattccagatcacttcggtgagaaaagacctctgtttttgaagaggaaactttcttaaattgtaaaataaaacttaaaaaacataaaaactctatacaaaaattgaagacctaaaaattatagcataccttttttttgctcttgagtttttgaagctcttgactttaaatgacttaactttttaaaaaataagatgttttatggctttaacccatgtttttattaagatctgagaatagcatattttaaacactgatagatacagaagaaattattatttaatatataaattgcttggaatgatttcattgcagcttgtaaggatgggttgatgccagaatggtttcataaatctttcagtcttacagagccaaagtttgcagattatatcgagttgcgttgtgcagctgctaaaatggaatcatagctttttataatttgcagaaaacaattgcattaatgtctggatgtttctcagttttattcttttctcataaatgttcctcgaatgttggcaccttctactgctgatctatattagaatctagtccaagaaagtgtctgatttaataacattaaatagttatttcaatatattttttcaaattatcctcatagaacctgttgcctccagtgagatggtaatctactacccgaataaatttaagagcacctgttgagagcccctgttttgcggtagaagacaattgtccctatcccaatttccactgaaatatgagagcagatttgcagagaccatcatgtcagagaagaaatttccttgtcagagatgttaaagggctacagtcccttagcaaagaaacttcgaaatctaagttggtttgtgtttttctaaatttgataccgtaattcatttggcagcaaaatctgacttgaactgatgtgagagtattgtactttatatttatgctacttcattgtgacttaattttccctgaagaaatatccatggatttgattataggttttcccttagatgctgtggaggtgttttgtaatattcaaaatatgcccatattgcctttttaaaaccccaaagattatgaattctgaaacacatccagcccagcgggttttggataaggggttgtaggcatttaagcagcctcacataatgggctgacttcatccaaaacatgaaaatattacaaggcaaattctattttttatattttttggttcaatgcttgaacaacttgtttttctgctgggggaagaaaaaaagaaccaaccctgagtgtgattgttacggaaactaatgactttgtttttaaaggatcacattgattcaacaccttctattggacccagaagtgcgtaaatattacctatggtagtaaacgtttaattatcattcagtttaaatgttggccttctgtatgtagccaagaacagctcattttgtgaatttcagtttttaagtggctgctttttgatttggttgtattattttattataatgtatttgcaagtatattaaaaaattaacattgagccataaaaatccccaaatatgttcaaggacttcataattgaaaaatatatagaaaacaatccttacttctttttacaaaaacaaaatcatgggaattattcttttctatatatttagttataaatctttctctgggccgggcgtggtggctcacgccagtaatcccagcactttgggaggctgagacaggcgaatcacgaggtcaggagttcgagaccagcctggccaacatggtgaaaccccgtctctactgaaaatacaaaaaattagctggacacggtggcaggcgcctgtgtgtggcgggcgccagctactcaggaggctgaggcaggagaatcgcttgaacccaggaggcagaggttgcagtgagccaagattgcgccactgcactccagcctaggtgacagtgcgagactctgtctcaaaaaaaaaaaaaaagaaaaaaaatctttatctggatctgttaaaccatatattattgatcattgcaagtgaaattttgagagattgtttctagtatttaggtgatgaaaacatttggtaatattgctttggttcaaagaattttatgtctttatctttctagaagaaagcaattatatatatatttttgctaaattacataaacatttaattacatcaggttctaatttaaacatgtattactcacttgaggccacttttaaatattcatactctttgacataagatgctttgtatatttctcatttcttttagttcttagtaagtcagctttaaaaagtacctgccaaccagaaccttccatattctggactaaatcttgctcttcggattatacttcagtgcagtaactgtggatttgcaattttgaaggggagatagtagctattatattttacacttgcttgatgtgataactctaaagactttttaactgataaaagcgcacatggctattttgatacacaaagttgtgtttgctactttagaagcttttgtggcagaattgtaatctaattttcataccttgtatttctgaatcacaacaaaaaaataaatggggaacaagacttacagatttgcaaa

SEQ ID NO: 102739 - DNA, 553 bp, Homo sapiens
  Payload ID: 40
  Gene Symbol: KDSR
  Gene Name: 3-ketodihydrosphingosine reductase
  ENST ID: ENST00000592327
  CDS Start-End: 87-553
gattctcgcctcgccgcagcccagccctgcgcgccttgcccggcggcccccgcccggccgctccgggcccctggccccgcggagcgatgctgctgctggctgccgccttcctcgtggccttcgtgctgctgctgtacatggtgtctccgctcatcagccccaagcccctcgccctgcccggggcgcatgtggtggttacaggaggttccagtggcatcgggaagtgcattgctatcgagtgctataaacaaggagcttttataactctggttgcacgaaatgaggataagctgctgcaggcaaagaaagaaattgaaatgcactctattaatgacaaacaggtggtgctttgcatatcagttgatgtatctcaagactataaccaagtagagaatgtcataaaacaagcacaggagaaactgggtccagtggacatgctggtaaattgtgcaggaatggcagtgtcaggaaaatttgaagatcttgaaaggttaatgagcatcaattacctgggcagcgtgtaccccagccgggccgtgatcaccaccatgaa

SEQ ID NO: 102740 - DNA, 1011 bp, Homo sapiens
  Payload ID: 40
  Gene Symbol: KDSR
  Gene Name: 3-ketodihydrosphingosine reductase
  ENST ID: ENST00000591902
  CDS Start-End: 1-612
caagactataaccaagtagagaatgtcataaaacaagcacaggagaaactgggtccagtggacatgctggtaaattgtgcaggaatggcagtgtcaggaaaatttgaagatcttgaagttagtacctttgaaaggttaatgagcatcaattacctgggcagcgtgtaccccagccgggccgtgatcaccaccatgaaggagcgccgggtgggcaggatcgtgtttgtgtcctcccaggcaggacagttgggattattcggtttcacagcctactctgcatccaagtttgccataaggggattggcagaagctttgcagatggaggtgaagccatataatgtctacatcacagttgcttacccaccagacacagacacacctggctttgccgaagaaaacagaacaaagcctttggagactcgacttatttcagagaccacatctgtgtgcaaaccagaacaggtggccaaacaaattgttaaagatgccatagtggtcaccatgggccttttccgcactattgctttgttttaccttggaagttttgacagcatagttcgtcgctgcatgatgcagagagaaaaatctgaaaatgcagacaaaactgcctaatcttcttaccccttggaagaagactgtttccaaataatttgaacagcttgctgctaaatgggacccaatttttggcctatagacacttatgtattgttttcgaatacgtcagattggaccagtgctcttcaggaatgtggctgcaagcaaggggctagaagttcacctcctgacagtattattaatactatgcaaatatggaataggagaccatttgattttctaggctttgtggtagagaggtgaaggtatgagaattaatagcgtgtgaacaaagtaaagaacaggattccagaatgatcattaaatttgtttctatttattcttttttgcccccctagagattaagtccagaaatgtactttctggcacataaagaaatcttgaggactttgttta

SEQ ID NO: 102741 - DNA, 3388 bp, Homo sapiens
  Payload ID: 41
  Gene Symbol: OXCT1
  Gene Name: 3-oxoacid CoA transferase 1
  Uniprot ID: P55809
  ENST ID: ENST00000196371
  CDS Start-End: 162-1724
agcagccagcagcgcgccggtggcgtgcggctcgaaaggccgggaggacgtcatcgacgcgctgtcgagcctccagcccgcccgggtttccttcgcagtcgcgcaccgacgctcaaacgcgcgctccaacccgcagcctcctcctgcctcaccgcccgaagatggcggctctcaaactcctctcctccgggcttcggctctgcgcctctgcccgcggatctggggcaacctggtacaagggatgtgtttgttccttttccaccagtgctcatcgccataccaagttttatacagatccagtagaagctgtaaaagacatccctgatggtgccacggttttggttggtggttttgggctatgtggaattccagagaatcttatagatgctttactgaaaactggagtaaaaggactaactgcagtcagcaacaatgcaggggttgacaattttggtttggggcttttgcttcggtccaagcagataaaacgcatggtctcttcatatgtgggagaaaatgcagaatttgaacgacagtacttatctggtgaattagaagtggagctgacaccacagggcacacttgcagagaggatccgtgcaggcggggctggagttcctgcattttacaccccaacagggtatgggaccctggtacaagaaggaggatcgcccatcaaatacaacaaagatggcagtgttgccattgccagtaagccaagagaggtgagggagttcaatggtcagcactttattttggaggaagcaattacaggggattttgctttggtgaaagcctggaaggcggaccgagcaggaaacgtgattttcaggaaaagtgcaaggaatttcaacttgccaatgtgcaaagctgcagaaaccacagtggtagaggttgaagaaattgtggatattggagcatttgctccagaagacatccatattcctcagatttatgtacatcgccttataaagggagaaaaatatgagaaaagaattgagcgtttatcaatccggaaagagggagatggggaagccaaatctgctaaacctggagatgacgtaagggaacgaatcatcaagagggccgctcttgagtttgaggatggcatgtatgctaatttgggcataggaatccctctcctggccagcaattttatcagcccaaatataactgttcatcttcaaagtgaaaatggagttctgggtttgggtccatatccacgacaacatgaagctgatgcagatctcatcaatgcaggcaaggaaacagttactattcttccaggagcctcttttttctccagcgatgaatcatttgcaatgattagaggtggacacgtcgatctgacaatgctaggagcgatgcaggtttccaaatatggtgacctggctaactggatgatacctgggaagatggtgaaaggaatgggaggtgctatggatttagtgtccagtgcgaaaaccaaagtggtggtcaccatggagcattctgcaaagggaaatgcacataaaatcatggagaaatgtacattaccattgactggaaagcaatgtgtcaaccgcattattactgaaaaggctgtgtttgatgtggacaagaagaaagggttgactctgattgagctctgggaaggcctgacagtggatgacgtacagaagagtactgggtgtgattttgcagtttcaccaaaactcatgccaatgcagcagatcgcaaattgaaatatggatatttgtaccaggctgcgtgtttttcattttaaacacacaagatttaattgaaaggacatcaataatcataattgtgtatttaacaggtggttttttattagttttcttgtgtttcagactttatgcagccatataaactgttctctaggcatgctgtgacattttaataaaaagcaaaaggagcatttataattatctcatttgttaaggctgagaaggttgtttttataataggtaattatattgaatgcattttcactgaatatggtatgtatgctaaattatatgaacctttccccaagaagggccctagaaattgatgtggctttcctcttaaatattaattattagtcctgaaagaaagataacatatgtgatttttgtggttaggagagttgctgtcatgattgttttttcttcagcctcctctgacttttcttttggggcttcagattttatgattacatcttgtccccctagaacatcccccttcctcccatactgcttttaaacagatgcccaagaaggcaagcaggaatgcctcttgtgggggagggcagggagaaataactagttcaaaccaactatctatctatgctttgcaaagactaaggcgtattataggaagagggctagaaacctaactgattcttctcagttttctcattttaaaacagcccagtattcctttgtatcctcaagggtccttgagaatacttctgttattgagaccctgtgggctacttgtactgtacctcctctcaagccaagaagggctgtgggataatttaccatgaatccttagtagcaatgacagcagagttaaaaaataaaaggtgttttactttcaggctcttgttttggttcagaggagattttaaatattgaatgacacttctacagaacaacggtttttcttctgccaaggctacttcctttaacgaagtgcctttaattcagccttatccaactagggaaaataatgttggacaagtctaggatttgaagagtcagtgaacttttagtgtcagggaataaacatggtgggtagattaggtttgaaaaaaacttccttagaggtatttattctcaatacctgacaggggcccatgggaatgacttcagaagcatcccggataatagatgggtaaaaagtctaggcaccctgaagaacaggtgagacagctggcctctggacagaggtaggcatagtacagtacgatatatcattcctctggtcctaaatatacaaacttattcatgtttttaggtgatgatggtcattgaaactcacttcttttcaggtgtagctacaattgtgtaatgtacaatattagagaaaggacaggctttttatgagtaacacacaccatatataaaacagcctttctggctgaccacatggttaaatgcataccttcccagtactggggggaaaaaatgacccttcttagaatgtgcaagttccatgagagtaatatattgatatgattttgaaaagaattgttgatagttacatcttcaaacttatcattccagtatgcatctttaagataatgtgattctaagtagatgactttatattcttgattgaagagtgctatacatgttaagaaatgcattaaggaatacaataaatattctaaagtgatgta

SEQ ID NO: 102742 - DNA, 1593 bp, Homo sapiens
  Payload ID: 41
  Gene Symbol: OXCT1
  Gene Name: 3-oxoacid CoA transferase 1
  Uniprot ID: P55809
  ENST ID: ENST00000512084
  CDS Start-End: 234-605
actttctagctagtgtttgtgttcaagtagtcacattctgcctcactgaaggaaacagtcttcctgtgtacacctgttcatagtttgttattgaaacaatgtatactgtaacttttttttcaaaaagaatttttagtgattatttctctgtcagcatggagctgatctattaggaaatcagttgtgtggtgggggaagcaagtatattttggtgtggacacgtcgatctgacaatgctaggagcgatgcaggtttccaaatatggtgacctggctaactggatgatacctgggaagatggtgaaaggaatgggaggtgctatggatttagtgtccagtgcgaaaaccaaagtggtggtcaccatggagcattctgcaaagggaaatgcacataaaatcatggagaaatgtacattaccattgactggaaagcaatgtgtcaaccgcattattactgaaaaggctgtgtttgatgtggacaagaagaaagggttgactctgattgagctctgggaaggcctgacagtggatgacgtacagaagagtactgggtgtgattttgcagtttcaccaaaactcatgccaatgcagcagatcgcaaattgaaatatggatatttgtaccaggctgcgtgtttttcattttaaacacacaagatttaattgaaaggacatcaataatcataattgtgtatttaacaggtggttttttattagttttcttgtgtttcagactttatgcagccatataaactgttctctaggcatgctgtgacattttaataaaaagcaaaaggagcatttataattatctcatttgttaaggctgagaaggttgtttttataataggtaattatattgaatgcattttcactgaatatggtatgtatgctaaattatatgaacctttccccaagaagggccctagaaattgatgtggctttcctcttaaatattaattattagtcctgaaagaaagataacatatgtgatttttgtggttaggagagttgctgtcatgattgttttttcttcagcctcctctgacttttcttttggggcttcagattttatgattacatcttgtccccctagaacatcccccttcctcccatactgcttttaaacagatgcccaagaaggcaagcaggaatgcctcttgtgggggagggcagggagaaataactagttcaaaccaactatctatctatgctttgcaaagactaaggcgtattataggaagagggctagaaacctaactgattcttctcagttttctcattttaaaacagcccagtattcctttgtatcctcaagggtccttgagaatacttctgttattgagaccctgtgggctacttgtactgtacctcctctcaagccaagaagggctgtgggataatttaccatgaatccttagtagcaatgacagcagagttaaaaaataaaaggtgttttactttcaggctcttgttttggttcagaggagattttaaatattgaatgacacttctacagaacaacggtttttcttctgccaaggctacttcctttaacgaagtgcctttaattcagccttatccaactagggaaa

SEQ ID NO: 102743 - DNA, 1441 bp, Homo sapiens
  Payload ID: 41
  Gene Symbol: OXCT1
  Gene Name: 3-oxoacid CoA transferase 1
  Uniprot ID: P55809
  ENST ID: ENST00000510634
  CDS Start-End: 182-553
atttcccagccagaaaactatcaggagtttgttcggctgcagggtgtgaaattattcacatcgaatgttgggcattgaatatccagcccactgttaggaaaagaacccccaaaatggaatccatgcctttgtgccaaccatactgaaataaacatttctaagtggacacgtcgatctgacaatgctaggagcgatgcaggtttccaaatatggtgacctggctaactggatgatacctgggaagatggtgaaaggaatgggaggtgctatggatttagtgtccagtgcgaaaaccaaagtggtggtcaccatggagcattctgcaaagggaaatgcacataaaatcatggagaaatgtacattaccattgactggaaagcaatgtgtcaaccgcattattactgaaaaggctgtgtttgatgtggacaagaagaaagggttgactctgattgagctctgggaaggcctgacagtggatgacgtacagaagagtactgggtgtgattttgcagtttcaccaaaactcatgccaatgcagcagatcgcaaattgaaatatggatatttgtaccaggctgcgtgtttttcattttaaacacacaagatttaattgaaaggacatcaataatcataattgtgtatttaacaggtggttttttattagttttcttgtgtttcagactttatgcagccatataaactgttctctaggcatgctgtgacattttaataaaaagcaaaaggagcatttataattatctcatttgttaaggctgagaaggttgtttttataataggtaattatattgaatgcattttcactgaatatggtatgtatgctaaattatatgaacctttccccaagaagggccctagaaattgatgtggctttcctcttaaatattaattattagtcctgaaagaaagataacatatgtgatttttgtggttaggagagttgctgtcatgattgttttttcttcagcctcctctgacttttcttttggggcttcagattttatgattacatcttgtccccctagaacatcccccttcctcccatactgcttttaaacagatgcccaagaaggcaagcaggaatgcctcttgtgggggagggcagggagaaataactagttcaaaccaactatctatctatgctttgcaaagactaaggcgtattataggaagagggctagaaacctaactgattcttctcagttttctcattttaaaacagcccagtattcctttgtatcctcaagggtccttgagaatacttctgttattgagaccctgtgggctacttgtactgtacctcctctcaagccaagaagggctgtgggataatttaccatgaatccttagtagcaatgacagcagagttaaaaaataaaaggtgttttactttcaggctcttgttttggttcagaggagatttt

SEQ ID NO: 102744 - DNA, 1441 bp, Homo sapiens
  Payload ID: 41
  Gene Symbol: OXCT1
  Gene Name: 3-oxoacid CoA transferase 1
  ENST ID: ENST00000509987
  CDS Start-End: 78-1082
cattttgtgcagtgatggagtgtggcaatggatgcttgttttaattcccggaaataaaccgtcaagaataaaagaacatgatggtgagggagttcaatggtcagcactttattttggaggaagcaattacaggggattttgctttggtgaaagcctggaaggcggaccgagcaggaaacgtgattttcaggaaaagtgcaaggaatttcaacttgccaatgtgcaaagctgcagaaaccacagtggtagaggttgaagaaattgtggatattggagcatttgctccagaagacatccatattcctcagatttatgtacatcgccttataaagggagaaaaatatgagaaaagaattgagcgtttatcaatccggaaagagggagatggggaagccaaatctgctaaacctggagatgacgtaagggaacgaatcatcaagagggccgctcttgagtttgaggatggcatgtatgctaatttgggcataggaatccctctcctggccagcaattttatcagcccaaatataactgttcatcttcaaagtgaaaatggagttctgggtttgggtccatatccacgacaacatgaagctgatgcagatctcatcaatgcaggcaaggaaacagttactattcttccaggagcctcttttttctccagcgatgaatcatttgcaatgattagaggtggacacgtcgatctgacaatgctaggagcgatgcaggtttccaaatatggtgacctggctaactggatgatacctgggaagatggtgaaaggaatgggaggtgctatggatttagtgtccagtgcgaaaaccaaagtggtggtcaccatggagcattctgcaaagggaaatgcacataaaatcatggagaaatgtacattaccattgactggaaagcaatgtgtcaaccgcattattactgaaaaggctgtgtttgatgtggacaagaagaaagggttgactctgattgagctctgggaaggcctgacagtggatgacgtacagaagagtactgggtgtgattttgcagtttcaccaaaactcatgccaatgcagcagatcgcaaattgaaatatggatatttgtaccaggctgcgtgtttttcattttaaacacacaagatttaattgaaaggacatcaataatcataattgtgtatttaacaggtggttttttattagttttcttgtgtttcagactttatgcagccatataaactgttctctaggcatgctgtgacattttaataaaaagcaaaaggagcatttataattatctcatttgttaaggctgagaaggttgtttttataataggtaattatattgaatgcattttcactgaatatggtatgtatgctaaattatatgaacctttccccaagaagggccctagaaattgatgtggctttcctcttaaatattaattatta

SEQ ID NO: 102745 - DNA, 1826 bp, Homo sapiens
  Payload ID: 42
  Gene Symbol: OXCT2
  Gene Name: 3-oxoacid CoA transferase 2
  Uniprot ID: Q9BYC2
  ENST ID: ENST00000327582
  CDS Start-End: 94-1647
cagggcgcgggcgcccgccctgctctgtgacgcgcggcccgaggcgcacgcagggctcacaccacctgtcctggcctccgacccgggccgactatggcggcgctgcggctcctggcgtcagtgctcgggcgcggggtccccgccggcggctcagggctcgcgctgtcccagggctgcgcccgctgctttgccaccagtccccggctccgtgccaagttctacgcggacccggtggagatggtgaaggacatctctgacggggcgaccgtcatgatcgggggcttcgggctctgcgggatccccgagaacctgatcgccgcgctgctcaggacccgcgtgaaagacctgcaggtggtcagcagcaacgtgggcgtggaggacttcggcctgggcctcctgctggccgccaggcaggtccgtcgcatcgtctgttcctacgtgggcgagaacaccctgtgcgagagccagtacctggcaggagagctggagctggagctcacgccccagggcaccctggccgagcgcatccgcgcggggggcgccggggtgcccgccttctacacccccacgggctacgggaccctggtccaggaagggggcgcccccatccgctacaccccggacggccacctggcgctcatgagccagccccgagaggtgagggagttcaacggcgaccacttccttttggagcgcgccatccgggcagacttcgccctggtgaaagggtggaaggccgaccgggcaggaaacgtggtcttcaggagaagcgcccgcaatttcaacgtgcccatgtgcaaagctgcagacgtcacggcggtggaggtggaagagatcgtggaggtgggggctttccccccagaagacatccacgttcctaacatttatgtagatcgcgtgataaaggggcagaaatacgagaaacgaattgagcgcttaacgatcctgaaagaggaagatggagacgctggaaaggaagaggacgccaggacgcgcatcatcagacgcgcagctctggaatttgaggacggcatgtacgccaatctgggcataggcatccccctgctggccagcaacttcatcagtcccagcatgactgtccatcttcacagtgagaacgggatcctgggcctgggcccgtttcccacggaagatgaggtggatgccgacctcatcaatgcaggcaagcagacggtcacggtgcttcccgggggctgcttcttcgccagcgacgactccttcgccatgatccgagggggacacatccaactaaccatgcttggagccatgcaggtttccaaatacggcgacctggcgaactggatgatccctggcaagaaggtgaaaggcatgggcggtgccatggacttggtgtccagtcagaagaccagagtggtggtcaccatgcagcactgcacaaaggacaacacccccaagatcatggagaaatgcaccatgccgctgaccgggaagcggtgcgtggaccgcatcatcaccgagaaggccgtgtttgacgtgcacaggaagaaagagctgacgctgagggagctctgggagggcctgacggtggacgacatcaaaaagagcacggggtgtgcctttgctgtgtccccgaacctcaggcccatgcagcaggtggcaccctgacgggacctggatctgggcggggtggtgcgctcctcagggcgggtgccaccgggttccccaggggaatacatgtccccagctctgggaggggtttgctactggcctcctactttcctccctaggtggacagtgctcctctagagagctgcgactttaattaaaaacaacaggaaaacaga

SEQ ID NO: 102746 - DNA, 1519 bp, Homo sapiens
  Payload ID: 43
  Gene Symbol: OXSM
  Gene Name: 3-oxoacyl-ACP synthase, mitochondrial
  Uniprot ID: Q9NWU1
  ENST ID: ENST00000280701
  CDS Start-End: 100-1479
gtgcgcgtgcgctcgagagcgtcatcgcccccgactgtggagaagtgtccggggtagccccgttacaggaatgtgtttctgatcatctgaatcttaatcatgtccaactgcctgcaaaatttcctgaaaattacaagcactcgtcttctatgttcaagattatgccaacagttaagaagtaaaaggaagtttttcggaactgtgccaatatccagattgcataggcgagttgtcattacaggcattggcttagtgactcctcttggtgttggaactcacctggtttgggatcgtcttatcggaggagagagtggaattgtttcactggttggtgaagagtataagagtatcccttgcagtgttgctgcttatgtgccaagaggtagtgatgaaggtcagttcaatgaacaaaactttgtgtccaaatcagatatcaagtccatgtcttctcccaccatcatggccattggggctgcagaattagccatgaaggattctggctggcatcctcagtcagaagctgatcaagtggctactggtgttgcaattggcatgggaatgattcctcttgaagttgtttctgaaactgctttgaattttcagacaaaaggttacaataaagttagcccattttttgtccctaagattctggtcaatatggcagcaggccaggtcagcattcgatataaactcaagggcccaaatcatgcagtatccacagcctgtaccacaggagctcatgctgtgggagactcatttagatttatagcccatggtgatgctgatgtgatggtggctggaggtacagattcttgtattagccctttatctcttgctgggttttccagagcccgggctctgagcacaaactcagatcccaagttggcatgtcgaccatttcatccaaagagagatggttttgtaatgggagaaggtgcagctgtgctggtgctggaagaatatgaacatgctgttcaaagaagagcccggatctatgcagaagttttgggctatggactctcaggtgatgctggtcacataactgcccctgatcctgaaggagaaggtgccttaaggtgtatggctgctgctttaaaagatgcaggtgtgcagcctgaggagatatcctatatcaatgcacatgctacttccacaccattgggagatgctgctgaaaacaaagctatcaaacatctcttcaaagaccatgcatatgcccttgcagtttcctcaactaagggagcaacaggacatctgctgggagctgcaggggcagtcgaggcagcttttaccacattagcttgttattatcaaaaactaccacctactttaaacctggattgttcggaaccagaatttgatctcaactatgttccactaaaggcacaggaatggaaaactgagaaaagatttattggcctcaccaattcctttggttttggtggtactaatgcaacactttgtattgctggactgtagaacatataatttgtaattaaatactgatttttaaatgcta

SEQ ID NO: 102747 - DNA, 899 bp, Homo sapiens
  Payload ID: 43
  Gene Symbol: OXSM
  Gene Name: 3-oxoacyl-ACP synthase, mitochondrial
  ENST ID: ENST00000452098
  CDS Start-End: 240-899
acttggccgggtcccgaggcccctggccggcgggctcggacgttaggagcagaaccagctccaggtcccggtctgtccgggcgtcgctgccctctgaagctcaggccggacgccccagtccctggccgaacaaggtgccgcggcccacccaccccggtacccgccgtccgaccccgttgccctgcacctgaggatgttgtcagcataggaatgtgtttctgatcatctgaatcttaatcatgtccaactgcctgcaaaatttcctgaaaattacaagcactcgtcttctatgttcaagattatgccaacagttaagaagtaaaaggaagtttttcggaactgtgccaatatccagattgcataggcgagttgtcattacaggcattggcttagtgactcctcttggtgttggaactcacctggtttgggatcgtcttatcggaggagagagtggaattgtttcactggttggtgaagagtataagagtatcccttgcagtgttgctgcttatgtgccaagaggtagtgatgaaggtcagttcaatgaacaaaactttgtgtccaaatcagatatcaagtccatgtcttctcccaccatcatggccattggggctgcagaattagccatgaaggattctggctggcatcctcagtcagaagctgatcaagtggctactggtgttgcaattggcatgggaatgattcctcttgaagttgtttctgaaactgctttgaattttcagacaaaaggttacaataaagttagcccattttttgtccctaagattctggtcaatatggcagcaggccaggtcagcattcgatataaactcaagggcccaaatcatgcagtatccacagcctgtaccacaggagctcatgctgtgggagactcattt

SEQ ID NO: 102748 - DNA, 1044 bp, Homo sapiens
  Payload ID: 43
  Gene Symbol: OXSM
  Gene Name: 3-oxoacyl-ACP synthase, mitochondrial
  ENST ID: ENST00000448177
  CDS Start-End: 90-398
gctcgagagcgtcatcgcccccgactgtggagaagtgtccggggtagccccgttacaggaatgtgtttctgatcatctgaatcttaatcatgtccaactgcctgcaaaatttcctgaaaattacaagcactcgtcttctatgttcaagattatgccaacagttaagaagtaaaaggaagtttttcggaactgtgccaatatccagattgcataggcgagttgtcattacaggcattggcttagtgactcctcttggtgttggaactcacctggtttgggatcgtcttatcggaggagagagtggaattgtttcactggttggtgaagagtataagagtatcccttgcagtgttgctgcttatgtgccaagaggtagtgatgaagagcccgggctctgagcacaaactcagatcccaagttggcatgtcgaccatttcatccaaagagagatggttttgtaatgggagaaggtgcagctgtgctggtgctggaagaatatgaacatgctgttcaaagaagagcccggatctatgcagaagttttgggctatggactctcaggtgatgctggtcacataactgcccctgatcctgaaggagaaggtgccttaaggtgtatggctgctgctttaaaagatgcaggtgtgcagcctgaggagatatcctatatcaatgcacatgctacttccacaccattgggagatgctgctgaaaacaaagctatcaaacatctcttcaaagaccatgcatatgcccttgcagtttcctcaactaagggagcaacaggacatctgctgggagctgcaggggcagtcgaggcagcttttaccacattagcttgttattatcaaaaactaccacctactttaaacctggattgttcggaaccagaatttgatctcaactatgttccactaaaggcacaggaatggaaaactgagaaaagatttattggcctcaccaattcctttggttttggtggtactaatgcaacactttgtattgctggactgtagaacatataatttgtaattaaatactgatt

SEQ ID NO: 102749 - DNA, 756 bp, Homo sapiens
  Payload ID: 43
  Gene Symbol: OXSM
  Gene Name: 3-oxoacyl-ACP synthase, mitochondrial
  ENST ID: ENST00000428266
  CDS Start-End: 63-756
gtctgacggcacttaaggtctaaaaaagaaggaatgtgtttctgatcatctgaatcttaatcatgtccaactgcctgcaaaatttcctgaaaattacaagcactcgtcttctatgttcaagattatgccaacagttaagaagtaaaaggaagtttttcggaactgtgccaatatccagattgcataggcgagttgtcattacaggcattggcttagtgactcctcttggtgttggaactcacctggtttgggatcgtcttatcggaggagagagtggaattgtttcactggttggtgaagagtataagagtatcccttgcagtgttgctgcttatgtgccaagaggtagtgatgaaggtcagttcaatgaacaaaactttgtgtccaaatcagatatcaagtccatgtcttctcccaccatcatggccattggggctgcagaattagccatgaaggattctggctggcatcctcagtcagaagctgatcaagtggctactggtgttgcaattggcatgggaatgattcctcttgaagttgtttctgaaactgctttgaattttcagacaaaaggttacaataaagttagcccattttttgtccctaagattctggtcaatatggcagcaggccaggtcagcattcgatataaactcaagggcccaaatcatgcagtatccacagcctgtaccacaggagctcatgctgtgggagactcatttagatttatagcccatggtgatgctgatgtgatgg

SEQ ID NO: 102750 - DNA, 1256 bp, Homo sapiens
  Payload ID: 43
  Gene Symbol: OXSM
  Gene Name: 3-oxoacyl-ACP synthase, mitochondrial
  Uniprot ID: Q9NWU1
  ENST ID: ENST00000420173
  CDS Start-End: 86-1216
gagagcgtcatcgcccccgactgtggagaagtgtccggggtagccccgttacaggaatgtgtttctgatcatctgaatcttaatcatgtccaactgcctgcaaaatttcctgaaaattacaagcactcgtcttctatgttcaagattatgccaacagttaagaagtaaaaggaagtttttcggaactgtgccaatatccagattgcataggcgagttgtcattacaggcattggcttagtgactcctcttggtgttggaactcacctggtttgggatcgtcttatcggaggagagagtggaattgtttcactggttggtgaagagtataagagtatcccttgcagtgttgctgcttatgtgccaagaggtagtgatgaaggtcagttcaatgaacaaaactttgtgtccaaatcagatatcaagtccatgtcttctcccaccatcatggccattggggctgcagaattagccatgaaggattctggctggcatcctcagtcagaagctgatcaagtggctactggtgttgcaattggcatgggaatgattcctcttgaagttgtttctgaaactgctttgaattttcagacaaaaggttacaataaagttagcccattttttgtccctaagattctggtcaatatggcagcaggccaggtcagcattcgatataaactcaagggcccaaatcatgcagtatccacagcctgtaccacaggagctcatgctgtgggagactcatttagatttatagcccatggtgatgctggtcacataactgcccctgatcctgaaggagaaggtgccttaaggtgtatggctgctgctttaaaagatgcaggtgtgcagcctgaggagatatcctatatcaatgcacatgctacttccacaccattgggagatgctgctgaaaacaaagctatcaaacatctcttcaaagaccatgcatatgcccttgcagtttcctcaactaagggagcaacaggacatctgctgggagctgcaggggcagtcgaggcagcttttaccacattagcttgttattatcaaaaactaccacctactttaaacctggattgttcggaaccagaatttgatctcaactatgttccactaaaggcacaggaatggaaaactgagaaaagatttattggcctcaccaattcctttggttttggtggtactaatgcaacactttgtattgctggactgtagaacatataatttgtaattaaatactgatttttaaatgcta

SEQ ID NO: 102751 - DNA, 309 bp, Homo sapiens
  Payload ID: 43
  Gene Symbol: OXSM
  Gene Name: 3-oxoacyl-ACP synthase, mitochondrial
  ENST ID: ENST00000626005
  CDS Start-End: 1-309
atgtccaactgcctgcaaaatttcctgaaaattacaagcactcgtcttctatgttcaagattatgccaacagttaagaagtaaaaggaagtttttcggaactgtgccaatatccagattgcataggcgagttgtcattacaggcattggcttagtgactcctcttggtgttggaactcacctggtttgggatcgtcttatcggaggagagagtggaattgtttcactggttggtgaagagtataagagtatcccttgcagtgttgctgcttatgtgccaagaggtagtgatgaagagcccgggctctga

SEQ ID NO: 102752 - DNA, 2731 bp, Homo sapiens
  Payload ID: 44
  Gene Symbol: PAPSS1
  Gene Name: 3'-phosphoadenosine 5'-phosphosulfate synthase 1
  Uniprot ID: O43252
  ENST ID: ENST00000265174
  CDS Start-End: 274-2148
gcgagcgctgaagctccgcccccagcttctacctccggttctatcccggcgtttcgcccttccccacagacctctgccccggacccatttccgaggcgcgccgcatgcgccgcgcaacccaggccacgagcacgggcgcgtgcttaagtcagcgcgcgcccgctccgacgcgaggaggccccgccctccagccccgccccgctcgctggcctgccctcctcttgctaccctcccggcgcagagaaccccggctgctcagcgcgctccgcggtcatggagatccccgggagcctgtgcaagaaagtcaaactgagcaataacgcgcagaactggggaatgcagagagcaaccaatgtcacctaccaagcccatcatgtcagcaggaacaagagaggtcaggtggtggggaccagaggtggctttcgtggttgcacagtttggctaacaggcttgtctggagcgggaaagactactgtgagcatggccttggaggagtacctggtttgtcatggtattccatgctacactctggatggtgacaatattcgtcaaggtctcaataaaaatcttggctttagtcctgaagacagagaagagaatgttcgacgcatcgcagaagttgctaaactgtttgcagatgctggcttagtgtgcatcacaagtttcatatcaccttacactcaggatcgcaacaatgcaaggcaaattcatgaaggtgcaagtttaccgttttttgaagtatttgttgatgctcctctgcatgtttgtgaacagagggatgtcaaaggactctacaaaaaagcccgggcaggagaaattaaaggtttcactgggatcgattctgaatatgaaaagccagaggcccctgagttggtgctgaaaacagactcctgtgatgtaaatgactgtgtccagcaagttgtggaacttctacaggaacgggatattgtacctgtggatgcatcttatgaagtaaaagaactatatgtgccagaaaataaacttcatttggcaaaaacagatgcggaaacattaccagcactgaaaattaataaagtggatatgcagtgggtgcaggttttggcagaaggttgggcaaccccattgaatggctttatgagagagagggagtacttgcagtgccttcattttgattgtcttctggatggaggtgtcattaacttgtcagtacctatagttctgactgcgactcatgaagataaagagaggctggacggctgtacagcatttgctctgatgtatgagggccgccgtgtggccattcttcgcaatccagagttttttgagcacaggaaagaggagcgctgtgccagacagtggggaacgacatgcaagaaccacccctatattaagatggtgatggaacaaggagattggctgattggaggagatcttcaagtcttggatcgagtttattggaatgatggtcttgatcagtatcgtcttactcctactgagctaaagcagaaatttaaagatatgaatgctgatgctgtctttgcatttcaactacgcaacccagtgcacaatggacatgccctgttaatgcaggatacccataagcaacttctagagaggggctaccggcgccctgtcctcctcctccaccctctgggtggctggacaaaggatgacgatgttcctttgatgtggcgtatgaagcagcatgctgcagtgttggaggaaggagttctgaatcctgagacgacagtggtggccatcttcccatctcccatgatgtatgctggaccaactgaggtccagtggcattgcagagcacggatggttgcaggagccaacttttacattgttggacgagaccctgctggcatgcctcatccagaaacagggaaggatctttatgagccaagtcatggtgccaaagtgctgacgatggcccctggtttaatcactttggaaatagttccctttcgagttgcagcttacaacaagaaaaagaagcgtatggactactatgactctgaacaccatgaagactttgaatttatttcaggaacacgaatgcgcaaacttgctcgagaaggccagaaaccacctgaaggtttcatggctcccaaggcttggaccgtgctgacagaatactacaaatccttggagaaagcttaggctgttaacccagtcactccacctttgacacattactagtaacaagaggggaccacatagtctctgttggcatttctttgtggtgtctgtctggacatgcttcctaaaaacagaccattttccttaacttgcatcagttttggtctgccttatgagttctgttttgaacaagtgtaacacactgatggttttaatgtatcttttccacttattatagttatattcctacaatacaattttaaaattgtctttttatattatatttatgcttctgtgtcatgattttttcaagctgttatattagttgtaaccagtagtattcacattaaatcttgctttttttccccttaaaaaaagaaaaaaattaccaaacaataaacttggctagaccttgttttgaggattttacaagacctttgtagcgattagattttttttctacattgaaaatagaaactgcttcctttcttctttccagtcagctattggtctttccagctgttataatctaaagtattcttatgatctgtgtaagctctgaatgaacttctttactcaataaaattaattttttggcttctta

SEQ ID NO: 102753 - DNA, 3949 bp, Homo sapiens
  Payload ID: 45
  Gene Symbol: PAPSS2
  Gene Name: 3'-phosphoadenosine 5'-phosphosulfate synthase 2
  Uniprot ID: O95340
  ENST ID: ENST00000361175
  CDS Start-End: 370-2214
ggccgcgtgccgggcgtgccatctgccgctccgctgcaaggtctcgcccgggaccggggctggcggagcgcgcgcccgcgagtaggggccgggccggggaccccgcctaggcggcggcggccgggtccccaaggctgggcgctgcttgcggaaccgacggggcggagaggagcgtggcgggaggaggagtaggagaagggggctggtcaagggaagtgcgacgtgtctgcggagcctttttatacctccttcccgggagtccggcagccgctgctgctgctgctgctgctgctgccgccgccgccgccgccgtccctgcgtccttcggtctctgctcccgggacccgggctccgccgcagccagccagcatgtcggggatcaagaagcaaaagacggagaaccagcagaaatccaccaatgtagtctatcaggcccaccatgtgagcaggaataagagagggcaagtggttggaacaaggggtgggttccgaggatgtaccgtgtggctaacaggtctctctggtgctggaaaaacaacgataagttttgccctggaggagtaccttgtctcccatgccatcccttgttactccctggatggggacaatgtccgtcatggccttaacagaaatctcggattctctcctggggacagagaggaaaatatccgccggattgctgaggtggctaagctgtttgctgatgctggtctggtctgcattaccagctttatttctccattcgcaaaggatcgtgagaatgcccgcaaaatacatgaatcagcagggctgccattctttgaaatatttgtagatgcacctctaaatatttgtgaaagcagagacgtaaaaggcctctataaaagggccagagctggggagattaaaggatttacaggtattgattctgattatgagaaacctgaaactcctgagcgtgtgcttaaaaccaatttgtccacagtgagtgactgtgtccaccaggtagtggaacttctgcaagagcagaacattgtaccctatactataatcaaagatatccacgaactctttgtgccggaaaacaaacttgaccacgtccgagctgaggctgaaactctcccttcattatcaattactaagctggatctccagtgggtccaggttttgagcgaaggctgggccactcccctcaaaggtttcatgcgggagaaggagtacttacaggttatgcactttgacaccctgctagatgatggcgtgatcaacatgagcatccccattgtactgcccgtctctgcagaggataagacacggctggaagggtgcagcaagtttgtcctggcacatggtggacggagggtagctatcttacgagacgctgaattctatgaacacagaaaagaggaacgctgttcccgtgtttgggggacaacatgtacaaaacacccccatatcaaaatggtgatggaaagtggggactggctggttggtggagaccttcaggtgctggagaaaataagatggaatgatgggctggaccaataccgtctgacacctctggagctcaaacagaaatgtaaagaaatgaatgctgatgcggtgtttgcattccagttgcgcaatcctgtccacaatggccatgccctgttgatgcaggacactcgccgcaggctcctagagaggggctacaagcacccggtcctcctactacaccctctgggcggctggaccaaggatgacgatgtgcctctagactggcggatgaagcagcacgcggctgtgctcgaggaaggggtcctggatcccaagtcaaccattgttgccatctttccgtctcccatgttatatgctggccccacagaggtccagtggcactgcaggtcccggatgattgcgggtgccaatttctacattgtggggagggaccctgcaggaatgccccatcctgaaaccaagaaggatctgtatgaacccactcatgggggcaaggtcttgagcatggcccctggcctcacctctgtggaaatcattccattccgagtggctgcctacaacaaagccaaaaaagccatggacttctatgatccagcaaggcacaatgagtttgacttcatctcaggaactcgaatgaggaagctcgcccgggaaggagagaatcccccagatggcttcatggcccccaaagcatggaaggtcctgacagattattacaggtccctggagaagaactaagcctttggctccagagtttctttctgaagtgctctttgattaccttttctatttttatgattagatgctttgtattaaattgcttctcaatgatgcattttaatcttttataatgaagtaaaagttgtgtctataattaaaaaaaaatatatatatatacacacacacatatacatacaaagtcaaactgaagaccaaatcttagcaggtaaaagcaatattcttatacatttcataataaaattagctctatgtattttctactgcacctgagcaggcaggtcccagatttcttaaggctttgtttgaccatgtgtctagttacttgctgaaaagtgaatatattttccagcatgtcttgacaacctgtactcttccaatgtcatttatcagttgtaaaatatatcagattgtgtcctcttctgtacaattgacaaaaaaaaaaatttttttttctcactctaaaagaggtgtggctcacatcaagattcttcctgatattttacctcatgctgtacaaagccttaatgttgtaatcatatcttacgtgttgaagacctgactggagaaacaaaatgtgcaataacgtgaattttatcttagagatctgtgcagcctatttctgtcacaaaagttatattgtctaataagagaagtcttaatggcctctgtgaataatgtaactccagttacacggtgacttttaatagcatacagtgatttgatgaaaggacgtcaaacaatgtggcgatgtcgtggaaagttatctttcccgctctttgctgtggtcattgtgtcttgcagaaaggatggccctgatgcagcagcagcgccagctgtaataaaaaataattcacactatcagactagcaaggcactagaactggaaaagaccacagaaaacaaagaatccaaccctttcatcttacaggtgaacaaactgtgatgatgcacatgtatgtgttttgtaagctgtgagcaccgtaacaaaatgtaaatttgccattattaggaagtgctggtggcagtgaagaagcacccaggccacttgactcccagtctggtgccctgtctacaccagacaacacaggagctgggtcagattcccctcagctgcttaacaaagttcctcgaacagaaagtgcttacaaagctgccttctcggatactgaaaggtcgagttttctgaactgcactgattttattgcagttgaaaaaaaaaaaaagctattccaaagatttcaagctgttctgagacatcttctgatggctttacttcctgagaggcaatgtttttactttatgcataattcattgttgccaaggaataaagtgaagaaacagcaccttttaatatataggtctctctggaagagacctaaattagaaagagaaaactgtgacaattttcatattctcattcttaaaaaacactaatcttaactaacaaaagttcttttgagaataagttacacacaatggccacagcagtttgtctttaatagtatagtgcctatactcatgtaatcggttactcactactgcctttaaaaaaaaaaaccagcatatttattgaaaacatgagacaggattatagtgccttaaccgatatattttgtgacttaaaaaatacatttaaaactgctcttctgctctagtaccatgcttagtgcaaatgattatttctatgtacaactgatgcttgttcttattttaataaatttatcagagtgaa

SEQ ID NO: 102754 - DNA, 3856 bp, Homo sapiens
  Payload ID: 45
  Gene Symbol: PAPSS2
  Gene Name: 3'-phosphoadenosine 5'-phosphosulfate synthase 2
  Uniprot ID: O95340
  ENST ID: ENST00000456849
  CDS Start-End: 264-2123
ctaggcggcggcggccgggtccccaaggctgggcgctgcttgcggaaccgacggggcggagaggagcgtggcgggaggaggagtaggagaagggggctggtcaagggaagtgcgacgtgtctgcggagcctttttatacctccttcccgggagtccggcagccgctgctgctgctgctgctgctgctgccgccgccgccgccgccgtccctgcgtccttcggtctctgctcccgggacccgggctccgccgcagccagccagcatgtcggggatcaagaagcaaaagacggagaaccagcagaaatccaccaatgtagtctatcaggcccaccatgtgagcaggaataagagagggcaagtggttggaacaaggggtgggttccgaggatgtaccgtgtggctaacaggtctctctggtgctggaaaaacaacgataagttttgccctggaggagtaccttgtctcccatgccatcccttgttactccctggatggggacaatgtccgtcatggccttaacagaaatctcggattctctcctggggacagagaggaaaatatccgccggattgctgaggtggctaagctgtttgctgatgctggtctggtctgcattaccagctttatttctccattcgcaaaggatcgtgagaatgcccgcaaaatacatgaatcagcagggctgccattctttgaaatatttgtagatgcacctctaaatatttgtgaaagcagagacgtaaaaggcctctataaaagggccagagctggggagattaaaggatttacaggtattgattctgattatgagaaacctgaaactcctgagcgtgtgcttaaaaccaatttgtccacagtgagtgactgtgtccaccaggtagtggaacttctgcaagagcagaacattgtaccctatactataatcaaagatatccacgaactctttgtgccggaaaacaaacttgaccacgtccgagctgaggctgaaactctcccttcattatcaattactaagctggatctccagtgggtccaggttttgagcgaaggctgggccactcccctcaaaggtttcatgcgggagaaggagtacttacaggttatgcactttgacaccctgctagatggcatggcccttcctgatggcgtgatcaacatgagcatccccattgtactgcccgtctctgcagaggataagacacggctggaagggtgcagcaagtttgtcctggcacatggtggacggagggtagctatcttacgagacgctgaattctatgaacacagaaaagaggaacgctgttcccgtgtttgggggacaacatgtacaaaacacccccatatcaaaatggtgatggaaagtggggactggctggttggtggagaccttcaggtgctggagaaaataagatggaatgatgggctggaccaataccgtctgacacctctggagctcaaacagaaatgtaaagaaatgaatgctgatgcggtgtttgcattccagttgcgcaatcctgtccacaatggccatgccctgttgatgcaggacactcgccgcaggctcctagagaggggctacaagcacccggtcctcctactacaccctctgggcggctggaccaaggatgacgatgtgcctctagactggcggatgaagcagcacgcggctgtgctcgaggaaggggtcctggatcccaagtcaaccattgttgccatctttccgtctcccatgttatatgctggccccacagaggtccagtggcactgcaggtcccggatgattgcgggtgccaatttctacattgtggggagggaccctgcaggaatgccccatcctgaaaccaagaaggatctgtatgaacccactcatgggggcaaggtcttgagcatggcccctggcctcacctctgtggaaatcattccattccgagtggctgcctacaacaaagccaaaaaagccatggacttctatgatccagcaaggcacaatgagtttgacttcatctcaggaactcgaatgaggaagctcgcccgggaaggagagaatcccccagatggcttcatggcccccaaagcatggaaggtcctgacagattattacaggtccctggagaagaactaagcctttggctccagagtttctttctgaagtgctctttgattaccttttctatttttatgattagatgctttgtattaaattgcttctcaatgatgcattttaatcttttataatgaagtaaaagttgtgtctataattaaaaaaaaatatatatatatacacacacacatatacatacaaagtcaaactgaagaccaaatcttagcaggtaaaagcaatattcttatacatttcataataaaattagctctatgtattttctactgcacctgagcaggcaggtcccagatttcttaaggctttgtttgaccatgtgtctagttacttgctgaaaagtgaatatattttccagcatgtcttgacaacctgtactcttccaatgtcatttatcagttgtaaaatatatcagattgtgtcctcttctgtacaattgacaaaaaaaaaaatttttttttctcactctaaaagaggtgtggctcacatcaagattcttcctgatattttacctcatgctgtacaaagccttaatgttgtaatcatatcttacgtgttgaagacctgactggagaaacaaaatgtgcaataacgtgaattttatcttagagatctgtgcagcctatttctgtcacaaaagttatattgtctaataagagaagtcttaatggcctctgtgaataatgtaactccagttacacggtgacttttaatagcatacagtgatttgatgaaaggacgtcaaacaatgtggcgatgtcgtggaaagttatctttcccgctctttgctgtggtcattgtgtcttgcagaaaggatggccctgatgcagcagcagcgccagctgtaataaaaaataattcacactatcagactagcaaggcactagaactggaaaagaccacagaaaacaaagaatccaaccctttcatcttacaggtgaacaaactgtgatgatgcacatgtatgtgttttgtaagctgtgagcaccgtaacaaaatgtaaatttgccattattaggaagtgctggtggcagtgaagaagcacccaggccacttgactcccagtctggtgccctgtctacaccagacaacacaggagctgggtcagattcccctcagctgcttaacaaagttcctcgaacagaaagtgcttacaaagctgccttctcggatactgaaaggtcgagttttctgaactgcactgattttattgcagttgaaaaaaaaaaaaagctattccaaagatttcaagctgttctgagacatcttctgatggctttacttcctgagaggcaatgtttttactttatgcataattcattgttgccaaggaataaagtgaagaaacagcaccttttaatatataggtctctctggaagagacctaaattagaaagagaaaactgtgacaattttcatattctcattcttaaaaaacactaatcttaactaacaaaagttcttttgagaataagttacacacaatggccacagcagtttgtctttaatagtatagtgcctatactcatgtaatcggttactcactactgcctttaaaaaaaaaaaccagcatatttattgaaaacatgagacaggattatagtgccttaaccgatatattttgtgacttaaaaaatacatttaaaactgctcttctgctctagtaccatgcttagtgcaaatgattatttctatgtacaactgatgcttgttcttattttaataaatttatcagagtg

SEQ ID NO: 102755 - DNA, 4728 bp, Homo sapiens
  Payload ID: 46
  Gene Symbol: PDPK1
  Gene Name: 3-phosphoinositide dependent protein kinase 1
  Uniprot ID: O15530
  ENST ID: ENST00000268673
  CDS Start-End: 111-1400
cgcaggatgagggcggccattgctggggctccgcttcggggaggaggacgctgaggaggcgccgagccgcgcagcgctgcgggggaggcgcccgcgccgacgcggggcccatggccaggaccaccagccagctgtatgacgccgtgcccatccagtccagcgtggtgttatgttcctgcccatccccatcaatggtgaggacccagactgagtccagcacgccccctggcattcctggtggcagcaggcagggccccgccatggacggcactgcagccgagcctcggcccggcgccggctccctgcagcatgcccagcctccgccgcagcctcggaagaagcggcctgaggacttcaagtttgggaaaatccttggggaaggctctttttccacggttgtcctggctcgagaactggcaacctccagagaatatgcgaccagggccaactcattcgtgggaacagcgcagtacgtttctccagagctgctcacggagaagtccgcctgtaagagttcagacctttgggctcttggatgcataatataccagcttgtggcaggactcccaccattccgagctggaaacgagtatcttatatttcagaagatcattaagttggaatatgactttccagaaaaattcttccctaaggcaagagacctcgtggagaaacttttggttttagatgccacaaagcggttaggctgtgaggaaatggaaggatacggacctcttaaagcacacccgttcttcgagtccgtcacgtgggagaacctgcaccagcagacgcctccgaagctcaccgcttacctgccggctatgtcggaagacgacgaggactgctatggcaattatgacaatctcctgagccagtttggctgcatgcaggtgtcttcgtcctcctcctcacactccctgtcagcctccgacacgggcctgccccagaggtcaggcagcaacatagagcagtacattcacgatctggactcgaactcctttgaactggacttacagttttccgaagatgagaagaggttgttgttggagaagcaggctggcggaaacccttggcaccagtttgtagaaaataatttaatactaaagatgggcccagtggataagcggaagggtttatttgcaagacgacgacagctgttgctcacagaaggaccacatttatattatgtggatcctgtcaacaaagttctgaaaggtgaaattccttggtcacaagaacttcgaccagaggccaagaattttaaaactttctttgtccacacgcctaacaggacgtattatctgatggaccccagcgggaacgcacacaagtggtgcaggaagatccaggaggtttggaggcagcgataccagagccacccggacgccgctgtgcagtgacgtggcctgcggccgggctgcccttcgctgccaggacacctgccccagcgcggcttggccgccatccgggacgcttccagaccacctgccagccatcacaaggggaacgcagaggcggaaaccttgcagcatttttatttaaaagaaaagaagaaaaaaaacacccaaccacacaaagaacaaaaccagtaacaaacacaaaggaattcagggtcgctttgcttgctctctgtgctccgtggaggcctccgtgtgccctcgttgccgtggggacccagctccatgcacgtcaacccagtcccgcccagactagtggacagacctggtgtcaccagtttttcctagcatcagtccgaaccatgcgcccgccctgccccaactgtgtgctggtcctgctgtggccgaggggaccgggtgtgtttggctctttatgcccctcccgctgtggtcctggaactcttcaccagggagggagccctgcgggggccgcagctttgtggagggagccgccgtgcttctgtcacctgctccctttcttgcgtctccctgtgatgggcccttaggcctggctgggcccattacatatccctgtggtggctctggtggcagctttctgtggcccctgctgtgttggcaggcaggtttgcgtggtgaggagcgggaggggttggagtggtgcgggagcaggctgccgagtggagggtgccatcgagggctccggatcccttatcctacttagcagtgttggtctctggggctggaagccgagcgcatgctgggagcggtactgtcagaagtgagcccagttagtaccccgctggctcactgcacgagagagtcctgccccgagccctaggtggggccaggaggtgccttggagaagccagccagagcagagagggctgctgacttccgtgtggagcagagaggcctgagggcctcctaaaaggtttaaatgtccacgcctctccagttgctgaagtagggtctgagagaaccctggcatcagcagacccagggtgcttctgtctcctgcagaccacgccagggagtgcagacaccaccgtcacacacgccccttttgtgttttggttcaagtttctcagagcccctcagagcttctacatctgtgcatcagaaatctcacagccttctcatgctgccggctcatctgggcccatagagtgggctttgccagttgctgttgcacaggaggcgagaacagcacacttcaaccccagcttgctggtcggctttcctctagagagagccggttttggggccatttccctttgatgctttggtggccttgccccgctctgcagcacagacaggccagatgcatttgtcctttgcctagctactccccaggtagagagtgctcctggtggcctggcaggtctgggcccttctctccctgcccaggttgtccctggagggcagccctcactccctttgggggagaggcagacattgctgcccacagacctgcctctgactcaactgtgtccaccctccctggtccctacccccaagtcacaggtgactcagcagtgaccctgtgtgccaggccagatccaaactgagagggaaggtgtcgtttttacactgctaatgacgagagtggctctttttagctaggcgagtacagacggggcctgggagggggcagagatgttccccaggccctgcctgtggttcctgcctgggccttggctgctgctgtgtgagagctgcatgtgagcctgtgaccgtgagctggggtgagctgggccgcacctaccctggggccccagggagcaggacgctccggggcccagcacgttgccctgggcctgtggccggagtcggagtcctctctcctcctcctggcttttggaaaggcttggctgtgttggggagtctctcttagccctttcaggaatttctgttcaggcttcctcctcctcatcagctattttacccatctcagaacgtcctgtgtctccatgtaggagagtggctctctcagatctctcagggcgtctggttatagggaaacaagtggagcagggacgtggctttaattggagcactcggctgggctgcttggggagactcttccgtgcgttcttcctctggatagaaccaccacctcctgggcgtcactgacaagctccatcttaacctccaaagccacagaactaggggctcagagccagagctggcagccgccagccaaaatgatgccattgcctgagctgacagccaagcccttctgtgggtcacctttctcctcacccagccccttgctcttcccttttgaaaggcccgtgtgttttctttccttaccctgtgcttgctcatgtctactccggttttctctaccacatccttagagccatcacctggcacgcaggcgccttacattctacggtagaacgtggggtactgtgtgtgcacatagacacacttacgtggaattacagttgtgggtttatccaagatgaggaagatttcacctgctgtttaatagacttggggccatgtgcctccccacacatgggcaaggacaggtggaatgtcgggaccacactgtgcggcttctcggcacaaagcggagggaggctgtggtcgctgccggcctaggtgtcccaggtgccccgcctttctctgggacacagttgggggctggcttctgagggattcctttctcccctctttgtgtggccccagccagggcggtgggcagtcctggtgtagagcacaagcctctccaccctagagaaatgcctctgtaccacggctaccatgtggaaccttaacttgcagaaggcttgttaacaattgttttgagagagatggctggtcatgccacagctgctggggactccgcctactccagccctcttgggacacactgtgggatttgtggcccttccccagaggaattgtggagactgtcccatggaacaaaccctcaggcaccagcacagggctctgggtgactcagtaaaactaacgtttgtctctgacaagatcagctgtaggctcaccggccagagaagaccactgtgagcattttgccgtatatcctgccctgccatttgttcactttttaaactaaaataggaacatccgacacacaccgtttgcatcgtcttctcccttgatattttaagcattttcccatgtcatgagtttctcagaaacatgtttttaacaattgtactatttagtcattgtccatttactataatttatctgaccatttccctactgtaaaatacttaagacggtttctgatttttccactatttaaataatgctgtgatgaatatctttaaaa

SEQ ID NO: 102756 - DNA, 7241 bp, Homo sapiens
  Payload ID: 46
  Gene Symbol: PDPK1
  Gene Name: 3-phosphoinositide dependent protein kinase 1
  Uniprot ID: O15530
  ENST ID: ENST00000342085
  CDS Start-End: 150-1820
gcggcgccgggggcggggggcggcgggcgacggggcgggcgcaggatgagggcggccattgctggggctccgcttcggggaggaggacgctgaggaggcgccgagccgcgcagcgctgcgggggaggcgcccgcgccgacgcggggcccatggccaggaccaccagccagctgtatgacgccgtgcccatccagtccagcgtggtgttatgttcctgcccatccccatcaatggtgaggacccagactgagtccagcacgccccctggcattcctggtggcagcaggcagggccccgccatggacggcactgcagccgagcctcggcccggcgccggctccctgcagcatgcccagcctccgccgcagcctcggaagaagcggcctgaggacttcaagtttgggaaaatccttggggaaggctctttttccacggttgtcctggctcgagaactggcaacctccagagaatatgcgattaaaattctggagaagcgacatatcataaaagagaacaaggtcccctatgtaaccagagagcgggatgtcatgtcgcgcctggatcaccccttctttgttaagctttacttcacatttcaggacgacgagaagctgtatttcggccttagttatgccaaaaatggagaactacttaaatatattcgcaaaatcggttcattcgatgagacctgtacccgattttacacggctgagattgtgtctgctttagagtacttgcacggcaagggcatcattcacagggaccttaaaccggaaaacattttgttaaatgaagatatgcacatccagatcacagattttggaacagcaaaagtcttatccccagagagcaaacaagccagggccaactcattcgtgggaacagcgcagtacgtttctccagagctgctcacggagaagtccgcctgtaagagttcagacctttgggctcttggatgcataatataccagcttgtggcaggactcccaccattccgagctggaaacgagtatcttatatttcagaagatcattaagttggaatatgactttccagaaaaattcttccctaaggcaagagacctcgtggagaaacttttggttttagatgccacaaagcggttaggctgtgaggaaatggaaggatacggacctcttaaagcacacccgttcttcgagtccgtcacgtgggagaacctgcaccagcagacgcctccgaagctcaccgcttacctgccggctatgtcggaagacgacgaggactgctatggcaattatgacaatctcctgagccagtttggctgcatgcaggtgtcttcgtcctcctcctcacactccctgtcagcctccgacacgggcctgccccagaggtcaggcagcaacatagagcagtacattcacgatctggactcgaactcctttgaactggacttacagttttccgaagatgagaagaggttgttgttggagaagcaggctggcggaaacccttggcaccagtttgtagaaaataatttaatactaaagatgggcccagtggataagcggaagggtttatttgcaagacgacgacagctgttgctcacagaaggaccacatttatattatgtggatcctgtcaacaaagttctgaaaggtgaaattccttggtcacaagaacttcgaccagaggccaagaattttaaaactttctttgtccacacgcctaacaggacgtattatctgatggaccccagcgggaacgcacacaagtggtgcaggaagatccaggaggtttggaggcagcgataccagagccacccggacgccgctgtgcagtgacgtggcctgcggccgggctgcccttcgctgccaggacacctgccccagcgcggcttggccgccatccgggacgcttccagaccacctgccagccatcacaaggggaacgcagaggcggaaaccttgcagcatttttatttaaaagaaaagaagaaaaaaaacacccaaccacacaaagaacaaaaccagtaacaaacacaaaggaattcagggtcgctttgcttgctctctgtgctccgtggaggcctccgtgtgccctcgttgccgtggggacccagctccatgcacgtcaacccagtcccgcccagactagtggacagacctggtgtcaccagtttttcctagcatcagtccgaaccatgcgcccgccctgccccaactgtgtgctggtcctgctgtggccgaggggaccgggtgtgtttggctctttatgcccctcccgctgtggtcctggaactcttcaccagggagggagccctgcgggggccgcagctttgtggagggagccgccgtgcttctgtcacctgctccctttcttgcgtctccctgtgatgggcccttaggcctggctgggcccattacatatccctgtggtggctctggtggcagctttctgtggcccctgctgtgttggcaggcaggtttgcgtggtgaggagcgggaggggttggagtggtgcgggagcaggctgccgagtggagggtgccatcgagggctccggatcccttatcctacttagcagtgttggtctctggggctggaagccgagcgcatgctgggagcggtactgtcagaagtgagcccagttagtaccccgctggctcactgcacgagagagtcctgccccgagccctaggtggggccaggaggtgccttggagaagccagccagagcagagagggctgctgacttccgtgtggagcagagaggcctgagggcctcctaaaaggtttaaatgtccacgcctctccagttgctgaagtagggtctgagagaaccctggcatcagcagacccagggtgcttctgtctcctgcagaccacgccagggagtgcagacaccaccgtcacacacgccccttttgtgttttggttcaagtttctcagagcccctcagagcttctacatctgtgcatcagaaatctcacagccttctcatgctgccggctcatctgggcccatagagtgggctttgccagttgctgttgcacaggaggcgagaacagcacacttcaaccccagcttgctggtcggctttcctctagagagagccggttttggggccatttccctttgatgctttggtggccttgccccgctctgcagcacagacaggccagatgcatttgtcctttgcctagctactccccaggtagagagtgctcctggtggcctggcaggtctgggcccttctctccctgcccaggttgtccctggagggcagccctcactccctttgggggagaggcagacattgctgcccacagacctgcctctgactcaactgtgtccaccctccctggtccctacccccaagtcacaggtgactcagcagtgaccctgtgtgccaggccagatccaaactgagagggaaggtgtcgtttttacactgctaatgacgagagtggctctttttagctaggcgagtacagacggggcctgggagggggcagagatgttccccaggccctgcctgtggttcctgcctgggccttggctgctgctgtgtgagagctgcatgtgagcctgtgaccgtgagctggggtgagctgggccgcacctaccctggggccccagggagcaggacgctccggggcccagcacgttgccctgggcctgtggccggagtcggagtcctctctcctcctcctggcttttggaaaggcttggctgtgttggggagtctctcttagccctttcaggaatttctgttcaggcttcctcctcctcatcagctattttacccatctcagaacgtcctgtgtctccatgtaggagagtggctctctcagatctctcagggcgtctggttatagggaaacaagtggagcagggacgtggctttaattggagcactcggctgggctgcttggggagactcttccgtgcgttcttcctctggatagaaccaccacctcctgggcgtcactgacaagctccatcttaacctccaaagccacagaactaggggctcagagccagagctggcagccgccagccaaaatgatgccattgcctgagctgacagccaagcccttctgtgggtcacctttctcctcacccagccccttgctcttcccttttgaaaggcccgtgtgttttctttccttaccctgtgcttgctcatgtctactccggttttctctaccacatccttagagccatcacctggcacgcaggcgccttacattctacggtagaacgtggggtactgtgtgtgcacatagacacacttacgtggaattacagttgtgggtttatccaagatgaggaagatttcacctgctgtttaatagacttggggccatgtgcctccccacacatgggcaaggacaggtggaatgtcgggaccacactgtgcggcttctcggcacaaagcggagggaggctgtggtcgctgccggcctaggtgtcccaggtgccccgcctttctctgggacacagttgggggctggcttctgagggattcctttctcccctctttgtgtggccccagccagggcggtgggcagtcctggtgtagagcacaagcctctccaccctagagaaatgcctctgtaccacggctaccatgtggaaccttaacttgcagaaggcttgttaacaattgttttgagagagatggctggtcatgccacagctgctggggactccgcctactccagccctcttgggacacactgtgggatttgtggcccttccccagaggaattgtggagactgtcccatggaacaaaccctcaggcaccagcacagggctctgggtgactcagtaaaactaacgtttgtctctgacaagatcagctgtaggctcaccggccagagaagaccactgtgagcattttgccgtatatcctgccctgccatttgttcactttttaaactaaaataggaacatccgacacacaccgtttgcatcgtcttctcccttgatattttaagcattttcccatgtcatgagtttctcagaaacatgtttttaacaattgtactatttagtcattgtccatttactataatttatctgaccatttccctactgtaaaatacttaagacggtttctgatttttccactatttaaataatgctgtgatgaatatctttaaaatcttctgatttcttacttttttcccccttagatgcctggaagtggtattttgaggtgaaagagtttgttcattttgaagatatttctgtctctctctcgacctgatgtgtagacgctcacttccagtagcagaaccaccttagttgtgtcttacagattctgaacaaatcggtttctgataagccatgtgttccaaagaatgtctgaataagaccgctctttatttaaatgctaagaggatgtcactactgcaatccatctgtggccgattttttccaagagccaatttccttgttttggttgcaagaacctggctctgcctgcatgtcagctctctgccctccctgctgccgtggctttcaagcgcttggcagaatcttgtacttcgtgtccacaatggtactgaatttgcatctgcacagtcagcagagataacaagtgttgaactgaccttgccacatgcttagtgagtgatttgtaattaagtttatagactcagaaggtatattaggacatttggaatcagtagcagagcaaagcctctttgaaaaaaaccacgtagctgattgggttttacaagagtgcatttgtctcccccttccacccgtggggccccaccttcaggtcttagtggttcacaagagcccagcagccaggctggctttttcattgtagggcgtggttgtcccagctggtgtagatttcaggccgccccccccaactccctgcccacagtgttgcagattgcctggctggcagcaagtccagaccacccaaatttggttggattcttcatttctccactgtagttggggtccattgattgtgcaggggaacgtgcaggaggtttttctaggcaccgtgttcagtgctgcttcactctaccagagattatggccaaattgcacggaatttggtttcttgccctctgaagcctgagggcccccccttgcctggctggttgacagacccggggtggtcactgctgagacttcagagatcgcagctgctgtgagaatacggtgaaggtactttgttctggaagatgttgtcatacacttttccccagttattttcaaacttgacatgagcctatgttgactcactgggtgggggtcccttcttacgcagcacacgtggcaagtgcctgaatcggggctggaggcacttcagagcctctgaggggccaccacttctggcccaaaattgcagggttgtagatgaggctgcctgtggagaactggtgtgaggaggaagctgtttccaacaaagagcactttcatctgttgagatggctgtggtgagcaactgaacgagcctacgtgtgtacctgaattttccccgtaactcatttcttccatatgaagaaacaccaaactatgtacagagaactttttacaaaaggcagaccttttttaagctgtgtaacccacatagcctaaccacctggcagaatgactacgaataggggtcattgtgctggtaaaagcctctattacgactgtaagtaagttggatgttggcaaaattaaattgttacagtatttagagctgctgtagctgttccttcacaacataaaataggataaatgactagtacgtctttcaggtgggtggcaagcagaacatgcgtaatattctctacctggtctgtagctgtaactgtgatgtacagacaaagcaaaaattaaaagaacttatgaaaacaaatgcaatgatactaggatatacacttttgtatttttattcttatataaggttatttgctggctattgttggcctctagttcagtctgtgttatttaaattctaatatatgaattatttgaattgaattcatgttcggggccacgttgttgtatgtattgatgtacagccttgaatgtgaataattattgtaaactatattttacaactttttttctggctttattatataaattttctattgggtcagtgatttaatcatataatttaatgaatctgtttatcctttttttttttccaaatacttgtgctttaggtgtagttaccagatgatgaattttcctcgtatggtcagtagtcttgtaataaaaagcatgtagagtgta

SEQ ID NO: 102757 - DNA, 2416 bp, Homo sapiens
  Payload ID: 46
  Gene Symbol: PDPK1
  Gene Name: 3-phosphoinositide dependent protein kinase 1
  ENST ID: ENST00000389224
  CDS Start-End: 666-2255
gccggtttgttaccctgccgggtccggcggccgcccgggtccggcgaggcggggcggcccggggtcccgagggccgggtgcctccttacctgcagccgggcggccgggccggggatggcgggcgccggccgagggcgctgcttggctgcggcggggagaccgggcctgggttgcggcgggcggcggcctggccgggggcgctgacagacgcgcggagggcgggggaggccgggaggtgtcacccggcccagcggggtggaagtgcctggaaagtttgttttcggcttggcgcagcctggagccgagcctccagggttacctttcggttctgtctgtagaggaaccgccctgggcttccacctggaacggggtccttggcgcctccgcctgcgagagaagcagaaggtgcaagttcttgctgaaagcacctgatgctcctgggcccccttttccagattcttgatgacagtggtcgggaaaactcgcctttcacggcccggccaaggggcatttgggtgcttttgctgcccgtggctgtgctcagcgttgtgggaagcccctgggaggccgaatgtgcaggatcaccgaggggaaagtgagcttgacagtatgacgccgtgcccatccagtccagcgtggtgttatgttcctgcccatccccatcaatggtgaggacccagactgagtccagcacgccccctggcattcctggtggcagcaggcagggccccgccatggacggcactgcagccgagcctcggcccggcgccggctccctgcagcatgcccagcctccgccgcagcctcggaagaagcggcctgaggacttcaagtttgggaaaatccttggggaaggctctttttccacggttgtcctggctcgagaactggcaacctccagagaatatgcgattaaaattctggagaagcgacatatcataaaagagaacaaggtcccctatgtaaccagagagcgggatgtcatgtcgcgcctggatcaccccttctttgttaagctttacttcacatttcaggacgacgagaagctgtatttcggccttagttatgccaaaaatggagaactacttaaatatattcgcaaaatcggttcattcgatgagacctgtacccgattttacacggctgagattgtgtctgctttagagtacttgcacggcaagggcatcattcacagggaccttaaaccggaaaacattttgttaaatgaagatatgcacatccagatcacagattttggaacagcaaaagtcttatccccagagagcaaacaagccagggccaactcattcgtgggaacagcgcagtacgtttctccagagctgctcacggagaagtccgcctgtaagagttcagacctttgggctcttggatgcataatataccagcttgtggcaggactcccaccattccgagctggaaacgagtatcttatatttcagaagatcattaagttggaatatgactttccagaaaaattcttccctaaggcaagagacctcgtggagaaacttttggttttagatgccacaaagcggttaggctgtgaggaaatggaaggatacggacctcttaaagcacacccgttcttcgagtccgtcacgtgggagaacctgcaccagcagacgcctccgaagctcaccgcttacctgccggctatgtcggaagacgacgaggactgctatggcaattatgacaatctcctgagccagtttggctgcatgcaggtgtcttcgtcctcctcctcacactccctgtcagcctccgacacgggcctgccccagaggtcaggcagcaacatagagcagtacattcacgatctggactcgaactcctttgaactggacttacagttttccgaagatgagaagaggttgttgttggagaagcaggctggcggaaacccttggcaccagtttgtagaaaataatttaatactaaagatgggcccagtggataagcggaagggtttatttgcaagacgacgacagctgttgctcacagaaggaccacatttatattatgtggatcctgtcaacaaagttctgaaaggtgaaattccttggtcacaagaacttcgaccagaggccaagaattttaaaactttctttgtccacacgcctaacaggacgtattatctgatggaccccagcgggaacgcacacaagtggtgcaggaagatccaggaggtttggaggcagcgataccagagccacccggacgccgctgtgcagtgacgtggcctgcggccgggctgcccttcgctgccaggacacctgccccagcgcggcttggccgccatccgggacgcttccagaccacctgccagccatcacaaggggaacgcagaggcggaaaccttgcagcatttttatttaaaagaaaagaagaaaaaaaa

SEQ ID NO: 102758 - DNA, 1729 bp, Homo sapiens
  Payload ID: 46
  Gene Symbol: PDPK1
  Gene Name: 3-phosphoinositide dependent protein kinase 1
  Uniprot ID: O15530
  ENST ID: ENST00000441549
  CDS Start-End: 117-1481
ggcgggcgcaggatgagggcggccattgctggggctccgcttcggggaggaggacgctgaggaggcgccgagccgcgcagcgctgcgggggaggcgcccgcgccgacgcggggcccatggccaggaccaccagccagctgtatgacgccgtgcccatccagtccagcgtggtgttatgttcctgcccatccccatcaatggtgaggacccagactgagtccagcacgccccctggcattcctggtggcagcaggcagggccccgccatggacggcactgcagccgagcctcggcccggcgccggctccctgcagcatgcccagcctccgccgcagcctcggaagaagcggcctgaggacttcaagtttgggaaaatccttggggaaggctctttttccacggttgtcctggctcgagaactggcaacctccagagaatatgcgattaaaattctggagaagcgacatatcataaaagagaacaaggtcccctatgtaaccagagagcgggatgtcatgtcgcgcctggatcaccccttctttgttaagctttacttcacatttcaggacgacgagaagctgtatttcggccttagttatgccaaaaatggagaactacttaaatatattcgcaaaatcggttcattcgatgagacctgtacccgattttacacggctgagattgtgtctgctttagagtacttgcacggcaagggcatcattcacagggaccttaaaccggaaaacattttgttaaatgaagatatgcacatccagatcacagattttggaacagcaaaagtcttatccccagagagcaaacaagccagggccaactcattcgtgggaacagcgcagtacgtttctccagagctgctcacggagaagtccgcctgtaagagttcagacctttgggctcttggatgcataatataccagcttgtggcaggactcccaccattccgagctggaaacgagtatcttatatttcagaagatcattaagttggaatatgactttccagaaaaattcttccctaaggcaagagacctcgtggagaaacttttggttttagatgccacaaagcggttaggctgtgaggaaatggaaggatacggacctcttaaagcacacccgttcttcgagtccgtcacgtgggagaacctgcaccagcagacgcctccgaagctcaccgcttacctgccggctatgtcggaagacgacgaggactgctatggcaattatgacaatctcctgagccagtttggctgcatgcaggtgtcttcgtcctcctcctcacactccctgtcagcctccgacacgggcctgccccagaggtcaggcagcaacatagagcagtacattcacgatctggactcgaactcctttgaactggacttacagttttccgaagatgagaagaggttgttgttggagaagcaggctggcggaaacccttgcctaacaggacgtattatctgatggaccccagcgggaacgcacacaagtggtgcaggaagatccaggaggtttggaggcagcgataccagagccacccggacgccgctgtgcagtgacgtggcctgcggccgggctgcccttcgctgccaggacacctgccccagcgcggcttggccgccatccgggacgcttccagaccacctgccagccatcacaaggggaacgcagaggcggaaaccttgcagcatttttatttaaaagaaaagaag

SEQ ID NO: 102759 - DNA, 699 bp, Homo sapiens
  Payload ID: 46
  Gene Symbol: PDPK1
  Gene Name: 3-phosphoinositide dependent protein kinase 1
  ENST ID: ENST00000474706
  CDS Start-End: 94-201
cattgctggggctccgcttcggggaggaggacgctgaggaggcgccgagccgcgcagcgctgcgggggaggcgcccgcgccgacgcggggcccatggccaggaccaccagccagctgaggaaccgccctgggcttccacctggaacggggtccttggcgcctccgcctgcgagagaagcagaaggtgcaagttcttgctgaaagcacctgatgctcctgggcccccttttccagattcttgatgacagtggtcgggaaaactcgcctttcacggcccggccaaggggcatttgggtgcttttgctgcccgtggctgtgctcagcgttgtgggaagcccctgggaggccgaatgtgcaggatcaccgaggggaaagtgagcttgacagtatgacgccgtgcccatccagtccagcgtggtgttatgttcctgcccatccccatcaatggtgaggacccagactgagtccagcacgccccctggcattcctggtggcagcaggcagggccccgccatggacggcactgcagccgagcctcggcccggcgccggctccctgcagcatgcccagcctccgccgcagcctcggaagaagcggcctgaggacttcaagtttgggaaaatccttggggaaggctctttttccacggttgtcctggctcgagaactggcaacctccagagaatatgcgagtgagtat

SEQ ID NO: 102760 - DNA, 445 bp, Homo sapiens
  Payload ID: 46
  Gene Symbol: PDPK1
  Gene Name: 3-phosphoinositide dependent protein kinase 1
  ENST ID: ENST00000478708
  CDS Start-End: 1-121
ccaccattccgagctggaaacgagtatcttatatttcagaagatcattaagttggaatatgactttccagaaaaattcttccctaaggcaagagacctcgtggagaaacttttggttttagatgccacaaagcggttaggctgtgaggaaatggaaggatacggacctcttaaagcacacccgttcttcgagtccgtcacgtgggagaacctgcaccagcagacgcctccgaagctcaccgcttacctgccggctatgtcggaagacgacgaggactgctatggcaatggtgccgctagaaccggacgccgagcacccccggcactggccccggggtcccacgtacggggcctcctgcccggcctgtcgcatctgcgcttggcttggtgcttgtacaactgtgcggccaagatgctccagaacactgcctgtctttccacagaaa

SEQ ID NO: 102761 - DNA, 451 bp, Homo sapiens
  Payload ID: 46
  Gene Symbol: PDPK1
  Gene Name: 3-phosphoinositide dependent protein kinase 1
  ENST ID: ENST00000566659
  CDS Start-End: 188-451
gggggcggcgggcgacggggcgggcgcaggatgagggcggccattgctggggctccgcttcggggaggaggacgctgaggaggcgccgagccgcgcagcgctgcgggggaggcgcccgcgccgacgcggggcccatggccaggaccaccagccagctgggaccttaaaccggaaaacattttgttaaatgaagatatgcacatccagatcacagattttggaacagcaaaagtcttatccccagagagcaaacaagccagggccaactcattcgtgggaacagcgcagtacgtttctccagagctgctcacggagaagtccgcctgtaagagacctttgggctcttggatgcataatataccagcttgtggcaggactcccaccattccgagctggaaacgagtatcttatatttcagaagatcattaagttggaatatgactttccagaa

SEQ ID NO: 102762 - DNA, 611 bp, Homo sapiens
  Payload ID: 46
  Gene Symbol: PDPK1
  Gene Name: 3-phosphoinositide dependent protein kinase 1
  ENST ID: ENST00000461815
  CDS Start-End: 165-611
gtgaaattgagacctggcgcttcctgaggctggcagcccggttgagcctgaggaccagacttgaggcagttggcagtccgcgcctcgttgccctctgtctgccctggtatgacgccgtgcccatccagtccagcgtggtgttatgttcctgcccatccccatcaatggtgaggacccagactgagtccagcacgccccctggcattcctggtggcagcaggcagggccccgccatggacggcactgcagccgagcctcggcccggcgccggctccctgcagcatgcccagcctccgccgcagcctcggaagaagcggcctgaggacttcaagtttgggaaaatccttggggaaggctctttttccacggttgtcctggctcgagaactggcaacctccagagaatatgcgattaaaattctggagaagcgacatatcataaaagagaacaaggtcccctatgtaaccagagagcgggatgtcatgtcgcgcctggatcaccccttctttgttaagctttacttcacatttcaggacgacgagaagctgtatttcggccttagttatgccaaaaatggagaactacttaaatatattcgcaaaatcggttca

SEQ ID NO: 102763 - DNA, 552 bp, Homo sapiens
  Payload ID: 46
  Gene Symbol: PDPK1
  Gene Name: 3-phosphoinositide dependent protein kinase 1
  ENST ID: ENST00000492021
  CDS Start-End: 93-260
attgctggggctccgcttcggggaggaggacgctgaggaggcgccgagccgcgcagcgctgcgggggaggcgcccgcgccgacgcggggcccatggccaggaccaccagccagctgattcttgatgacagtggtcgggaaaactcgcctttcacggcccggccaaggggcatttgggtgcttttgctgcccgtggctgtgctcagcgttgtgggaagcccctgggaggccgaatgtgcaggatcaccgaggggaaagtgagcttgacagtatgacgccgtgcccatccagtccagcgtggtgttatgttcctgcccatccccatcaatggtgaggacccagactgagtccagcacgccccctggcattcctggtggcagcaggcagggccccgccatggacggcactgcagccgagcctcggcccggcgccggctccctgcagcatgcccagcctccgccgcagcctcggaagaagcggcctgaggacttcaagtttgggaaaatccttggggaaggctctttttccacggttgtcctggctcgagaactgg

SEQ ID NO: 102764 - DNA, 4836 bp, Homo sapiens
  Payload ID: 47
  Gene Symbol: ABAT
  Gene Name: 4-aminobutyrate aminotransferase
  Uniprot ID: P80404
  ENST ID: ENST00000268251
  CDS Start-End: 189-1691
ggccgggacgctcggcggagccagggagtccggcgagtcgctgggggaagtcgagcagacacccagcgctgccggaactcggggcgcgcatcccgcaagtcggaacccggcggatcggatcccgcagatcggagacggggcctggagggtggcagcacgcaaagggtgtccctgtccctcaaggggtcatggcctccatgttgctcgcccagcgcctggcctgcagcttccagcacagctaccgcctgctggtgcctggatccagacacattagtcaagctgcagccaaagtcgacgttgaatttgattatgatgggcctctgatgaagacggaagtcccagggcctagatctcaggagttaatgaaacagctgaatataattcagaatgcagaggctgtgcattttttctgcaattacgaagagagccgaggcaattacctggttgatgtggacggcaaccgaatgctggatctttattcccagatctcctctgtccccataggttacagccaccccgccctgctgaaactcatccaacagcctcaaaatgcgagcatgtttgtcaacagacccgccctcggaatcctgcctccggagaactttgtggagaagctccggcagtccttgctctcggtggctcccaaagggatgtcccagctcatcaccatggcctgcggctcctgctccaatgaaaacgccttaaagaccatcttcatgtggtaccggagcaaggaaagagggcagaggggcttctcccaggaggagctggagacgtgcatgattaaccaggcccctggctgccccgactacagcatcctctccttcatgggcgcgttccatgggaggaccatgggttgcttagcgaccacgcactctaaagccattcacaagatcgacatcccttcctttgactggcccatcgcaccgttcccacggctgaaataccctctggaagagtttgtgaaagagaaccaacaggaggaggcccgctgtctggaagaggtggaggatctgattgtgaaatatcggaaaaagaagaagacggtggccgggatcatcgtggagcccatccagtccgagggtggagacaaccacgcatccgatgacttctttcggaagctgagagacatcgccaggaagcatggctgcgccttcttggtggacgaggtccagaccggaggaggctgcacgggcaagttctgggcccatgagcactggggcctggatgacccagcagacgtgatgaccttcagcaagaagatgatgactgggggcttcttccacaaggaggagttcaggcctaatgctccctaccggatcttcaacacctggctgggggacccgtccaagaacctgttgctggctgaggtcatcaacatcatcaagcgggaggacctgctaaataatgcagcccatgccgggaaggccctgctcacaggactgctggacctccaggcccggtacccccagttcatcagcagggtgagaggacgaggcaccttttgctccttcgatactcccgatgattccatacggaataagctcattttaattgccagaaacaaaggtgtggtgttgggtggctgtggtgacaaatccattcgtttccgtcccacgctggtcttcagggatcaccacgctcacctgttcctcaatattttcagtgacatcttagcagacttcaagtaaagaagccatttccactacagtgagaaagcccggatcccaacagttgtcaaattgattagtttgcctaattcatgttttcacttaaaagtatcagaggtgaatgcacagtgaagggtgatttgtggggagggagcatttttggtggtcttgggggaggggaggggagggaagggctggtgttgattttcctccctgcagagccaatggtgcacattggtttaagcccagagatcctgcttgagccctggactcatcttgggaagggccatgggaggtcctggctagagttctgcccaaccttgaccaaccccagcaatttttccaaaagccagtcaagggcattacatttgttcctgggactggcagctgggcctcctgggtgccagtccatctcaagtgccatattctgtgatcacggatgttggctccccctcgccctatgcaagcaaacacactctcacctcctctcccagcctcccggagctctgagcacgccccacgcatggtgcaggagggactggacagatctgaggaaggccgtaaaatggggacaggaggattcagctcaggagtaagggaagaggtcctctggccccctgaagatgagaatcacccctctcagtgcacctggggatccccctaaactgtgaattctgccctggacagggctttgcccttggaggatccccaggtggccttacccgtgattcttactcggcatcctccattccccaaactccctcctccctgttaaatgtcaacctagacctggacctgggtgggaggaaactgtagcctgagtgtccacagggacacacgtgagccacagggctagaagcacaggcccgtcaccccaggaggaaaagcccagggtctggggcagcagagccatcgcatcatgtttcccagggcaacttgaggtctgacttttggctccctcgccctaagaggctcttcctctcttttgctcatccaccttcacaccacttgtgagctgacccccaggaacagcttggctgttccaccagagcagagggaatcattgctggactggatttcttctggagggaagcaccatgaattaaaggtgccagagctccatgcatggaaaagtggcctgttggttcaacgtggtttccttgtacttgatcctcctgaaatgagagattttcctgagatgactgagtatggagattaccaggcagatgataccgaaatgcttaaaggggctgtggctgaggctgtagcatctctgctggaggtgagacactctgggaactgatttgacctcgaatgctcctaaaagagaacttgatagcctgacagcagagaagtattatttggtggggagtctgagaaagcctggcttgtattatctgtccaaaaggaagcctcttcatctcccggtgccttggttgactattttggaaataggcatatcaaggttcctgattcagcactttgctcttttaataacaaatcgtccaaagatctcaaagtaagggtttttttttttagcttccactcttccgcagacttggtcatcgacctatttttgttgaagaatgaaaggcaatgacaagtttaacatatacaaattcgtgaattcttgttcattttgcattcctgcagtcagtgctaatccgtcgttcttaatcaggagttctgccaggtttaaggtcacctgcactcccagccaagtggtgatgtatgcctcccactctctgcaaggttttcctcatttttatattcatttattcatcattcattcattcacctaactttcattaaatagctgcaccatcccaggccctgtgcggagcatcgggaatacaaagatgagataaaacattgtccctgcccccgggggctcacatgccactggaaacaacagactcttaaactaacaattcaagcaggcgccaagtgctatgacagaggtgtgaataaaagcatcaggaaatcggatggagaaccaccattcacccaagggtcagaggaggtttcaaagaaaaggtgtcattggagcagtgttttgcagaatgagccagagttcaccaagcaggcaaggcaaggaagggtgttgcagagagggaacagcatatgcaaaggcgtatcagttcatggcatcacatctttcactggggaagccagtttccacaggcagcatcccaaggttcaataaggccttatttaacaagcaagcaaaatgcaaaccaaaccattattcatttattggcttaagtatgctttctcctgaaaactttagcattgggtgcaaatattcagtatggttctcggagtccaaagggttttaagccagggcacaaccagaaaagtggctctctttggtagggagaggggctccaatatttcgttctctccccatggggcactgacagagaaatgaaatagttttatctggaaaattccagagctattatttactccttaccaagggaagttacttcttgtaaaaacttttaagccatttatcaacaagttcttgttgactcagggcataatgagttcctgagacatgctcttttgggggctggggctttagctagaagaatttcaaggaaaagaattctcagcagagctcaagattgtagaaactcagcagaagctggtaaaaacatggggagcccggaggacaggctgctgtccagggcagaggccatgaagaagtgcttccgtggccgacagtctggaaatgaatccatcatacattagtgccatagagtttagtaaccgtccagcaagtgtcatcacttttacagaaaacaaggtccagtaatagcaagtcttagtacatcctcacttttattataaatgggtgttttttcataatttttactgacgctcagtaaccatgcaaaattgtgtatagcattaatgtatctacatacctacacctatctatatataagctcatggtagaaaaccatagctaagtagcatcgcagacttaagcgtacaaagtgatcttgttcacaagtaatctgttgacagtgccaataaatgataaaaaaaaaattaacatgtcacaatgtaacggatgaccatatgcacaattccatgaattaaatctgtttcctgtgttagtcagtattcttaaataaaatttataattgaaacatga

SEQ ID NO: 102765 - DNA, 5586 bp, Homo sapiens
  Payload ID: 47
  Gene Symbol: ABAT
  Gene Name: 4-aminobutyrate aminotransferase
  Uniprot ID: P80404
  ENST ID: ENST00000396600
  CDS Start-End: 939-2441
tcttgtgatcaccctcattacctcttctgggccccctgtggacctgcgttgacccagcatgggctacaatgggggagttgggtaatcgctcccggtaggttcctccccaacccccgaggcggggtcaggtggagcgtgggcgccagagcagcccctctgccttgggtgtcttggagatgacttggcgccccccggagccccgtcatggctgtggctgcgtccacaacactgcatcagcagagtcctggggaagccatttaggaatctgaagcccgggatttctgctttgtcccttcaggggttcctgagcctgttaaaaaaaaaaaaaaatctaggaagaggccctggaaggaaaaaggggagggagatagcctattttacaaggtctgaaatgatgtgtcttatccttctggcttaaaccaagctgggcttaaaacatcttttaaaaaaaatctgtattctatttttttctctctgtttatcgctctccttctgcctctgttaatctttgtttctgtgtagttgcatcctgtttctgtctgaaaacccttgtctttctgaatccatctttcagtctctcacattctgtctttcccctcctccttcaccttccctccgtccctctcccttgcgcacttgccgggtaccagctgagtgcatccttttcccaaacctgctctgcttccaaggggcccttttctgtctcctccacctgtccccatgttttggggactgcctggaaatccgggacaccctcctgaggagggagctggtgcccaacggcacctcttaggatgaacccagccagctgcgttcctggcctctgcagaatggcatacagaaggcattttaagcaagcgagctgagctcgccgcaggactccgactaccaggcaccggtggcagcacgcaaagggtgtccctgtccctcaaggggtcatggcctccatgttgctcgcccagcgcctggcctgcagcttccagcacagctaccgcctgctggtgcctggatccagacacattagtcaagctgcagccaaagtcgacgttgaatttgattatgatgggcctctgatgaagacggaagtcccagggcctagatctcaggagttaatgaaacagctgaatataattcagaatgcagaggctgtgcattttttctgcaattacgaagagagccgaggcaattacctggttgatgtggacggcaaccgaatgctggatctttattcccagatctcctctgtccccataggttacagccaccccgccctgctgaaactcatccaacagcctcaaaatgcgagcatgtttgtcaacagacccgccctcggaatcctgcctccggagaactttgtggagaagctccggcagtccttgctctcggtggctcccaaagggatgtcccagctcatcaccatggcctgcggctcctgctccaatgaaaacgccttaaagaccatcttcatgtggtaccggagcaaggaaagagggcagaggggcttctcccaggaggagctggagacgtgcatgattaaccaggcccctggctgccccgactacagcatcctctccttcatgggcgcgttccatgggaggaccatgggttgcttagcgaccacgcactctaaagccattcacaagatcgacatcccttcctttgactggcccatcgcaccgttcccacggctgaaataccctctggaagagtttgtgaaagagaaccaacaggaggaggcccgctgtctggaagaggtggaggatctgattgtgaaatatcggaaaaagaagaagacggtggccgggatcatcgtggagcccatccagtccgagggtggagacaaccacgcatccgatgacttctttcggaagctgagagacatcgccaggaagcatggctgcgccttcttggtggacgaggtccagaccggaggaggctgcacgggcaagttctgggcccatgagcactggggcctggatgacccagcagacgtgatgaccttcagcaagaagatgatgactgggggcttcttccacaaggaggagttcaggcctaatgctccctaccggatcttcaacacctggctgggggacccgtccaagaacctgttgctggctgaggtcatcaacatcatcaagcgggaggacctgctaaataatgcagcccatgccgggaaggccctgctcacaggactgctggacctccaggcccggtacccccagttcatcagcagggtgagaggacgaggcaccttttgctccttcgatactcccgatgattccatacggaataagctcattttaattgccagaaacaaaggtgtggtgttgggtggctgtggtgacaaatccattcgtttccgtcccacgctggtcttcagggatcaccacgctcacctgttcctcaatattttcagtgacatcttagcagacttcaagtaaagaagccatttccactacagtgagaaagcccggatcccaacagttgtcaaattgattagtttgcctaattcatgttttcacttaaaagtatcagaggtgaatgcacagtgaagggtgatttgtggggagggagcatttttggtggtcttgggggaggggaggggagggaagggctggtgttgattttcctccctgcagagccaatggtgcacattggtttaagcccagagatcctgcttgagccctggactcatcttgggaagggccatgggaggtcctggctagagttctgcccaaccttgaccaaccccagcaatttttccaaaagccagtcaagggcattacatttgttcctgggactggcagctgggcctcctgggtgccagtccatctcaagtgccatattctgtgatcacggatgttggctccccctcgccctatgcaagcaaacacactctcacctcctctcccagcctcccggagctctgagcacgccccacgcatggtgcaggagggactggacagatctgaggaaggccgtaaaatggggacaggaggattcagctcaggagtaagggaagaggtcctctggccccctgaagatgagaatcacccctctcagtgcacctggggatccccctaaactgtgaattctgccctggacagggctttgcccttggaggatccccaggtggccttacccgtgattcttactcggcatcctccattccccaaactccctcctccctgttaaatgtcaacctagacctggacctgggtgggaggaaactgtagcctgagtgtccacagggacacacgtgagccacagggctagaagcacaggcccgtcaccccaggaggaaaagcccagggtctggggcagcagagccatcgcatcatgtttcccagggcaacttgaggtctgacttttggctccctcgccctaagaggctcttcctctcttttgctcatccaccttcacaccacttgtgagctgacccccaggaacagcttggctgttccaccagagcagagggaatcattgctggactggatttcttctggagggaagcaccatgaattaaaggtgccagagctccatgcatggaaaagtggcctgttggttcaacgtggtttccttgtacttgatcctcctgaaatgagagattttcctgagatgactgagtatggagattaccaggcagatgataccgaaatgcttaaaggggctgtggctgaggctgtagcatctctgctggaggtgagacactctgggaactgatttgacctcgaatgctcctaaaagagaacttgatagcctgacagcagagaagtattatttggtggggagtctgagaaagcctggcttgtattatctgtccaaaaggaagcctcttcatctcccggtgccttggttgactattttggaaataggcatatcaaggttcctgattcagcactttgctcttttaataacaaatcgtccaaagatctcaaagtaagggtttttttttttagcttccactcttccgcagacttggtcatcgacctatttttgttgaagaatgaaaggcaatgacaagtttaacatatacaaattcgtgaattcttgttcattttgcattcctgcagtcagtgctaatccgtcgttcttaatcaggagttctgccaggtttaaggtcacctgcactcccagccaagtggtgatgtatgcctcccactctctgcaaggttttcctcatttttatattcatttattcatcattcattcattcacctaactttcattaaatagctgcaccatcccaggccctgtgcggagcatcgggaatacaaagatgagataaaacattgtccctgcccccgggggctcacatgccactggaaacaacagactcttaaactaacaattcaagcaggcgccaagtgctatgacagaggtgtgaataaaagcatcaggaaatcggatggagaaccaccattcacccaagggtcagaggaggtttcaaagaaaaggtgtcattggagcagtgttttgcagaatgagccagagttcaccaagcaggcaaggcaaggaagggtgttgcagagagggaacagcatatgcaaaggcgtatcagttcatggcatcacatctttcactggggaagccagtttccacaggcagcatcccaaggttcaataaggccttatttaacaagcaagcaaaatgcaaaccaaaccattattcatttattggcttaagtatgctttctcctgaaaactttagcattgggtgcaaatattcagtatggttctcggagtccaaagggttttaagccagggcacaaccagaaaagtggctctctttggtagggagaggggctccaatatttcgttctctccccatggggcactgacagagaaatgaaatagttttatctggaaaattccagagctattatttactccttaccaagggaagttacttcttgtaaaaacttttaagccatttatcaacaagttcttgttgactcagggcataatgagttcctgagacatgctcttttgggggctggggctttagctagaagaatttcaaggaaaagaattctcagcagagctcaagattgtagaaactcagcagaagctggtaaaaacatggggagcccggaggacaggctgctgtccagggcagaggccatgaagaagtgcttccgtggccgacagtctggaaatgaatccatcatacattagtgccatagagtttagtaaccgtccagcaagtgtcatcacttttacagaaaacaaggtccagtaatagcaagtcttagtacatcctcacttttattataaatgggtgttttttcataatttttactgacgctcagtaaccatgcaaaattgtgtatagcattaatgtatctacatacctacacctatctatatataagctcatggtagaaaaccatagctaagtagcatcgcagacttaagcgtacaaagtgatcttgttcacaagtaatctgttgacagtgccaataaatgataaaaaaaaaattaacatgtcacaatgtaacggatgaccatatgcacaattccatgaattaaatctgtttcctgtgttagtcagtattcttaaataaaatttataattgaaacatga

SEQ ID NO: 102766 - DNA, 1923 bp, Homo sapiens
  Payload ID: 47
  Gene Symbol: ABAT
  Gene Name: 4-aminobutyrate aminotransferase
  Uniprot ID: P80404
  ENST ID: ENST00000425191
  CDS Start-End: 261-1763
tttgtgtccctttgagtctgcagagaagccagcagctggggctgcagacgggaaaggaatgtcctcagcgtctgccagcacttttgtcttggtcccaacggctgataggaaaatgagaggcagggtcttttctagagagatctggggggtccatttctagccgatgatgcatgcaaagagttcgtgttcacaggacctgggaagcagcggagtagaaagggtggcagcacgcaaagggtgtccctgtccctcaaggggtcatggcctccatgttgctcgcccagcgcctggcctgcagcttccagcacagctaccgcctgctggtgcctggatccagacacattagtcaagctgcagccaaagtcgacgttgaatttgattatgatgggcctctgatgaagacggaagtcccagggcctagatctcaggagttaatgaaacagctgaatataattcagaatgcagaggctgtgcattttttctgcaattacgaagagagccgaggcaattacctggttgatgtggacggcaaccgaatgctggatctttattcccagatctcctctgtccccataggttacagccaccccgccctgctgaaactcatccaacagcctcaaaatgcgagcatgtttgtcaacagacccgccctcggaatcctgcctccggagaactttgtggagaagctccggcagtccttgctctcggtggctcccaaagggatgtcccagctcatcaccatggcctgcggctcctgctccaatgaaaacgccttaaagaccatcttcatgtggtaccggagcaaggaaagagggcagaggggcttctcccaggaggagctggagacgtgcatgattaaccaggcccctggctgccccgactacagcatcctctccttcatgggcgcgttccatgggaggaccatgggttgcttagcgaccacgcactctaaagccattcacaagatcgacatcccttcctttgactggcccatcgcaccgttcccacggctgaaataccctctggaagagtttgtgaaagagaaccaacaggaggaggcccgctgtctggaagaggtggaggatctgattgtgaaatatcggaaaaagaagaagacggtggccgggatcatcgtggagcccatccagtccgagggtggagacaaccacgcatccgatgacttctttcggaagctgagagacatcgccaggaagcatggctgcgccttcttggtggacgaggtccagaccggaggaggctgcacgggcaagttctgggcccatgagcactggggcctggatgacccagcagacgtgatgaccttcagcaagaagatgatgactgggggcttcttccacaaggaggagttcaggcctaatgctccctaccggatcttcaacacctggctgggggacccgtccaagaacctgttgctggctgaggtcatcaacatcatcaagcgggaggacctgctaaataatgcagcccatgccgggaaggccctgctcacaggactgctggacctccaggcccggtacccccagttcatcagcagggtgagaggacgaggcaccttttgctccttcgatactcccgatgattccatacggaataagctcattttaattgccagaaacaaaggtgtggtgttgggtggctgtggtgacaaatccattcgtttccgtcccacgctggtcttcagggatcaccacgctcacctgttcctcaatattttcagtgacatcttagcagacttcaagtaaagaagccatttccactacagtgagaaagcccggatcccaacagttgtcaaattgattagtttgcctaattcatgttttcacttaaaagtatcagaggtgaatgcacagtgaagggtgatttgtggggagggagcatttttggtggtcttgggggagggga

SEQ ID NO: 102767 - DNA, 580 bp, Homo sapiens
  Payload ID: 47
  Gene Symbol: ABAT
  Gene Name: 4-aminobutyrate aminotransferase
  ENST ID: ENST00000565016
  CDS Start-End: 307-580
gcacttgccgggtaccagctgagtgcatccttttcccaaacctgctctgcttccaaggggcccttttctgtctcctccacctgtccccatgttttggggactgcctggaaatccgggacaccctcctgaggagggagctggtgcccaacggcacctcttaggatgaacccagccagctgcgttcctggcctctgcagaatggcatacagaaggcattttaagcaagcgagctgagctcgccgcaggactccgactaccaggcaccggtggcagcacgcaaagggtgtccctgtccctcaaggggtcatggcctccatgttgctcgcccagcgcctggcctgcagcttccagcacagctaccgcctgctggtgcctggatccaatccaggatccagacacattagtcaagctgcagccaaagtcgacgttgaatttgattatgatgggcctctgatgaagacggaagtcccagggcctagatctcaggagttaatgaaacagctgaatataattcagaatgcagaggctgtgcattttttctgcaattacgaagagagccgaggcaattacctggttgatg

SEQ ID NO: 102768 - DNA, 1911 bp, Homo sapiens
  Payload ID: 47
  Gene Symbol: ABAT
  Gene Name: 4-aminobutyrate aminotransferase
  ENST ID: ENST00000569156
  CDS Start-End: 258-1805
gtgtccctttgagtctgcagagaagccagcagctggggctgcagacgggaaaggaatgtcctcagcgtctgccagcacttttgtcttggtcccaacggctgataggaaaatgagaggcagggtcttttctagagagatctggggggtccatttctagccgatgatgcatgcaaagagttcgtgttcacaggacctgggaagcagcggagtagaaagggtggcagcacgcaaagggtgtccctgtccctcaaggggtcatggcctccatgttgctcgcccagcgcctggcctgcagcttccagcacagctaccgcctgctggtgcctggatccagacacattagtcaagctgcagccaaagtcgacgttgaatttgattatgatgggcctctgatgaagacggaagtcccagggcctagatctcaggagttaatgaaacagctgaatataattcagaatgcagaggctgtgcattttttctgcaattacgaagagagccgaggcaattacctggttgatgtggacggcaaccgaatgctggatctttattcccagatctcctctgtccccataggttacagccaccccgccctgctgaaactcatccaacagcctcaaaatgcgagcatgtttgtcaacagacccgccctcggaatcctgcctccggagaactttgtggagaagctccggcagtccttgctctcggtggctcccaaagggatgtcccagctcatcaccatggcctgcggctcctgctccaatgaaaacgccttaaagaccatcttcatgtggtaccggagcaaggaaagagggcagaggggcttctcccaggaggagctggagacgtgcatgattaaccaggcccctggctgccccgactacagcatcctctccttcatgggcgcgttccatgggaggaccatgggttgcttagcgaccacgcactctaaagccattcacaagatcgacatcccttcctttgactggcccatcgcaccgttcccacggctgaaataccctctggaagagtttgtgaaagagaaccaacaggaggaggcccgctgtctggaagaggtggaggatctgattgtgaaatatcggaaaaagaagaagacggtggccgggatcatcgtggagcccatccagtccgagggtggagacaaccacgcatccgatgacttctttcggaagctgagagacatcgccaggaagcatggctgcgccttcttggtggacgaggtccagaccggaggaggctgcacgggcaagttctgggcccatgagcactggggcctggatgacccagcagacgtgatgaccttcagcaagaagatgatgactgggggcttcttccacaaggaggagttcaggcctaatgctccctaccggatcttcaacacctggctgggggacccgtccaagaacctgttgctggctgaggtcatcaacatcatcaagcgggaggacctgctaaataatgcagcccatgccgggaaggccctgctcacaggactgctggacctccaggcccggtacccccagttcatcagcagggtgagaggacgaggcaccttttgctccttcgatactcccgatgattccatacggaataagctcattttaattgccagaaacaaagctctcccagcatgtgactttgagaaaccacgctcctcacctacctcctgcctctttcaggtgtggtgttgggtggctgtggtgacaaatccattcgtttccgtcccacgctggtcttcagggatcaccacgctcacctgttcctcaatattttcagtgacatcttagcagacttcaagtaaagaagccatttccactacagtgagaaagcccggatcccaacagttgtcaaattgattagtttgcctaattcatgttttcacttaaaagtatc

SEQ ID NO: 102769 - DNA, 580 bp, Homo sapiens
  Payload ID: 47
  Gene Symbol: ABAT
  Gene Name: 4-aminobutyrate aminotransferase
  ENST ID: ENST00000568847
  CDS Start-End: 486-580
gatttagaaccagtgtgtctctcctgcagcctccattctgggtgcctccacccccttgccgtcgtcatgttgcatcctgtttctgtctgaaaacccttgtctttctgaatccatctttcagtctctcacattctgtctttcccctcctccttcaccttccctccgtccctctcccttgcgcacttgccgggtaccagctgagtgcatccttttcccaaacctgctctgcttccaaggggcccttttctgtctcctccacctgtccccatgttttggggactgcctggaaatccgggacaccctcctgaggagggagctggtgcccaacggcacctcttaggatgaacccagccagctgcgttcctggcctctgcagaatggcatacagaaggcattttaagcaagcgagctgagctcgccgcaggactccgactaccaggcaccggtggcagcacgcaaagggtgtccctgtccctcaaggggtcatggcctccatgttgctcgcccagcgcctggcctgcagcttccagcacagctaccgcctgctggtgcctggatccagacacattagtcaagctgc

SEQ ID NO: 102770 - DNA, 2423 bp, Homo sapiens
  Payload ID: 47
  Gene Symbol: ABAT
  Gene Name: 4-aminobutyrate aminotransferase
  ENST ID: ENST00000566590
  CDS Start-End: 918-1079
ctcttctgggccccctgtggacctgcgttgacccagcatgggctacaatgggggagttgggtaatcgctcccggtaggttcctccccaacccccgaggcggggtcaggtggagcgtgggcgccagagcagcccctctgccttgggtgtcttggagatgacttggcgccccccggagccccgtcatggctgtggctgcgtccacaacactgcatcagcagagtcctggggaagccatttaggaatctgaagcccgggatttctgctttgtcccttcaggggttcctgagcctgttaaaaaaaaaaaaaaatctaggaagaggccctggaaggaaaaaggggagggagatagcctattttacaaggtctgaaatgatgtgtcttatccttctggcttaaaccaagctgggcttaaaacatcttttaaaaaaaatctgtattctatttttttctctctgtttatcgctctccttctgcctctgttaatctttgtttctgtgtagttgcatcctgtttctgtctgaaaacccttgtctttctgaatccatctttcagtctctcacattctgtctttcccctcctccttcaccttccctccgtccctctcccttgcgcacttgccgggtaccagctgagtgcatccttttcccaaacctgctctgcttccaaggggcccttttctgtctcctccacctgtccccatgttttggggactgcctggaaatccgggacaccctcctgaggagggagctggtgcccaacggcacctcttaggatgaacccagccagctgcgttcctggcctctgcagaatggcatacagaaggcattttaagcaagcgagctgagctcgccgcaggactccgactaccaggcaccggtggcagcacgcaaagggtgtccctgtccctcaaggggtcatggcctccatgttgctcgcccagcgcctggcctgcagcttccagcacagctaccgcctgctggtgcctggagttaatgaaacagctgaatataattcagaatgcagaggctgtgcattttttctgcaattacgaagagagccgaggcaattacctggttgatgtggacggcaaccgaatgctggatctttattcccagatctcctctgtccccataggttacagccaccccgccctgctgaaactcatccaacagcctcaaaatgcgagcatgtttgtcaacagacccgccctcggaatcctgcctccggagaactttgtggagaagctccggcagtccttgctctcggtggctcccaaagggatgtcccagctcatcaccatggcctgcggctcctgctccaatgaaaacgccttaaagaccatcttcatgtggtaccggagcaaggaaagagggcagaggggcttctcccaggaggagctggagacgtgcatgattaaccaggcccctggctgccccgactacagcatcctctccttcatgggcgcgttccatgggaggaccatgggttgcttagcgaccacgcactctaaagccattcacaagatcgacatcccttcctttgactggcccatcgcaccgttcccacggctgaaataccctctggaagagtttgtgaaagagaaccaacaggaggaggcccgctgtctggaagaggtggaggatctgattgtgaaatatcggaaaaagaagaagacggtggccgggatcatcgtggagcccatccagtccgagggtggagacaaccacgcatccgatgacttctttcggaagctgagagacatcgccaggaagcatggctgcgccttcttggtggacgaggtccagaccggaggaggctgcacgggcaagttctgggcccatgagcactggggcctggatgacccagcagacgtgatgaccttcagcaagaagatgatgactgggggcttcttccacaaggaggagttcaggcctaatgctccctaccggatcttcaacacctggctgggggacccgtccaagaacctgttgctggctgaggtcatcaacatcatcaagcgggaggacctgctaaataatgcagcccatgccgggaaggccctgctcacaggactgctggacctccaggcccggtacccccagttcatcagcagggtgagaggacgaggcaccttttgctccttcgatactcccgatgattccatacggaataagctcattttaattgccagaaacaaaggtgtggtgttgggtggctgtggtgacaaatccattcgtttccgtcccacgctggtcttcagggatcaccacgctcacctgttcctcaatattttcagtgacatcttagcagacttcaagtaaagaagccatttccactacagtgagaaagcccggatcccaacagttgtcaaattgattagtttgcctaattcatgttttcacttaaaagtatcagaggtgaa

SEQ ID NO: 102771 - DNA, 634 bp, Homo sapiens
  Payload ID: 47
  Gene Symbol: ABAT
  Gene Name: 4-aminobutyrate aminotransferase
  ENST ID: ENST00000562115
  CDS Start-End: 155-508
aggaaaatgagaggcagggtcttttctagagagatctggggggtccatttctagccgatgatgcatgcaaagagttcgtgttcacaggacctgggaagcagcggagtagaaagggtggcagcacgcaaagggtgtccctgtccctcaaggggtcatggcctccatgttgctcgcccagcgcctggcctgcagcttccagcacagctaccgcctgctggtgcctggatccagacacattagtcaagctgcagccaaagtcgacgttgaatttgattatgatgggcctctgatgaagacggaagtcccagggcctagatctcaggagttaatgaaacagctgaatataattcagaatgcagaggctgtgcattttttctgcaattacgaagagagccgaggcaattacctggttgatgtggacggcaaccgaatgctggatctttattcccagatctcctctgtccccatagagtctcactgtcacccaggctggagtgcagtggcgtgatctcaactcaatgcaacctccgcctcttgtgttcaagagattcttctgcctcagccccccgagtacctgggattacaggttacagccaccccgccctgctgaaactcatccaacagcctcaaaatg

SEQ ID NO: 102772 - DNA, 592 bp, Homo sapiens
  Payload ID: 47
  Gene Symbol: ABAT
  Gene Name: 4-aminobutyrate aminotransferase
  ENST ID: ENST00000561870
  CDS Start-End: 397-592
ataccccctccccatcttgtgatcaccctcattacctcttctgggccccctgtggacctgcgttgacccagcatgggctacaatgggggagttgggtaatcgctcccgctgagtgcatccttttcccaaacctgctctgcttccaaggggcccttttctgtctcctccacctgtccccatgttttggggactgcctggaaatccgggacaccctcctgaggagggagctggtgcccaacggcacctcttaggatgaacccagccagctgcgttcctggcctctgcagaatggcatacagaaggcattttaagcaagcgagctgagctcgccgcaggactccgactaccaggcaccggtggcagcacgcaaagggtgtccctgtccctcaaggggtcatggcctccatgttgctcgcccagcgcctggcctgcagcttccagcacagctaccgcctgctggtgcctggatccagacacattagtcaagctgcagccaaagtcgacgttgaatttgattatgatgggcctctgatgaagacggaagtcccagggcctagatctcaggagttaatgaaacagctgaatataattc

SEQ ID NO: 102773 - DNA, 1959 bp, Homo sapiens
  Payload ID: 47
  Gene Symbol: ABAT
  Gene Name: 4-aminobutyrate aminotransferase
  ENST ID: ENST00000567812
  CDS Start-End: 263-1810
accagctgagtgcatccttttcccaaacctgctctgcttccaaggggcccttttctgtctcctccacctgtccccatgttttggggactgcctggaaatccgggacaccctcctgaggagggagctggtgcccaacggcacctcttaggatgaacccagccagctgcgttcctggcctctgcagaatggcatacagaaggcattttaagcaagcgagctgagctcgccgcaggactccgactaccaggcaccgtgagtgcaaatgtggtggcagcacgcaaagggtgtccctgtccctcaaggggtcatggcctccatgttgctcgcccagcgcctggcctgcagcttccagcacagctaccgcctgctggtgcctggatccagacacattagtcaagctgcagccaaagtcgacgttgaatttgattatgatgggcctctgatgaagacggaagtcccagggcctagatctcaggagttaatgaaacagctgaatataattcagaatgcagaggctgtgcattttttctgcaattacgaagagagccgaggcaattacctggttgatgtggacggcaaccgaatgctggatctttattcccagatctcctctgtccccataggttacagccaccccgccctgctgaaactcatccaacagcctcaaaatgcgagcatgtttgtcaacagacccgccctcggaatcctgcctccggagaactttgtggagaagctccggcagtccttgctctcggtggctcccaaagggatgtcccagctcatcaccatggcctgcggctcctgctccaatgaaaacgccttaaagaccatcttcatgtggtaccggagcaaggaaagagggcagaggggcttctcccaggaggagctggagacgtgcatgattaaccaggcccctggctgccccgactacagcatcctctccttcatgggcgcgttccatgggaggaccatgggttgcttagcgaccacgcactctaaagccattcacaagatcgacatcccttcctttgactggcccatcgcaccgttcccacggctgaaataccctctggaagagtttgtgaaagagaaccaacaggaggaggcccgctgtctggaagaggtggaggatctgattgtgaaatatcggaaaaagaagaagacggtggccgggatcatcgtggagcccatccagtccgagggtggagacaaccacgcatccgatgacttctttcggaagctgagagacatcgccaggaagcatggctgcgccttcttggtggacgaggtccagaccggaggaggctgcacgggcaagttctgggcccatgagcactggggcctggatgacccagcagacgtgatgaccttcagcaagaagatgatgactgggggcttcttccacaaggaggagttcaggcctaatgctccctaccggatcttcaacacctggctgggggacccgtccaagaacctgttgctggctgaggtcatcaacatcatcaagcgggaggacctgctaaataatgcagcccatgccgggaaggccctgctcacaggactgctggacctccaggcccggtacccccagttcatcagcagggtgagaggacgaggcaccttttgctccttcgatactcccgatgattccatacggaataagctcattttaattgccagaaacaaaggtgtggtgttgggtggctgtggtgacaaatccattcgtttccgtcccacgctggtcttcagggatcaccacgctcacctgttcctcaatattttcagtgacatcttagcagacttcaagtaaagaagccatttccactacagtgagaaagcccggatcccaacagttgtcaaattgattagtttgcctaattcatgttttcacttaaaagtatcagaggtgaatgcacagtgaagggtgatttgtggggagggagcatttttggtggtctt

SEQ ID NO: 102774 - DNA, 466 bp, Homo sapiens
  Payload ID: 47
  Gene Symbol: ABAT
  Gene Name: 4-aminobutyrate aminotransferase
  ENST ID: ENST00000564714
  CDS Start-End: 180-466
ggcgagtcgctgggggaagtcgagcagacacccagcgctgccggaactcggggcgcgcatcccgcaagtcggaacccggcggatcggatcccgcagatcggagacggggcctggagatgcgcccatccagggtctagcggattgcaaagggcctggtagaatcaaagagggatatactaatgcaacttcgagggtggcagcacgcaaagggtgtccctgtccctcaaggggtcatggcctccatgttgctcgcccagcgcctggcctgcagcttccagcacagctaccgcctgctggtgcctggatccagacacattagtcaagctgcagccaaagtcgacgttgaatttgattatgatgggcctctgatgaagacggaagtcccagggcctagatctcaggagttaatgaaacagctgaatataattcagaatgcagaggctgtgcattttttctgcaattacga

SEQ ID NO: 102775 - DNA, 384 bp, Homo sapiens
  Payload ID: 48
  Gene Symbol: HOGA1
  Gene Name: 4-hydroxy-2-oxoglutarate aldolase 1
  ENST ID: ENST00000370642
  CDS Start-End: 1-256
cagcggtggtgatgtgaccaggattgggctgattgttcacaagaccaggaagcaggattttcaggtgttggctggatcggctggctttctgatggccagctatgccttgggagctgtggggggcgtctgcgccctggccaatgtcctgggggctcaggtgtgccagctggagcgactgtgctgcacggggcaatgggaagatgcccagaaactgcagcaccgcctcattgagccaaacgctgcgaaaatcctttgagagaacatcccagtgtgggaactccttgtgactcccagaaaatcctgacttcggacaaagtcgagcaccactgattgtcaaacttaagtgtgcattaaaatttccttgggggcgaattaaagttccaa

SEQ ID NO: 102776 - DNA, 2488 bp, Homo sapiens
  Payload ID: 48
  Gene Symbol: HOGA1
  Gene Name: 4-hydroxy-2-oxoglutarate aldolase 1
  Uniprot ID: Q86XE5
  ENST ID: ENST00000370646
  CDS Start-End: 362-1345
ggctgggcttctggcttcagagctgggaattgtgggaggagggcccagatcccactggagataccgaaggagatactctttagtattgggatcccagaaaccagtcctatatctggccagagggacactgggttgtggcatctctctagctgctacccagaaggaacagggccccctggggcctataggccttgcccctgaccctgggaacacccagctcaggcctgccccagtggccacaagtcagggaggccgcaaatttttaactagaaacattgatcattaatagggggttagaaagagttcaaactaagtctcactctgggacatagaccaattgtgcttcaggcctcctgcagagatgctgggtccccaagtctggtcttctgtgaggcaggggctaagcaggagcttgtccaggaatgtgggggtctgggcctcaggggaggggaagaaggtggacattgcgggtatctacccccctgtgaccacccccttcactgccactgcagaggtggactatgggaaactggaggagaatctgcacaaactgggcaccttccccttccgaggcttcgtggtccagggctccaatggcgagtttcctttcctgaccagcagtgagcgcctcgaggtggtgagccgtgtgcgccaggccatgcccaagaacaggctcctgctagctggctccggatgcgagtccactcaagccacagtggagatgaccgtcagcatggcccaggtcggggctgacgcggccatggtggtgaccccttgctactatcgtggccgcatgagcagtgcggccctcattcaccactacaccaaggttgctgatctctctccaatccctgtggtgctgtacagtgtcccagccaacacagggctggacctgcctgtggatgcagtggtcacgctttcccagcacccgaatattgtgggcatgaaggacagcggtggtgatgtgaccaggattgggctgattgttcacaagaccaggaagcaggattttcaggtgttggctggatcggctggctttctgatggccagctatgccttgggagctgtggggggcgtctgcgccctggccaatgtcctgggggctcaggtgtgccagctggagcgactgtgctgcacggggcaatgggaagatgcccagaaactgcagcaccgcctcattgagccaaacgctgcggtgacccggcgctttgggatcccagggctgaagaaaatcatggactggtttggctactatggaggcccctgccgcgcccccttgcaggagctgagccccgctgaggaggaggcactgcgcatggatttcaccagcaacggctggctctgagggcaggcagggtccatggctggcctgagcccatctcagcctcctgccttgcacttgcagcctgaagcggagagcacagggggatgagggtggcaggcagcggggagccgatagaggctcctttgcctgctgtggtcctccaggcagcctttcacaggcacgcccatgcatatctcctattctaacggcccctgacctctcccttttggatcctaaactgtgtctctggtctgaagactgggaaggagcaatttctcaatttatctttctactgtggatgctttcctacgccctgaggcacatgaagtcagaaaggaagggcagaggggcaagtaggcacagtaagggaattttcttttctttttttttttttttgagacagagtttcactctgtcacccaggctggagtgcaatggcatgatctcgcctcctgggttcaagcgattctcctgcctcagcctcccgagtagctgggattacaggcgcctgccaccacgcccagctaatttttgtatttttagcagagatggggtttcaccgtgttggccaggctggtcttgaactcctgacctcaggtgatccaactgcctcggcctcccaaagtgctgggattacagctgtgagccactgcacccggccgggaatttatcaaaggggggactacttagatttggggcttcaaacctgagtctagcacaatgcagctggaggccagggctactcctacaaacccaagttctgactccttccagggaagtatcagcttaagaaacttgatcaggaaagtgacactggtctttcaaagagccctctttaccctcccatccctgccctccacactgcaagctgcattccagccacaacgcccttttctaaatctattttcattcatctcctattctggtctgtagccttgattccaaccattgaatgcacggagacagcccagtggcttgtcagattggtaaataatgacacctggtggataaatgttacattctagaagactattctggtcagcctaggtctgaaacactaaggagacttggcctgagatagggccatccacttgcctacaggcactctgcttttattattaaaaatagtcactttgttactataataaaatttaacagaaaaaa

SEQ ID NO: 102777 - DNA, 1999 bp, Homo sapiens
  Payload ID: 48
  Gene Symbol: HOGA1
  Gene Name: 4-hydroxy-2-oxoglutarate aldolase 1
  Uniprot ID: Q86XE5
  ENST ID: ENST00000370647
  CDS Start-End: 362-856
ggctgggcttctggcttcagagctgggaattgtgggaggagggcccagatcccactggagataccgaaggagatactctttagtattgggatcccagaaaccagtcctatatctggccagagggacactgggttgtggcatctctctagctgctacccagaaggaacagggccccctggggcctataggccttgcccctgaccctgggaacacccagctcaggcctgccccagtggccacaagtcagggaggccgcaaatttttaactagaaacattgatcattaatagggggttagaaagagttcaaactaagtctcactctgggacatagaccaattgtgcttcaggcctcctgcagagatgctgggtccccaagtctggtcttctgtgaggcaggggctaagcaggagcttgtccaggaatgtgggggtctgggcctcaggggaggggaagaaggtggacattgcgggtatctacccccctgtgaccacccccttcactgccactgcagaggtggactatgggaaactggaggagaatctgcacaaactgggcaccttccccttccgaggagctgtggggggcgtctgcgccctggccaatgtcctgggggctcaggtgtgccagctggagcgactgtgctgcacggggcaatgggaagatgcccagaaactgcagcaccgcctcattgagccaaacgctgcggtgacccggcgctttgggatcccagggctgaagaaaatcatggactggtttggctactatggaggcccctgccgcgcccccttgcaggagctgagccccgctgaggaggaggcactgcgcatggatttcaccagcaacggctggctctgagggcaggcagggtccatggctggcctgagcccatctcagcctcctgccttgcacttgcagcctgaagcggagagcacagggggatgagggtggcaggcagcggggagccgatagaggctcctttgcctgctgtggtcctccaggcagcctttcacaggcacgcccatgcatatctcctattctaacggcccctgacctctcccttttggatcctaaactgtgtctctggtctgaagactgggaaggagcaatttctcaatttatctttctactgtggatgctttcctacgccctgaggcacatgaagtcagaaaggaagggcagaggggcaagtaggcacagtaagggaattttcttttctttttttttttttttgagacagagtttcactctgtcacccaggctggagtgcaatggcatgatctcgcctcctgggttcaagcgattctcctgcctcagcctcccgagtagctgggattacaggcgcctgccaccacgcccagctaatttttgtatttttagcagagatggggtttcaccgtgttggccaggctggtcttgaactcctgacctcaggtgatccaactgcctcggcctcccaaagtgctgggattacagctgtgagccactgcacccggccgggaatttatcaaaggggggactacttagatttggggcttcaaacctgagtctagcacaatgcagctggaggccagggctactcctacaaacccaagttctgactccttccagggaagtatcagcttaagaaacttgatcaggaaagtgacactggtctttcaaagagccctctttaccctcccatccctgccctccacactgcaagctgcattccagccacaacgcccttttctaaatctattttcattcatctcctattctggtctgtagccttgattccaaccattgaatgcacggagacagcccagtggcttgtcagattggtaaataatgacacctggtggataaatgttacattctagaagactattctggtcagcctaggtctgaaacactaaggagacttggcctgagatagggccatccacttgcctacaggcactctgcttttattattaaaaatagtcactttgttactataataaaatttaacagaaaaaa

SEQ ID NO: 102778 - DNA, 1419 bp, Homo sapiens
  Payload ID: 49
  Gene Symbol: HPD
  Gene Name: 4-hydroxyphenylpyruvate dioxygenase
  ENST ID: ENST00000289004
  CDS Start-End: 37-1218
ctctagtcccagtaggaggtttgactaagatcaatcatgacgacttacagtgacaaaggggcaaagcctgagagaggccgattcctccacttccactctgtgaccttctgggttggcaacgccaagcaggccacgtcattctactgcagcaagatgggctttgaacctctagcctacaggggcctggagaccggttcccgggaggtggtcagccatgtaatcaaacaagggaagattgtgtttgtcctctcctcagcgctcaacccctggaacaaagagatgggcgatcacctggtgaaacacggtgacggagtgaaggacattgcgttcgaggtggaagattgtgactacatcgtgcagaaagcacgggaacggggcgccaaaatcatgcgggagccctgggtagagcaagacaagtttgggaaggtgaagtttgctgtgctgcagacgtatggggacaccacacacaccctggtggagaagatgaactacatcggccaattcttgcctggatatgaggccccagcgttcatggaccccctacttcctaaactgcccaaatgcagtctggagatgatcgaccacattgtgggaaaccagcctgatcaggagatggtgtccgcctccgaatggtacctgaaaaacctgcagttccaccgcttctggtccgtggatgacacgcaggtgcacacggaatatagctctctgcgatccattgtggtggccaactatgaagagtccatcaagatgcccatcaatgagccagcgcctggcaagaagaagtcccagatccaggaatatgtggactataacgggggcgctggggtccagcacatcgctctcaagaccgaagacatcatcacagcgattcgccacttgagagagagaggcctggagttcttatctgttccctccacgtactacaaacaactgcgggagaagctgaagacggccaagatcaaggtgaaggagaacattgatgccctggaggagctgaaaatcctggtggactacgacgagaaaggctacctcctgcagatcttcaccaaaccggtgcaggaccggcccacgctcttcctggaagtcatccagcgccacaaccaccagggttttggagccggcaacttcaactcactgttcaaggctttcgaggaggagcagaacctgcggggtaacctcaccaacatggagaccaatggggtggtgcccggcatgtaagccccgcccaccccacggaggccacagccacacagccacgccccctgattctggaactcgcccaacttccctactggctgctccccttgggtcccgcccaccagcggactcggcccccaaggctccgcccacactgaccacgcccctcggcggggccgccctctgctccagccctcccgattaaagcgtgccccggtccaa

SEQ ID NO: 102779 - DNA, 1709 bp, Homo sapiens
  Payload ID: 49
  Gene Symbol: HPD
  Gene Name: 4-hydroxyphenylpyruvate dioxygenase
  Uniprot ID: P32754
  ENST ID: ENST00000543163
  CDS Start-End: 447-1511
tgagcagcatagaagaaataatgccttttgagggacagttgcatttaacagacagccttactaaggcaagagttctggagccgccactgcactccagccggccttggcttctgagctttggattctgggcagtaatggtcacattcccagcgtcctggaaaagcttgcccttggcttctggccctgactctgcctcccactgactagtggacgtcactgcccctctctgggcctggcaacaccatcctgttcaatgaggctgcggctggatcagaggtccccaggcctggaaccttccagggctgggctcagctccccaccccatcccccagacgacttacagtgacaaaggggcaaagcctgagagaggccgattcctccacttccactctgtgaccttctgggttggcaacgccaagcaggccacgtcattctactgcagcaagatgggctttgaacctctagcctacaggggcctggagaccggttcccgggaggtggtcagccatgtaatcaaacaagggaagattgtgtttgtcctctcctcagcgctcaacccctggaacaaagagatgggcgatcacctggtgaaacacggtgacggagtgaaggacattgcgttcgaggtggaagattgtgactacatcgtgcagaaagcacgggaacggggcgccaaaatcatgcgggagccctgggtagagcaagacaagtttgggaaggtgaagtttgctgtgctgcagacgtatggggacaccacacacaccctggtggagaagatgaactacatcggccaattcttgcctggatatgaggccccagcgttcatggaccccctacttcctaaactgcccaaatgcagtctggagatgatcgaccacattgtgggaaaccagcctgatcaggagatggtgtccgcctccgaatggtacctgaaaaacctgcagttccaccgcttctggtccgtggatgacacgcaggtgcacacggaatatagctctctgcgatccattgtggtggccaactatgaagagtccatcaagatgcccatcaatgagccagcgcctggcaagaagaagtcccagatccaggaatatgtggactataacgggggcgctggggtccagcacatcgctctcaagaccgaagacatcatcacagcgattcgccacttgagagagagaggcctggagttcttatctgttccctccacgtactacaaacaactgcgggagaagctgaagacggccaagatcaaggtgaaggagaacattgatgccctggaggagctgaaaatcctggtggactacgacgagaaaggctacctcctgcagatcttcaccaaaccggtgcaggaccggcccacgctcttcctggaagtcatccagcgccacaaccaccagggttttggagccggcaacttcaactcactgttcaaggctttcgaggaggagcagaacctgcggggtaacctcaccaacatggagaccaatggggtggtgcccggcatgtaagccccgcccaccccacggaggccacagccacacagccacgccccctgattctggaactcgcccaacttccctactggctgctccccttgggtcccgcccaccagcggactcggcccccaaggctccgcccacactgaccacgcccctcggcggggccgccctctgctccagccctcccgattaaagcgtgccccggtc

SEQ ID NO: 102780 - DNA, 1629 bp, Homo sapiens
  Payload ID: 50
  Gene Symbol: HPDL
  Gene Name: 4-hydroxyphenylpyruvate dioxygenase-like
  Uniprot ID: Q96IR7
  ENST ID: ENST00000334815
  CDS Start-End: 245-1360
gctcggctcactgagacccggtggtccagacgctgctcctggctggggtggcgctgcagggagaaccgcgagctctcaggggtcggcgggtgacttctttccggaagaaagcgaggaacgcgctctgcggggtgagccggactccccaactccggacgatcagcccaggactgagagccccgaagtccccaaccacaagtaagcggccccagaaggacaagtctaggtcgccgtccagagcgccatggccgcgcccgcccttcgtttgtgccacatcgccttccacgtgcccgccgggcagcccctagcccggaacctgcagcgcctcttcggcttccagcccctggcttcgcgggaggtggacggctggcggcagctagccctgcgcagcggcgacgcggtctttttggtgaacgagggcgcagggtctggagagccgctgtacggcctggatccgcgtcacgccgtgcccagcgccacaaacctgtgcttcgacgtggcggacgccggcgctgcaacccgggagctggcagcgctgggctgcagcgtgcctgtccctcccgttcgcgtgcgggacgcgcagggtgccgccacttacgccgtggtcagctcgcctgccggcatcctcagcctgaccttgctggagcgcgctggctaccgcggacccttcctacccggcttcaggcccgtgtcctctgcgcctggccccgggtgggtcagccgcgtggaccacctgaccttggcctgcacccccggcagctcccccacacttttgcgctggttccacgactgcctgggcttttgccacttgccgctgagcccaggtgaggatcccgagctgggcctcgaaatgacagcagggtttgggcttgggggactgaggcttacagccctgcaggcccagccgggcagcattgtccccactcttgttctggctgagtcccttccgggggcgacgacacgacaggaccaggtggagcagttcctggcccggcacaaggggccaggcctgcagcacgtggggctgtatacgcctaacattgtggaggccactgagggggtggcaactgctggaggccagttcctggctccccctggggcatactaccagcagccaggaaaggagaggcagatccgagctgcagggcacgagcctcatctgcttgctcgacaggggatcctgctagatggtgataaaggcaagtttctgcttcaggtcttcaccaagtccctttttactgaggacactttcttcctggagctgattcagaggcagggggccactggctttggtcagggcaacatcagagctctgtggcagtccgtacaggagcaatctgccaggagccaggaagcctaaggatgcccagggctgggtgcagccagctgtcctgcagctctggggagaccagcacagaactgaggaacatctgcaggaggcccaactagtgaaaggctttgcctccggggggcaggtgtgacttccatttcatcagtgcctgccagaagctgtgtctctcattgggctccaaagaggtgggattttttaaaactaaaacatttcttatatacagtctataataaatatgtaagatacaaagaacaataaaagaattacacactaggaaa

SEQ ID NO: 102781 - DNA, 954 bp, Homo sapiens
  Payload ID: 51
  Gene Symbol: NT5C
  Gene Name: 5', 3'-nucleotidase, cytosolic
  Uniprot ID: Q8TCD5
  ENST ID: ENST00000245552
  CDS Start-End: 89-694
ggcggactccggaagcagcgctccctccgcttccggccgagcccgcgccccccagaccccgagagctcgcagctccggcccggcggcgatggcgcggagcgtgcgcgtgctggtggacatggacggcgtcctggccgacttcgaggccggcctcctgcggggcttccgccgccgcttccctgaggagccgcacgtgccgctggagcaacgccgcggcttcctggcccgcgagcagtaccgcgccctgcggcccgacctggcggataaagtggccagtgtgtacgaagccccgggctttttcctggacctggagcccatcccgggagccttggacgctgtgcgggagatgaacgacctaccggacacgcaggtcttcatctgcaccagccccctgctgaagtaccaccactgtgtgggtgagaagtaccgctgggtggagcagcacctggggccccagttcgtagaacgaattatcctgacaagggacaagacggtggtcttgggggacctgctcattgatgacaaggacacagttcgaggccaggaggagaccccaagctgggagcacatcttgttcacctgctgccacaatcggcacctggtcctgcccccgacaaggagacggctgctctcctggagtgacaactggagggagatcttagatagcaagcgcggagctgcgcagcgggaatgagcggggatgccgcgggcagcagctggagctaaaggaagggcaggcccacaggggccaccgcagagccgagtcggggcggcatcgtgctggtgcctctggccccgtggagtggagcaggcagataccgttaagcgctgtgctaccgggccccaggcccagccacccggtacctcccgagaggctgtccctggaccctggctggcatggaaatacagtgggaaaaccagtcgggacctttaataaaagaccttggctttcta

SEQ ID NO: 102782 - DNA, 653 bp, Homo sapiens
  Payload ID: 51
  Gene Symbol: NT5C
  Gene Name: 5', 3'-nucleotidase, cytosolic
  ENST ID: ENST00000582170
  CDS Start-End: 38-586
ccagaccccgagagctcgcagctccggcccggcggcgatggcgcggagcgtgcgcgtgctggtggacatggacggcgtcctggccgacttcgaggccggcctcctgcggggcttccgccgccgcttccctgaggagccgcacgtgccgctggagcaacgccgcggcttcctggcccgcgagcagtaccgcgccctgcggcccgacctggcggataaagtggccagtgtgtacgaagccccgggctttttcctggacctggagcccatcccgggagccttggacgctgtgcgggagatgaacgacctaccggacacgcaggtcttcatctgcaccagccccctgctgaagtaccaccactgtgtgggtgagaagtaccgctgggtggagcagcacctggggccccagttcgtagaacgaattatcctgacaagggacaagacggtggtcttgggggacctgctcattgatgacaaggacacagttcgaggaggagaccccaagctgggagcacatcttgttcacctgctgccacaatcggcacctggtcctgcccccgacaaggagacggctgctctcctggagtgacaactggagggagatcttagatagcaagcgcggagctgcgcagcgggaatgagcggggatgccgcgg

SEQ ID NO: 102783 - DNA, 958 bp, Homo sapiens
  Payload ID: 51
  Gene Symbol: NT5C
  Gene Name: 5', 3'-nucleotidase, cytosolic
  Uniprot ID: Q8TCD5
  ENST ID: ENST00000580758
  CDS Start-End: 37-390
cagaccccgagagctcgcagctccggcccggcggcgatggcgcggagcgtgcgcgtgctggtggacatggacggcgtcctggccgacttcgaggccggcctcctgcggggcttccgccgccgcttccctgaggagccgcacgtgccgctggagcaacgccgcggcttcctggcccgcgagcagtaccgcgccctgcggcccgacctggcggataaagtggccagtgtgtacgaagccccgggctttttcctggacctggagcccatcccgggagccttggacgctgtgcgggagatgaacgacctaccggaccccctgctgaagtaccaccactgtgtgggtgagaaggtgtggctgccccgcccctactccgcacgtggagctgcctaaatcctgattttaaaaagaaaccaccagaaacccagaagtaccgctgggtggagcagcacctggggccccagttcgtagaacgaattatcctgacaagggacaagacggtggtcttgggggacctgctcattgatgacaaggacacagttcgaggccaggaggagaccccaagctgggagcacatcttgttcacctgctgccacaatcggcacctggtcctgcccccgacaaggagacggctgctctcctggagtgacaactggagggagatcttagatagcaagcgcggagctgcgcagcgggaatgagcggggatgccgcgggcagcagctggagctaaaggaagggcaggcccacaggggccaccgcagagccgagtcggggcggcatcgtgctggtgcctctggccccgtggagtggagcaggcagataccgttaagcgctgtgctaccgggccccaggcccagccacccggtacctcccgagaggctgtccctggaccctggctggcatggaaatacagtgggaaaaccagtcgggacctttaataaaagaccttggctttcta

SEQ ID NO: 102784 - DNA, 921 bp, Homo sapiens
  Payload ID: 51
  Gene Symbol: NT5C
  Gene Name: 5', 3'-nucleotidase, cytosolic
  ENST ID: ENST00000582744
  CDS Start-End: 277-396
ccttctctgtgaagggcgcagagctctcaccctggaacccgcgggcagcgcaccctggggaggagcctttgggcgcgtgcccctgaccgacgccccctccgcccctctgagctcgggcccggagcccccaggagcctccctgcgggtcctcgcgggaacgggaagccgggacccagaactcttgtctttcaggataaagtggccagtgtgtacgaagccccgggctttttcctggacctggagcccatcccgggagccttggacgctgtgcgggagatgaacgacctaccggacacgcaggtcttcatctgcaccagccccctgctgaagtaccaccactgtgtgggtgagaaggtgtggctgccccgcccctactccgcacgtggagctgcctaaatcctgattttaaaaagaaaccaccagaaacccagaagtaccgctgggtggagcagcacctggggccccagttcgtagaacgaattatcctgacaagggacaagacggtggtcttgggggacctgctcattgatgacaaggacacagttcgaggccaggaggagaccccaagctgggagcacatcttgttcacctgctgccacaatcggcacctggtcctgcccccgacaaggagacggctgctctcctggagtgacaactggagggagatcttagatagcaagcgcggagctgcgcagcgggaatgagcggggatgccgcgggcagcagctggagctaaaggaagggcaggcccacaggggccaccgcagagccgagtcggggcggcatcgtgctggtgcctctggccccgtggagtggagcaggcagataccgttaagcgctgtgctaccgggccccaggcccagccacccggtacctcccgagaggctgtccctggaccctggctggcatggaaatacagtg

SEQ ID NO: 102785 - DNA, 720 bp, Homo sapiens
  Payload ID: 51
  Gene Symbol: NT5C
  Gene Name: 5', 3'-nucleotidase, cytosolic
  ENST ID: ENST00000578407
  CDS Start-End: 1-462
gtggacatggacggcgtcctggccgacttcgaggccggcctcctgcggggcttccgccgccgcttccctgaggagccgcacgtgccgctggagcaacgccgcggcttcctggcccgcgagcagtaccgcgccctgcggcccgacctggcggataaagtggccagtgtgtacgaagccccgggctttttcctggacctggagcccatcccgggagccttggacgctgtgcgggagatgaacgacctaccggacacgcaggtcttcatctgcaccagccccctgctgaagtaccaccactgtgtgggtgagaaggaggagaccccaagctgggagcacatcttgttcacctgctgccacaatcggcacctggtcctgcccccgacaaggagacggctgctctcctggagtgacaactggagggagatcttagatagcaagcgcggagctgcgcagcgggaatgagcggggatgccgcgggcagcagctggagctaaaggaagggcaggcccacaggggccaccgcagagccgagtcggggcggcatcgtgctggtgcctctggccccgtggagtggagcaggcagataccgttaagcgctgtgctaccgggccccaggcccagccacccggtacctcccgagaggctgtccctggaccctggctggcatggaaatacagtgggaaaaccagtcgggacctttaataaaagaccttggctttc

SEQ ID NO: 102786 - DNA, 860 bp, Homo sapiens
  Payload ID: 51
  Gene Symbol: NT5C
  Gene Name: 5', 3'-nucleotidase, cytosolic
  ENST ID: ENST00000582160
  CDS Start-End: 250-597
caccctggaacccgcgggcagcgcaccctggggaggagcctttgggcgcgtgcccctgaccgacgccccctccgcccctctgagctcgggcccggagcccccaggagcctccctgcgggtcctcgcgggaacgggaagccgggacccagaactcttgtctttcaggataaagtggccagtgtgtacgaagccccgggctttttcctggacctggagcccatcccgggagccttggacgctgtgcgggagatgaacgacctaccggacacgcaggtcttcatctgcaccagccccctgctgaagtaccaccactgtgtgggtgagaagtaccgctgggtggagcagcacctggggccccagttcgtagaacgaattatcctgacaagggacaagacggtggtcttgggggacctgctcattgatgacaaggacacagttcgaggccaggaggagaccccaagctgggagcacatcttgttcacctgctgccacaatcggcacctggtcctgcccccgacaaggagacggctgctctcctggagtgacaactggagggagatcttagatagcaagcgcggagctgcgcagcgggaatgagcggggatgccgcgggcagcagctggagctaaaggaagggcaggcccacaggggccaccgcagagccgagtcggggcggcatcgtgctggtgcctctggccccgtggagtggagcaggcagataccgttaagcgctgtgctaccgggccccaggcccagccacccggtacctcccgagaggctgtccctggaccctggctggcatggaaatacagtgggaaaaccagtcgggacctttaataaaagaccttggctttctagtc

SEQ ID NO: 102787 - DNA, 582 bp, Homo sapiens
  Payload ID: 51
  Gene Symbol: NT5C
  Gene Name: 5', 3'-nucleotidase, cytosolic
  ENST ID: ENST00000578337
  CDS Start-End: 125-244
cgggaacgggaagccgggacccagaactcttgtctttcaggataaagtggccagtgtgtacgaagccccgggctttttcctggacctggagcccatcccgggagccttggacgctgtgcgggagatgaacgacctaccggacacgcaggtcttcatctgcaccagccccctgctgaagtaccaccactgtgtgggtgagaaggtgtggctgccccgcccctactccgcacgtggagctgcctaaatcctgattttaaaaagaaaccaccagaaacccagaagtaccgctgggtggagcagcacctggggccccagttcgtagaacgaattatcctgacaagggacaagacggtggtcttgggggacctgctcattgatgacaaggacacagttcgaggttggacccgttatccttggcagcctccaggcctctggcctgcccggattagggagagggagtaataatacccatgacagatggcagcgcgctgtctttcactgtcctaggccaggaggagaccccaagctgggagcacatcttgttcacctgctgccacaatcggcacctggtcctgcccccga

SEQ ID NO: 102788 - DNA, 450 bp, Homo sapiens
  Payload ID: 51
  Gene Symbol: NT5C
  Gene Name: 5', 3'-nucleotidase, cytosolic
  ENST ID: ENST00000580423
  CDS Start-End: 1-262
agccccgggctttttcctggacctggagcccatcccgggagccttggacgctgtgcgggagatgaacgacctaccggacacgcaggtcttcatctgcaccagccccctgctgaagtaccaccactgtgtgggtgagaaggccaggaggagaccccaagctgggagcacatcttgttcacctgctgccacaatcggcacctggtcctgcccccgacaaggagacggctgctctcctggagtgacaactggagggagatcttagatagcaagcgcggagctgcgcagcgggaatgagcggggatgccgcgggcagcagctggagctaaaggaagggcaggcccacaggggccaccgcagagccgagtcggggcggcatcgtgctggtgcctctggccccgtggagtggagcaggcagataccgttaagcgctgtgctaccgggccccaggcc

SEQ ID NO: 102789 - DNA, 907 bp, Homo sapiens
  Payload ID: 52
  Gene Symbol: MTHFS
  Gene Name: 5,10-methenyltetrahydrofolate synthetase (5-formyltetrahydrofolate cyclo-ligase)
  Uniprot ID: P49914
  ENST ID: ENST00000258874
  CDS Start-End: 62-673
agaccgaacccgagggcgcccagggcgccgagggcgggactggactcggcttgggcgtgagatggcggcggcagcggtgagcagcgccaagcggagcctgcggggagagctgaagcagcgtctgcgggcgatgagtgccgaggagcggctacgccagtcccgcgtactgagccagaaggtgattgcccacagtgagtatcaaaagtccaaaagaatttccatctttctgagcatgcaagatgaaattgagacagaagagatcatcaaggacattttccaacgaggcaaaatctgcttcatccctcggtaccggttccagagcaatcacatggatatggtgagaatagaatcaccagaggaaatttctttacttcccaaaacatcctggaatatccctcagcctggtgagggtgatgttcgggaggaggccttgtccacagggggacttgatctcatcttcatgccaggccttgggtttgacaaacatggcaaccgactggggaggggcaagggctactatgatgcctatctgaagcgctgtttgcagcatcaggaagtgaagccctacaccctggcgttggctttcaaagaacagatttgcctccaggtcccagtgaatgaaaacgacatgaaggtagatgaagtcctttacgaagactcgtcaacagcttaaatctggattactacagccaaataatcagtgttttatatgagagtaaagcaaagtatgtgtatttttcccttgtcaaaaattagttgaaattgttcattaatgtgaatacagactgcattttaaaattgtaattatgaaataccttatataaaaccatctttaaaaaccaatagaagtgtgaatagtagaatattaattaaaatggaggctatcagcctgtgattttcagcttaa

SEQ ID NO: 102790 - DNA, 595 bp, Homo sapiens
  Payload ID: 52
  Gene Symbol: MTHFS
  Gene Name: 5,10-methenyltetrahydrofolate synthetase (5-formyltetrahydrofolate cyclo-ligase)
  ENST ID: ENST00000560261
  CDS Start-End: 1-118
agtgaagccctacaccctggcgttggctttcaaagaacagatttgcctccaggtcccagtgaatgaaaacgacatgaaggtagatgaagtcctttacgaagactcgtcaacagcttaaatctggattactacagccaaataatcagtgttttatatgagagtaaagcaaataggggctggagttcgaggttacagtgagctatgattgcggcactgaagtccagcctgggtgacagagcaagaccccgtctctaacaacaacaacaacaacaacaacaacaaaaacataaaaaacaatggtaccgtaagaggagacatgttggaaacatctctccttctactcagcctcacgccctgaaaaatttcttcctgtacttatttcttcagattgtcagcagtgttttctacttgtcatccaatagtacttcctgacaaaaagatgcgtcagggtctttttccccctaaattgtttcaccagtatttcatccacatttccatggtatgaagaagaagtaatttttaaatgaccaaaggagaagtcccatctaacatccttctgtacatcattactggaaatgaagagctgacagtcata

SEQ ID NO: 102791 - DNA, 470 bp, Homo sapiens
  Payload ID: 52
  Gene Symbol: MTHFS
  Gene Name: 5,10-methenyltetrahydrofolate synthetase (5-formyltetrahydrofolate cyclo-ligase)
  ENST ID: ENST00000560919
  CDS Start-End: 10-144
gggcgtgagatggcggcggcagcggtgagcagcgccaagcggagcctgcggggagagctgaagcagcgtctgcgggcgatgagtgccgaggagcggctacgccagtcccgcgtactgagccagaaggtgcgaggccgcccgtagcggaagccgcggcggacagaccctccgaaggcctggcggccagcgattgctgatctgtgcatggtgattgcccacagtgagtatcaaaagtccaaaagaatttccatctttctgagcatgcaagatgaaattgagacagaagagatcatcaaggacattttccaacgaggcaaaatctgcttcatccctcggtaccggttccagagcaatcacatggatatggtgagaatagaatcaccagaggaaatttctttacttcccaaaacatcctggaatatccctcagcctggtgagggtgatgttcgggaggaggccttgtccacagg

SEQ ID NO: 102792 - DNA, 948 bp, Homo sapiens
  Payload ID: 52
  Gene Symbol: MTHFS
  Gene Name: 5,10-methenyltetrahydrofolate synthetase (5-formyltetrahydrofolate cyclo-ligase)
  ENST ID: ENST00000559722
  CDS Start-End: 16-714
tgaacagtacaagagatgccaggcaccgtgggtactgccggccatctttaccatccccgccagtggcgctgccgcctccgcggtcccggtgagggcccaggctcagggaggtcaggcggcagggcagcgacggcgcctcgccaccgctcccctaaccggggagggcgagccggaccacggggaccgcacgagggctgggtcccaagggccagaggcgaggtgattgcccacagtgagtatcaaaagtccaaaagaatttccatctttctgagcatgcaagatgaaattgagacagaagagatcatcaaggacattttccaacgaggcaaaatctgcttcatccctcggtaccggttccagagcaatcacatggatatggtgagaatagaatcaccagaggaaatttctttacttcccaaaacatcctggaatatccctcagcctggtgagggtgatgttcgggaggaggccttgtccacagggggacttgatctcatcttcatgccaggccttgggtttgacaaacatggcaaccgactggggaggggcaagggctactatgatgcctatctgaagcgctgtttgcagcatcaggaagtgaagccctacaccctggcgttggctttcaaagaacagatttgcctccaggtcccagtgaatgaaaacgacatgaaggtagatgaagtcctttacgaagactcgtcaacagcttaaatctggattactacagccaaataatcagtgttttatatgagagtaaagcaaagtatgtgtatttttcccttgtcaaaaattagttgaaattgttcattaatgtgaatacagactgcattttaaaattgtaattatgaaataccttatataaaaccatctttaaaaaccaatagaagtgtgaatagtagaatattaattaaaatggaggctatcagcctgtgattttcagcttaa

SEQ ID NO: 102793 - DNA, 1617 bp, Homo sapiens
  Payload ID: 53
  Gene Symbol: NT5M
  Gene Name: 5',3'-nucleotidase, mitochondrial
  Uniprot ID: Q9NPB1
  ENST ID: ENST00000389022
  CDS Start-End: 217-903
gcgcgtgttcctttagggaccgcgcgcgccgcggcctcgctctggggccggtacttgcgcgcccgcaccccgcgctccccgccccgctccccgtcccgcgctccacgcgcgccccagcgttgggggcttctcctccgcggcgggaatgtctggccggctccggcagcacggcgcggcccaggtccccgcgcccacgacgggccagcgcgctgggccatgatccggctgggcggctggtgtgcgcggcggctctgcagcgcggcggttcccgcggggcggcgcggggcggcgggcgggctgggcctggcgggaggccgcgccctacgggtgctggtggacatggacggcgtgctggctgacttcgagggcggattcctcaggaagttccgcgcgcgctttcccgaccagcccttcatcgcgctggaggaccggcgcggcttctgggtgtcggagcagtacggccgcctgcggccagggctgagcgagaaggccatcagcatttgggagtcaaagaatttcttttttgaacttgagcctctgccaggggccgtggaagctgtcaaggagatggccagcctacaaaacactgacgtcttcatctgcacaagccccatcaagatgttcaagtactgtccctatgagaagtatgcctgggtggagaagtactttggccctgactttctggagcagattgtgctgaccagagacaagaccgtggtctctgctgaccttctcatagacgaccggccggacatcacaggggccgagccaacccccagctgggagcatgtcctcttcaccgcctgccacaaccagcacctgcagctgcagcccccccgccgcaggctgcactcgtgggcggacgactggaaggccattctggacagcaagcggccctgctgagctggactgtgcttcgggctcctctgtggggctctgacctcagggctcccagctcggggcctgtggggccagtatgctggtctgggagtccctcctagactcctgggccccatgacctcctgctgcatgtcccttcccttccccagccctgccaggccttaacctgatcacggggcagggctgggccctctgggcgcttggacatagacacgtggtcccaggccgttcagcctgacctcaggcagcaggcaccaagctgccagaagcccaggggctcaggacagggaggagttgaggccactgttcagggggctggtggccgtctccactccctaggcaagttctctgaggcagaagggggttccctgttcccagagtctgcagccatcagcaaggaggaccaggaacccggcgactgaggtgcttccaggtggggacaagcccctcttggtctcagccacagcaccccttattccagctgccctgcccaacctgctcaccccacatgaccttctgtgtattcagcaaacactcactaggtgacagcggccaccaggctctgtgctgggggacgatactggccctggcctcgaccagcttagaggtttctcacacctctgttcccagggccccgctcagggcccagcagagagtccgtaggcttgaacatgtgttgagtgcatgaaaaataaatgctgttcatgtgtgtagctc

SEQ ID NO: 102794 - DNA, 895 bp, Homo sapiens
  Payload ID: 53
  Gene Symbol: NT5M
  Gene Name: 5',3'-nucleotidase, mitochondrial
  ENST ID: ENST00000470418
  CDS Start-End: 162-443
tgcgcgcccgcaccccgcgctccccgccccgctccccgtcccgcgctccacgcgcgccccagcgttgggggcttctcctccgcggcgggaatgtctggccggctccggcagcacggcgcggcccaggtccccgcgcccacgacgggccagcgcgctgggccatgatccggctgggcggctggtgtgcgcggcggctctgcagcgcggcggttcccgcggggcggcgcggggcggcgggcgggctgggcctggcgggaggccgcgccctacgggtgctggtggacatggacggcgtgctggctgacttcgagggcggattcctcaggaagttccgcgcgcgctttcccgaccagcccttcatcgcgctggaggaccggcgcggcttctgggtgtcggagcagtacggccgcctgcggccagggctgagcagctggccttgctgaacacctgagctcaacccctaccatccgactcccgaggtgttctgtccaggatggatagaggggaaagatccaaggagggacgtttacacacagatcttggttggagaaggccatcagcatttgggagtcaaagaatttcttttttgaacttgagcctctgccaggggccgtggaagctgtcaaggagatggccagcctacaaaacactgacgtcttcatctgcacaagccccatcaagatgttcaagtactgtccctatgagaagtatgcctgggtggagaagtactttggccctgactttctggagcagattgtgctgaccagagacaagaccgtggtctctgctgaccttctcatagacgaccggccggacatcacaggcaagtggcctgcgacaggggccgagccaacccccagctgggagcatgtcctcttcaccgcctgccacaacc

SEQ ID NO: 102795 - DNA, 771 bp, Homo sapiens
  Payload ID: 53
  Gene Symbol: NT5M
  Gene Name: 5',3'-nucleotidase, mitochondrial
  ENST ID: ENST00000478373
  CDS Start-End: 186-527
cggcctcgctctggggccggtacttgcgcgcccgcaccccgcgctccccgccccgctccccgtcccgcgctccacgcgcgccccagcgttgggggcttctcctccgcggcgggaatgtctggccggctccggcagcacggcgcggcccaggtccccgcgcccacgacgggccagcgcgctgggccatgatccggctgggcggctggtgtgcgcggcggctctgcagcgcggcggttcccgcggggcggcgcggggcggcgggcgggctgggcctggcgggaggccgcgccctacgggtgctggtggacatggacggcgtgctggctgacttcgagggcggattcctcaggaagttccgcgcgcgctttcccgaccagcccttcatcgcgctggaggaccggcgcggcttctgggtgtcggagcagtacggccgcctgcggccagggctgagcgtgagcgtccccgccccgccccgcgccgggcctccttctcgccccgagccccagacaccgcccctgcgccggtgaccttggacggagaaggccatcagcatttgggagtcaaagaatttcttttttgaacttgagcctctgccaggggccgtggaagctgtcaaggagatggccagcctacaaaacactgacgtcttcatctgcacaagccccatcaagatgttcaagtactgtccctatgagaagtatgcctgggtggagaagtactttggccctgactttctggagcagattgtgctgaccagagacaagaccgtgg

SEQ ID NO: 102796 - DNA, 1408 bp, Homo sapiens
  Payload ID: 53
  Gene Symbol: NT5M
  Gene Name: 5',3'-nucleotidase, mitochondrial
  ENST ID: ENST00000483704
  CDS Start-End: 1-155
acggcgtgctggctgacttcgagggcggattcctcaggaagttccgcgcgcgctttcccgaccagcccttcatcgcgctggaggaccggcgcggcttctgggtgtcggagcagtacggccgcctgcggccagggctgagcagctggccttgctgaacacctgagctcaacccctaccatccgactcccgaggtgttctgtccaggatggatagaggggaaagatccaaggagggacgtttacacacagatcttggagaaggccatcagcatttgggagtcaaagaatttcttttttgaacttgagcctctgccaggggccgtggaagctgtcaaggagatggccagcctacaaaacactgacgtcttcatctgcacaagccccatcaagatgttcaagtactgtccctatgagaagtatgcctgggtggagaagtactttggccctgactttctggagcagattgtgctgaccagagacaagaccgtggtctctgctgaccttctcatagacgaccggccggacatcacaggcaagtggcctgcgacaggggccgagccaacccccagctgggagcatgtcctcttcaccgcctgccacaaccagcacctgcagctgcagcccccccgccgcaggctgcactcgtgggcggacgactggaaggccattctggacagcaagcggccctgctgagctggactgtgcttcgggctcctctgtggggctctgacctcagggctcccagctcggggcctgtggggccagtatgctggtctgggagtccctcctagactcctgggccccatgacctcctgctgcatgtcccttcccttccccagccctgccaggccttaacctgatcacggggcagggctgggccctctgggcgcttggacatagacacgtggtcccaggccgttcagcctgacctcaggcagcaggcaccaagctgccagaagcccaggggctcaggacagggaggagttgaggccactgttcagggggctggtggccgtctccactccctaggcaagttctctgaggcagaagggggttccctgttcccagagtctgcagccatcagcaaggaggaccaggaacccggcgactgaggtgcttccaggtggggacaagcccctcttggtctcagccacagcaccccttattccagctgccctgcccaacctgctcaccccacatgaccttctgtgtattcagcaaacactcactaggtgacagcggccaccaggctctgtgctgggggacgatactggccctggcctcgaccagcttagaggtttctcacacctctgttcccagggccccgctcagggcccagcagagagtccgtaggcttgaacatgtgttgagtgcatgaaaaataaatgctgttcatgtgtgtagctcaa

SEQ ID NO: 102797 - DNA, 1635 bp, Homo sapiens
  Payload ID: 53
  Gene Symbol: NT5M
  Gene Name: 5',3'-nucleotidase, mitochondrial
  ENST ID: ENST00000616989
  CDS Start-End: 217-921
gcgcgtgttcctttagggaccgcgcgcgccgcggcctcgctctggggccggtacttgcgcgcccgcaccccgcgctccccgccccgctccccgtcccgcgctccacgcgcgccccagcgttgggggcttctcctccgcggcgggaatgtctggccggctccggcagcacggcgcggcccaggtccccgcgcccacgacgggccagcgcgctgggccatgatccggctgggcggctggtgtgcgcggcggctctgcagcgcggcggttcccgcggggcggcgcggggcggcgggcgggctgggcctggcgggaggccgcgccctacgggtgctggtggacatggacggcgtgctggctgacttcgagggcggattcctcaggaagttccgcgcgcgctttcccgaccagcccttcatcgcgctggaggaccggcgcggcttctgggtgtcggagcagtacggccgcctgcggccagggctgagcgagaaggccatcagcatttgggagtcaaagaatttcttttttgaacttgagcctctgccaggggccgtggaagctgtcaaggagatggccagcctacaaaacactgacgtcttcatctgcacaagccccatcaagatgttcaagtactgtccctatgagaagtatgcctgggtggagaagtactttggccctgactttctggagcagattgtgctgaccagagacaagaccgtggtctctgctgaccttctcatagacgaccggccggacatcacaggcaagtggcctgcgacaggggccgagccaacccccagctgggagcatgtcctcttcaccgcctgccacaaccagcacctgcagctgcagcccccccgccgcaggctgcactcgtgggcggacgactggaaggccattctggacagcaagcggccctgctgagctggactgtgcttcgggctcctctgtggggctctgacctcagggctcccagctcggggcctgtggggccagtatgctggtctgggagtccctcctagactcctgggccccatgacctcctgctgcatgtcccttcccttccccagccctgccaggccttaacctgatcacggggcagggctgggccctctgggcgcttggacatagacacgtggtcccaggccgttcagcctgacctcaggcagcaggcaccaagctgccagaagcccaggggctcaggacagggaggagttgaggccactgttcagggggctggtggccgtctccactccctaggcaagttctctgaggcagaagggggttccctgttcccagagtctgcagccatcagcaaggaggaccaggaacccggcgactgaggtgcttccaggtggggacaagcccctcttggtctcagccacagcaccccttattccagctgccctgcccaacctgctcaccccacatgaccttctgtgtattcagcaaacactcactaggtgacagcggccaccaggctctgtgctgggggacgatactggccctggcctcgaccagcttagaggtttctcacacctctgttcccagggccccgctcagggcccagcagagagtccgtaggcttgaacatgtgttgagtgcatgaaaaataaatgctgttcatgtgtgtagctc

SEQ ID NO: 102798 - DNA, 10143 bp, Homo sapiens
  Payload ID: 54
  Gene Symbol: XRN1
  Gene Name: 5'-3' exoribonuclease 1
  Uniprot ID: Q8IZH2
  ENST ID: ENST00000264951
  CDS Start-End: 119-5239
atggtcggccgggcggtgtgttgtcatccgcggagcgacgaccggaggctgcggcggagccccggcggggcgtttggtttcggtttggccctgactgggattagtgttgacgatcgaaatgggagtccccaagttttacagatggatctcagagcggtatccctgtctcagcgaagtggtgaaagagcatcagattcctgaatttgacaacttgtacctggatatgaatggaattatacatcagtgctcccatcctaatgatgatgatgttcactttagaatttcagatgataaaatctttactgatatttttcactacctggaggtgttgtttcgcattattaaacccaggaaagtgttctttatggctgtagatggtgtggctcctcgagcaaaaatgaaccagcagcgtgggaggcgttttaggtcagcaaaggaggcagaagacaaaattaaaaaggcaatagagaagggagaaactcttcctacagaggccagatttgattccaactgtatcacaccaggaactgaatttatggccaggttacatgaacatctgaagtattttgtaaatatgaaaatttccacagacaagtcatggcaaggagttaccatctacttctcaggccatgagactcctggagaaggagagcataaaatcatggaatttatcagatccgagaaagcaaagccagatcatgatccaaacaccagacactgtctttatggtttagatgctgacttgattatgcttggattaacaagtcatgaggcacatttttctctcttaagagaagaagttcgatttggtggcaaaaaaacacaacgggtatgtgctccagaagaaactacatttcaccttctacacttgtctttaatgagagagtatattgactatgagttttcagtattaaaagaaaagatcacatttaaatatgatattgaaaggataatagatgattggattttgatggggtttcttgttggtaatgattttatccctcatctacctcatttacatattaatcatgatgcactgcctcttctttatggaacatatgttaccatcctgccagaacttgggggttatattaatgaaagtgggcacctcaacttacctcgatttgagaaataccttgtgaaactatcagattttgatcgggagcacttcagtgaagtttttgtggacctaaaatggtttgaaagcaaagttggtaacaagtacctcaatgaagcagcaggtgtcgcagcagaagaagccaggaactacaaggaaaagaaaaagttaaagggccaggaaaattctctgtgttggactgctttagacaaaaatgaaggcgaaatgataacttctaaggataatttagaagatgagactgaagatgatgacctatttgaaactgagtttagacaatataaaagaacatattacatgacgaagatgggggttgacgtagtatctgatgactttctggctgatcaagctgcatgttatgttcaggcaatacagtggattttgcactattactatcatggagttcagtcctggagctggtattatccttatcattatgcacctttcctgtctgatatacacaacatcagtacactcaaaatccattttgaactaggaaaaccttttaagccatttgaacagcttcttgctgtacttccagcagccagcaaaaatttacttcctgcatgctaccagcatttgatgaccaatgaagactcaccaattatagaatattacccacctgattttaaaactgacctaaatgggaaacaacaggaatgggaagctgtggtgttaatcccttttattgatgagaagcgattattggaagccatggagacatgtaaccactccctcaaaaaggaagagaggaaaagaaaccaacatagtgagtgcctaatgtgctggtatgatagagacacagagtttatctatccttctccatggccagaaaagttccctgccatagaacgatgttgtacaaggtataaaataatatccttagatgcttggcgtgtagacataaacaaaaacaaaataaccagaattgaccagaaagcattatatttctgtggatttcctactctgaaacacatcagacacaaattttttttgaagaaaagtggtgttcaagtattccagcaaagcagtcgtggagaaaacatgatgttggaaatcttagtggatgcagaatcagatgaacttaccgtagaaaatgtagcttcatcagtgcttggaaaatctgtctttgttaattggcctcaccttgaggaagctagagtcgtggctgtatcagatggagaaactaagttttacttggaagaacctccaggaacacagaagctttattcaggaagaactgccccaccatctaaagtggttcatcttggagataaagaacaatctaactgggcaaaagaagtacaaggaatttcagaacactacctgagaagaaaaggaataataataaatgaaacatctgcagttgtgtatgctcagttactcacaggtcgtaaatatcaaataaatcaaaatggtgaagttcgtctagagaaacagtggtcaaaacaagttgttccttttgtttatcaaactattgtcaaggacatccgagctttcgactcccgtttctccaatatcaaaacattggatgatttgtttcctctgagaagtatggtctttatgctgggaactccctattatggctgcactggagaagttcaggattcaggtgatgtgattacagaaggtaggattcgtgtgattttcagcattccatgtgaacccaatcttgatgctttaatacagaaccagcataaatattctataaagtacaacccaggatatgtgttggccagtcgccttggagtgagtggataccttgtttcaaggtttacaggaagtatttttattggaagaggatctaggagaaaccctcatggagaccataaagcaaatgtgggtttaaatctcaaattcaacaagaaaaatgaggaggtacctggatatactaagaaagttggaagtgaatggatgtattcatctgcagcagaacaacttctggcagagtacttagagagagctccagaactatttagttatatagccaaaaatagccaagaggatgtgttctatgaagatgacatttggcctggagaaaatgagaatggtgctgaaaaagttcaagaaattattacttggctaaaaggacatcctgtcagtactttatctcgttcttcttgtgatttacaaattctggatgcagctattgttgagaaaattgaggaagaagtcgaaaagtgcaagcaaagaaagaataataagaaggtgcgagtaacagtgaaaccccatttgctatacagacctttagaacagcaacatggagtcattcctgatcgggatgcagaattttgtctttttgaccgtgttgtaaatgtgagagaaaacttctcagttccagttggccttcgaggcaccatcataggaataaaaggagctaatagagaagccgatgtactatttgaagtattatttgatgaagaatttcctggagggttaacaataagatgctcacctggtagaggttatcgactgccaacaagtgccttggtgaacctttctcatgggagtcgctctgaaactggaaatcagaagttgacagccatcgtaaaaccacaaccagctgtacatcaacatagctcaagttcatcagtttcctctgggcatttgggagccctcaaccattcccctcaatcactttttgttcctactcaagtacctactaaagatgatgatgaattctgcaacatttggcagtccttacagggatctggaaagatgcaatactttcagccaactatacaagagaagggtgcagttctacctcaagaaataagccaagtaaatcaacatcataaatctggctttaatgacaacagtgttaaatatcagcaaagaaaacatgaccctcacagaaaatttaaagaagagtgtaagagtcctaaagctgagtgttggtcccaaaaaatgtccaataagcagcctaactctggaattgagaactttttagcatctttgaatatctccaaagaaaatgaagtacagtcatctcatcatggggagcctccaagtgaagagcatttgtcaccacagtcatttgccatgggaacacggatgcttaaagaaattctaaaaattgatggctctaacactgtggaccataagaatgaaatcaaacagattgctaatgaaatccctgtttcctctaacagaagagatgaatatggattaccctctcagcctaaacaaaataagaaattagcatcttatatgaacaagcctcacagtgctaatgagtaccataatgttcagtctatggacaatatgtgttggcctgcccccagccagatccctcctgtatccacaccagtaactgaactttctcgaatttgttcccttgttggaatgccacaacctgatttctcctttcttaggatgccacagacaatgaccgtttgccaagtaaaattatctaatggcttactggtacatgggccacagtgccactctgaaaatgaagccaaagagaaagctgcactttttgctttacaacagttgggctccttaggcatgaatttccctttgccttcacaagtatttgcaaattatccttcagctgtaccacctggaaccattcctccagcctttcccccacctactggctgggatcactatggaagcaactatgcattgggggcagctaatataatgccttcgtcgtctcatctctttggctcaatgccatggggaccatcggtgccagttcctgggaagcccttccatcatactttatattctgggaccatgcccatggctgggggaataccagggggtgtgcacaatcagtttatacctctgcaggttactaaaaaaagggttgcaaacaaaaagaactttgagaataaggaagcccagagttctcaagccactccagttcagactagccagccagattcttccaacattgtcaaagtaagtccacgggagagctcatcagcttctttgaagtcctctccgattgctcaacctgcatcttcttttcaagttgaaactgcctctcaaggccatagtatatctcaccataagtcaacaccaatctcttcttcaagaagaaaatcaagaaaactggctgttaattttggtgtttctaaaccttctgagtaaatttggctcttagaattaagttaatttcttctctttccatctacctttttataaatacatatctatgtctcataaaaattagaatgtactattttaaaataatatgtgtaaattgaaatttttttcatttttaagttatcaggcacttttcatgctgtttaaaagactgtgtatcaaattgtgcactttaagtatgtgcagtttgttgtatgtcaattatacctcaataaatctgtaataaaaaactaaattaaaccttgcattaaaataatatcacagtatcagtggactaaacattaaaatgtaccactctaatcattggcctcatgattgaagcatcctgaactatgaattagacatcagttagcaataataagcattttttacactatcattgaggaataattacatggagcatgaaatttgggcctccagtataacttactgaatgtggattttatttctctttttaatgatgtaagaaaattgtcaggagaatggctcttatttatgtgtgttttaacttatgctttgttgcctctgagggtctttagacctgctgtgaaaggatcacatttgttgtggtgctgccagttttgctttattctaaattttgtaccaaagcaactttagaataatcagaatatttcatctaactgcttagaactataaatagcattctaaatttgagtaaatacaattttttaggttactcaagaaccagcattagtaatttctagtaaaattgtttcaaaatctacagggtacaatgattacaaattaatcttctaacaaaataaaatatgaaatattagtcatgttaattaataaactgtattattttgtatagctttttatttgcttacctgacattttatgagagcttcatagttggtcggtatgtagtgcttcttgggactgaagaaattctaattgttgtttaagttccaaggtgtgctacaatataggaggcacagtcatcagtttgtgacatacattatttactgcctatttcattctgattctatatttttagctttatgctgaactgttcaatgatgctgggattctctctttgcatgtcatatgtgaatgtgtggttcaagctgtaactgttgaaattattttagaatttatgacgatttctcagcagggcctatgtttatatatatatatatatttattctttagtttttgtgatatgcttatatttttaaggaagtaagttatagcatacttttttaaaagtaggaaccacaatctttatatggagcagcttgttatatctgattttcatgtaactcattggaaactctgccatgactcttaaagtagtcttacttgttttttaaaatgctggtattaaactaaatggactcctttcactaactgctgatttcagagtttaaatgttagcaggatatttgtgtattagcagtgccttcagtataagagagaaatattcattatctgtcatttatcatagtcgtataagtttccatgattttattttctgttattttcataagttcagatgtttatcagttcccaacattgtttctttatctgtagtgggatcttgagtaatgaggctcaagtaaatcctcaatgtgtataattattgcctcataaactctctctttgtttttaaaggaaacatctattatggtaatacaaagaaaagttaaattgtgacagtaatgttatattaacctcttcctactttaaagtgtgaaatgtttcacctcagctgtacaaactccagcattgagaatttgcctcactcattactcctgtgtgacagttatataaatagcatgcagctcacatctgttttagagcatagaagaagcggcacctgccatcttctgaaaactccaaagggaaatttcagtagacatagtgcactaaacccataaggatacttgaccaatatttgagcacagcaagctgacagttctatacagataggcagtgaaagagttttattttccagccaggcgcagtggctcaaatcccagcacttcgggaggctaaggcaggcggatcacttgaggtccggagttccagacaagcctggccaacatgatgaagccctgtctctactaaaaatacaaaaattagccgggcgtgatggcacatgcctttagtcccagctactcgggaggctgaggcatgagaatcatttgaacccgcgaggcagagtctgcagtgagccgagattgcaccactgcactccagcctggagagcagagcaagactctgtctcaaaaaaaagaaaaaagttttattatccttactttttttttaacattattattctaaaggtcaaaactgagaagagattaagataggagagagctccataatggctggatagtggtcaggcattctctattcttttccccctgtagacccattctaaatgtgggcctgaggtcaatgggagatgtgccctccctatggaggatgtaagaagcagaggccatttctgccccatgttgaggaaacaatctgttgatagacctggaatttagagtatatctgaaaagcagttggacttcaagaaatttaaaattctctctttgagatggggtggactaagaccacccccaaagtttaaaaatatgctcattcaacttgaatcttctgaggactttttgtgaaaatggtggactgtttagggcataggacagattccccaaattgctttatgcttccacataactagagcacttcaatctatttaagcctttgtctcctaactgaaacattatttctaaatatttctattcaataagttttttcttttttgagcaacttaagtgaattttgaagattgctccttccagtctcgttccttttcacattttcctgcattacctaataattacctcagcgttagaatttgaatgtattaattgatttaaacatcatgtagactaaagtcttaaacatctaagactcagttgtagttgcagaaaaaaattaaagtcacctctactgaaccttggtttcaatttaagatttttcttgcttttcaaaggggtaactaataaagattgaagggtttttttcccgattggtggaggaatgaagaactattgatgcaagtttttttattgtttctttctatgatcaggtacctgctttcattttagactgctacttccaaactaagctagattcttggttttaatgagaggaggcagagagagggaggcagatggaagaagaaaaacagttaaataagacatacccagtcactgcatttttggactataccgtatctttctagcacaaggaaatagataaactgtaaggtcttttttactcactttttatttatgtgttctatttgtgttagtcataactgtttatagtggttgtctaatttttacttttattatatgagatagagctgtgcagatcttcactcaagttagttctgtcacgcttcttcccattatttagagcacagttttttaaagcaactgtacaatttctcagccttatgagcttgctgtatttcttggtatcatgttgcttccaaattttgtttttactgtagaagacaattaatttattgtagagaagtggctgtgaaagtcgttctctgtctttaaaaatcaattgcagaagttcatttgtcatttttctagagataaattatagtactcaaactggcagtgctcagtatatacattttgtaagctttgtcagtgaaaccatcagttttgcaggagcttcctttcctagtcaagataaagcttaaaattccagaaattaatgtcgttcggactgactttattcatatttccatcaaacttctccaatacagtaagagatagtgttgaaccagcatcaagtctccagaaacatggcagagcagacaggccgttaagtttcacagacatcatagatccttttcttaaagaagaaaaacatgtataaaatagttttagtagtccaaaatgtcaactatctgtagctgcttttgtgtgtgtgtcagtgaacaaataataatgccttgctcaatcaatgcattcagccatctcaagtgcaatttgtgaaggagactatggtttccaaaagatacatttttttacaaagttaaacctgtaaaaagtctttttttttttccctccagccgtacaccaactgcacttggttgtttcagcagttggtatactattaaattgtccaggccaaataggtttctgtagctgttttagtaatttgaagccaaattctcatgctgtttctcattaaaaagaatgagaatttggtccatagttagctttaagttctctcttcctttctttcccttacagttaagggtttggtgggggatggggaggttgttttcgttttttggatttttttgtcttttggctttaagtatcatattttcttttgcctgtatccaactgcttctttgagtattttcatctagtttaatgtgagtaatagatgctgtgctgtcattgaagtgttcaacattttgttcatttaaacaaaagtgtaattcatacatatatagatacatatcttaattgatttctcaactattttataagtaactggaatttttcattagatcttatacagagaagtattttattaaaaattcaaaagggaagacttttatgtgctcattttgtaatttttgattttaaatatctttacattgtctgccaattaaagtgttttaaacttgcattggaatggactccgaatgtatttttgtggtgttacgttatccgtagatttctagcatgaagttagcctcacgatgctgtgcaaaggattttaaaatatgagagtcactgaaagagtttaaacatctgttcatgttaaatgctctatggattttaattaaagacttgagaatgattttataa

SEQ ID NO: 102799 - DNA, 5383 bp, Homo sapiens
  Payload ID: 54
  Gene Symbol: XRN1
  Gene Name: 5'-3' exoribonuclease 1
  Uniprot ID: Q8IZH2
  ENST ID: ENST00000392981
  CDS Start-End: 49-5133
cgtttggtttcggtttggccctgactgggattagtgttgacgatcgaaatgggagtccccaagttttacagatggatctcagagcggtatccctgtctcagcgaagtggtgaaagagcatcagattcctgaatttgacaacttgtacctggatatgaatggaattatacatcagtgctcccatcctaatgatgatgatgttcactttagaatttcagatgataaaatctttactgatatttttcactacctggaggtgttgtttcgcattattaaacccaggaaagtgttctttatggctgtagatggtgtggctcctcgagcaaaaatgaaccagcagcgtgggaggcgttttaggtcagcaaaggaggcagaagacaaaattaaaaaggcaatagagaagggagaaactcttcctacagaggccagatttgattccaactgtatcacaccaggaactgaatttatggccaggttacatgaacatctgaagtattttgtaaatatgaaaatttccacagacaagtcatggcaaggagttaccatctacttctcaggccatgagactcctggagaaggagagcataaaatcatggaatttatcagatccgagaaagcaaagccagatcatgatccaaacaccagacactgtctttatggtttagatgctgacttgattatgcttggattaacaagtcatgaggcacatttttctctcttaagagaagaagttcgatttggtggcaaaaaaacacaacgggtatgtgctccagaagaaactacatttcaccttctacacttgtctttaatgagagagtatattgactatgagttttcagtattaaaagaaaagatcacatttaaatatgatattgaaaggataatagatgattggattttgatggggtttcttgttggtaatgattttatccctcatctacctcatttacatattaatcatgatgcactgcctcttctttatggaacatatgttaccatcctgccagaacttgggggttatattaatgaaagtgggcacctcaacttacctcgatttgagaaataccttgtgaaactatcagattttgatcgggagcacttcagtgaagtttttgtggacctaaaatggtttgaaagcaaagttggtaacaagtacctcaatgaagcagcaggtgtcgcagcagaagaagccaggaactacaaggaaaagaaaaagttaaagggccaggaaaattctctgtgttggactgctttagacaaaaatgaaggcgaaatgataacttctaaggataatttagaagatgagactgaagatgatgacctatttgaaactgagtttagacaatataaaagaacatattacatgacgaagatgggggttgacgtagtatctgatgactttctggctgatcaagctgcatgttatgttcaggcaatacagtggattttgcactattactatcatggagttcagtcctggagctggtattatccttatcattatgcacctttcctgtctgatatacacaacatcagtacactcaaaatccattttgaactaggaaaaccttttaagccatttgaacagcttcttgctgtacttccagcagccagcaaaaatttacttcctgcatgctaccagcatttgatgaccaatgaagactcaccaattatagaatattacccacctgattttaaaactgacctaaatgggaaacaacaggaatgggaagctgtggtgttaatcccttttattgatgagaagcgattattggaagccatggagacatgtaaccactccctcaaaaaggaagagaggaaaagaaaccaacatagtgagtgcctaatgtgctggtatgatagagacacagagtttatctatccttctccatggccagaaaagttccctgccatagaacgatgttgtacaaggtataaaataatatccttagatgcttggcgtgtagacataaacaaaaacaaaataaccagaattgaccagaaagcattatatttctgtggatttcctactctgaaacacatcagacacaaattttttttgaagaaaagtggtgttcaagtattccagcaaagcagtcgtggagaaaacatgatgttggaaatcttagtggatgcagaatcagatgaacttaccgtagaaaatgtagcttcatcagtgcttggaaaatctgtctttgttaattggcctcaccttgaggaagctagagtcgtggctgtatcagatggagaaactaagttttacttggaagaacctccaggaacacagaagctttattcaggaagaactgccccaccatctaaagtggttcatcttggagataaagaacaatctaactgggcaaaagaagtacaaggaatttcagaacactacctgagaagaaaaggaataataataaatgaaacatctgcagttgtgtatgctcagttactcacaggtcgtaaatatcaaataaatcaaaatggtgaagttcgtctagagaaacagtggtcaaaacaagttgttccttttgtttatcaaactattgtcaaggacatccgagctttcgactcccgtttctccaatatcaaaacattggatgatttgtttcctctgagaagtatggtctttatgctgggaactccctattatggctgcactggagaagttcaggattcaggtgatgtgattacagaaggtaggattcgtgtgattttcagcattccatgtgaacccaatcttgatgctttaatacagaaccagcataaatattctataaagtacaacccaggatatgtgttggccagtcgccttggagtgagtggataccttgtttcaaggtttacaggaagtatttttattggaagaggatctaggagaaaccctcatggagaccataaagcaaatgtgggtttaaatctcaaattcaacaagaaaaatgaggaggtacctggatatactaagaaagttggaagtgaatggatgtattcatctgcagcagaacaacttctggcagagtacttagagagagctccagaactatttagttatatagccaaaaatagccaagaggatgtgttctatgaagatgacatttggcctggagaaaatgagaatggtgctgaaaaagttcaagaaattattacttggctaaaaggacatcctgtcagtactttatctcgttcttcttgtgatttacaaattctggatgcagctattgttgagaaaattgaggaagaagtcgaaaagtgcaagcaaagaaagaataataagaaggtgcgagtaacagtgaaaccccatttgctatacagacctttagaacagcaacatggagtcattcctgatcgggatgcagaattttgtctttttgaccgtgttgtaaatgtgagagaaaacttctcagttccagttggccttcgaggcaccatcataggaataaaaggagctaatagagaagccgatgtactatttgaagtattatttgatgaagaatttcctggagggttaacaataagatgctcacctggtagaggttatcgactgccaacaagtgccttggtgaacctttctcatgggagtcgctctgaaactggaaatcagaagttgacagccatcgtaaaaccacaaccagctgtacatcaacatagctcaagttcatcagtttcctctgggcatttgggagccctcaaccattcccctcaatcactttttgttcctactcaagtacctactaaagatgatgatgaattctgcaacatttggcagtccttacagggatctggaaagatgcaatactttcagccaactatacaagagaagggtgcagttctacctcaagaaataagccaagtaaatcaacatcataaatctggctttaatgacaacagtgttaaatatcagcaaagaaaacatgaccctcacagaaaatttaaagaagagtgtaagagtcctaaagctgagtgttggtcccaaaaaatgtccaataagcagcctaactctggaattgagaactttttagcatctttgaatatctccaaagaaaatgaagtacagtcatctcatcatggggagcctccaagtgaagagcatttgtcaccacagtcatttgccatgaagggaacacggatgcttaaagaaattctaaaaattgatggctctaacactgtggaccataagaatgaaatcaaacagattgctaatgaaatccctgtttcctctaacagaagagatgaatatggattaccctctcagcctaaacaaaataagaaattagcatcttatatgaacaagcctcacagtgctaatgagtaccataatgttcagtctatggacaatatgtgttggcctgcccccagccagatccctcctgtatccacaccagtaactgaactttctcgaatttgttcccttgttggaatgccacaacctgatttctcctttcttaggatgccacagacaatgaccgtttgccaagtaaaattatctaatggcttactggtacatgggccacagtgccactctgaaaatgaagccaaagagaaagctgcactttttgctttacaacagttgggctccttaggcatgaatttccctttgccttcacaagtatttgcaaattatccttcagctgtaccacctggaaccattcctccagcctttcccccacctactgctaatataatgccttcgtcgtctcatctctttggctcaatgccatggggaccatcggtgccagttcctgggaagcccttccatcatactttatattctgggaccatgcccatggctgggggaataccagggggtgtgcacaatcagtttatacctctgcaggttactaaaaaaagggttgcaaacaaaaagaactttgagaataaggaagcccagagttctcaagccactccagttcagactagccagccagattcttccaacattgtcaaagtaagtccacgggagagctcatcagcttctttgaagtcctctccgattgctcaacctgcatcttcttttcaagttgaaactgcctctcaaggccatagtatatctcaccataagtcaacaccaatctcttcttcaagaagaaaatcaagaaaactggctgttaattttggtgtttctaaaccttctgagtaaatttggctcttagaattaagttaatttcttctctttccatctacctttttataaatacatatctatgtctcataaaaattagaatgtactattttaaaataatatgtgtaaattgaaatttttttcatttttaagttatcaggcacttttcatgctgtttaaaagactgtgtatcaaattgtgcactttaagtatgtgcagtttgttgtatgtcaattatacctcaataaatctgtaataaaaaactaaa

SEQ ID NO: 102800 - DNA, 2075 bp, Homo sapiens
  Payload ID: 54
  Gene Symbol: XRN1
  Gene Name: 5'-3' exoribonuclease 1
  Uniprot ID: Q8IZH2
  ENST ID: ENST00000463916
  CDS Start-End: 67-1446
ggcggagccccggcggggcgtttggtttcggtttggccctgactgggattagtgttgacgatcgaaatgggagtccccaagttttacagatggatctcagagcggtatccctgtctcagcgaagtggtgaaagagcatcagattcctgaatttgacaacttgtacctggatatgaatggaattatacatcagtgctcccatcctaatgatgatgatgttcactttagaatttcagatgataaaatctttactgatatttttcactacctggaggtgttgtttcgcattattaaacccaggaaagtgttctttatggctgtagatggtgtggctcctcgagcaaaaatgaaccagcagcgtgggaggcgttttaggtcagcaaaggaggcagaagacaaaattaaaaaggcaatagagaagggagaaactcttcctacagaggccagatttgattccaactgtatcacaccaggaactgaatttatggccaggttacatgaacatctgaagtattttgtaaatatgaaaatttccacagacaagtcatggcaaggagttaccatctacttctcaggccatgagactcctggagaaggagagcataaaatcatggaatttatcagatccgagaaagcaaagccagatcatgatccaaacaccagacactgtctttatggtttagatgctgacttgattatgcttggattaacaagtcatgaggcacatttttctctcttaagagaagaagttcgatttggtggcaaaaaaacacaacgggtatgtgctccagaagaaactacatttcaccttctacacttgtctttaatgagagagtatattgactatgagttttcagtattaaaagaaaagatcacatttaaatatgatattgaaaggataatagatgattggattttgatggggtttcttgttggtaatgattttatccctcatctacctcatttacatattaatcatgatgcactgcctcttctttatggaacatatgttaccatcctgccagaacttgggggttatattaatgaaagtgggcacctcaacttacctcgatttgagaaataccttgtgaaactatcagattttgatcgggagcacttcagtgaagtttttgtggacctaaaatggtttgaaagcaaagttggtaacaagtacctcaatgaagcagcaggtgtcgcagcagaagaagccaggaactacaaggaaaagaaaaagttaaagggccaggaaaattctctgtgttggactgctttagacaaaaatgaaggcgaaatgataacttctaaggataatttagaagatgagactgaagatgatgacctatttgaaactgagtttagacaatataaaagaacatattacatgacgaagatgggggttgacgtagtatctgagtacgtttttgccaatgcttttattttaaaatagaaaaaattagattttgcagttattcagaaaatatgattttgatgaagtagtgggagaaaaaggattttttggtttcatgaattattgtgtatgtttcaactagtctggttttggagaagatggtattaattctgacttgtattatattcctgtgataaaaattgctgaagagaaaatgatccttatgtataaggatttttgttacaaagttgtttataatagtaaaaaaattagaaataatctaaatgtccaataagaaggttcatcataattggccactgcttcttcattacagtcaccatctctgtcacctcttccatctccggaatctgcagaactgctaaactggtacttgcagaaagttcataacaatttggaaggatgcttatagtacattattaagtacaaattgtaaaggcaagacatgaaatcatacatacagtatgctctcattaaccttaaaaaaacctagatatagataaaagactgaaacactaaaaatgtaaaagtgatggctataagatgataaaaatgctgttcttcattgtccagattttcactcctgaggaaatagttcttttataataaaaaagcaatatttttcatattaaaaaactacctcccagaaa

SEQ ID NO: 102801 - DNA, 393 bp, Homo sapiens
  Payload ID: 54
  Gene Symbol: XRN1
  Gene Name: 5'-3' exoribonuclease 1
  ENST ID: ENST00000489241
  CDS Start-End: 1-190
agaagagtgtaagagtcctaaagctgagtgttggtcccaaaaaatgtccaataagcagcctaactctggaattgagaactttttagcatctttgaatatctccaaagaaaatgaagtacagtcatctcatcatggggagcctccaagtgaagagcatttgtcaccacagtcatttgccatgaagagatgaatatggattaccctctcagcctaaacaaaataagaaattagacaatgaccgtttgccaagtaaaattatctaatggcttactggtacatgggccacagtgccactctgaaaatgaagccaaagagaaagctgcactttttgctttacaacagttgggctccttaggcatgaatttccctttgccttcacaagtatttgcaaat

SEQ ID NO: 102802 - DNA, 5600 bp, Homo sapiens
  Payload ID: 54
  Gene Symbol: XRN1
  Gene Name: 5'-3' exoribonuclease 1
  ENST ID: ENST00000498077
  CDS Start-End: 1-3481
gaccaatgaagactcaccaattatagaatattacccacctgattttaaaactgacctaaatgggaaacaacaggaatgggaagctgtggtgttaatcccttttattgatgagcgattattggaagccatggagacatgtaaccactccctcaaaaaggaagagaggaaaagaaaccaacatagtgagtgcctaatgtgctggtatgatagagacacagagtttatctatccttctccatggccagaaaagttccctgccatagaacgatgttgtacaaggtataaaataatatccttagatgcttggcgtgtagacataaacaaaaacaaaataaccagaattgaccagaaagcattatatttctgtggatttcctactctgaaacacatcagacacaaattttttttgaagaaaagtggtgttcaagtattccagcaaagcagtcgtggagaaaacatgatgttggaaatcttagtggatgcagaatcagatgaacttaccgtagaaaatgtagcttcatcagtgcttggaaaatctgtctttgttaattggcctcaccttgaggaagctagagtcgtggctgtatcagatggagaaactaagttttacttggaagaacctccaggaacacagaagctttattcaggaagaactgccccaccatctaaagtggttcatcttggagataaagaacaatctaactgggcaaaagaagtacaaggaatttcagaacactacctgagaagaaaaggaataataataaatgaaacatctgcagttgtgtatgctcagttactcacaggtcgtaaatatcaaataaatcaaaatggtgaagttcgtctagagaaacagtggtcaaaacaagttgttccttttgtttatcaaactattgtcaaggacatccgagctttcgactcccgtttctccaatatcaaaacattggatgatttgtttcctctgagaagtatggtctttatgctgggaactccctattatggctgcactggagaagttcaggattcaggtgatgtgattacagaaggtaggattcgtgtgattttcagcattccatgtgaacccaatcttgatgctttaatacagaaccagcataaatattctataaagtacaacccaggatatgtgttggccagtcgccttggagtgagtggataccttgtttcaaggtttacaggaagtatttttattggaagaggatctaggagaaaccctcatggagaccataaagcaaatgtgggtttaaatctcaaattcaacaagaaaaatgaggaggtacctggatatactaagaaagttggaagtgaatggatgtattcatctgcagcagaacaacttctggcagagtacttagagagagctccagaactatttagttatatagccaaaaatagccaagaggatgtgttctatgaagatgacatttggcctggagaaaatgagaatggtgctgaaaaagttcaagaaattattacttggctaaaaggacatcctgtcagtactttatctcgttcttcttgtgatttacaaattctggatgcagctattgttgagaaaattgaggaagaagtcgaaaagtgcaagcaaagaaagaataataagaaggtgcgagtaacagtgaaaccccatttgctatacagacctttagaacagcaacatggagtcattcctgatcgggatgcagaattttgtctttttgaccgtgttgtaaatgtgagagaaaacttctcagttccagttggccttcgaggcaccatcataggaataaaaggagctaatagagaagccgatgtactatttgaagtattatttgatgaagaatttcctggagggttaacaataagatgctcacctggtagaggttatcgactgccaacaagtgccttggtgaacctttctcatgggagtcgctctgaaactggaaatcagaagttgacagccatcgtaaaaccacaaccagctgtacatcaacatagctcaagttcatcagtttcctctgggcatttgggagccctcaaccattcccctcaatcactttttgttcctactcaagtacctactaaagatgatgatgaattctgcaacatttggcagtccttacagggatctggaaagatgcaatactttcagccaactatacaagagaagggtgcagttctacctcaagaaataagccaagtaaatcaacatcataaatctggctttaatgacaacagtgttaaatatcagcaaagaaaacatgaccctcacagaaaatttaaagaagagtgtaagagtcctaaagctgagtgttggtcccaaaaaatgtccaataagcagcctaactctggaattgagaactttttagcatctttgaatatctccaaagaaaatgaagtacagtcatctcatcatggggagcctccaagtgaagagcatttgtcaccacagtcatttgccatgaagggaacacggatgcttaaagaaattctaaaaattgatggctctaacactgtggaccataagaatgaaatcaaacagattgctaatgaaatccctgtttcctctaacagaagagatgaatatggattaccctctcagcctaaacaaaataagaaattagcatcttatatgaacaagcctcacagtgctaatgagtaccataatgttcagtctatggacaatatgtgttggcctgcccccagccagatccctcctgtatccacaccagtaactgaactttctcgaatttgttcccttgttggaatgccacaacctgatttctcctttcttaggatgccacagacaatgaccgtttgccaagtaaaattatctaatggcttactggtacatgggccacagtgccactctgaaaatgaagccaaagagaaagctgcactttttgctttacaacagttgggctccttaggcatgaatttccctttgccttcacaagtatttgcaaattatccttcagctgtaccacctggaaccattcctccagcctttcccccacctactgctaatataatgccttcgtcgtctcatctctttggctcaatgccatggggaccatcggtgccagttcctgggaagcccttccatcatactttatattctgggaccatgcccatggctgggggaataccagggggtgtgcacaatcagtttatacctctgcaggttactaaaaaaagggttgcaaacaaaaagaactttgagaataaggaagcccagagttctcaagccactccagttcagactagccagccagattcttccaacattgtcaaagtaagtccacgggagagctcatcagcttctttgaagtcctctccgattgctcaacctgcatcttcttttcaagttgaaactgcctctcaaggccatagtatatctcaccataagtcaacaccaatctcttcttcaagaagaaaatcaagaaaactggctgttaattttggtgtttctaaaccttctgagtaaatttggctcttagaattaagttaatttcttctctttccatctacctttttataaatacatatctatgtctcataaaaattagaatgtactattttaaaataatatgtgtaaattgaaatttttttcatttttaagttatcaggcacttttcatgctgtttaaaagactgtgtatcaaattgtgcactttaagtatgtgcagtttgttgtatgtcaattatacctcaataaatctgtaataaaaaactaaattaaaccttgcattaaaataatatcacagtatcagtggactaaacattaaaatgtaccactctaatcattggcctcatgattgaagcatcctgaactatgaattagacatcagttagcaataataagcattttttacactatcattgaggaataattacatggagcatgaaatttgggcctccagtataacttactgaatgtggattttatttctctttttaatgatgtaagaaaattgtcaggagaatggctcttatttatgtgtgttttaacttatgctttgttgcctctgagggtctttagacctgctgtgaaaggatcacatttgttgtggtgctgccagttttgctttattctaaattttgtaccaaagcaactttagaataatcagaatatttcatctaactgcttagaactataaatagcattctaaatttgagtaaatacaattttttaggttactcaagaaccagcattagtaatttctagtaaaattgtttcaaaatctacagggtacaatgattacaaattaatcttctaacaaaataaaatatgaaatattagtcatgttaattaataaactgtattattttgtatagctttttatttgcttacctgacattttatgagagcttcatagttggtcggtatgtagtgcttcttgggactgaagaaattctaattgttgtttaagttccaaggtgtgctacaatataggaggcacagtcatcagtttgtgacatacattatttactgcctatttcattctgattctatatttttagctttatgctgaactgttcaatgatgctgggattctctctttgcatgtcatatgtgaatgtgtggttcaagctgtaactgttgaaattattttagaatttatgacgatttctcagcagggcctatgtttatatatatatatatatttattctttagtttttgtgatatgcttatatttttaaggaagtaagttatagcatacttttttaaaagtaggaaccacaatctttatatggagcagcttgttatatctgattttcatgtaactcattggaaactctgccatgactcttaaagtagtcttacttgttttttaaaatgctggtattaaactaaatggactcctttcactaactgctgatttcagagtttaaatgttagcaggatatttgtgtattagcagtgccttcagtataagagagaaatattcattatctgtcatttatcatagtcgtataagtttccatgattttattttctgttattttcataagttcagatgtttatcagttcccaacattgtttctttatctgtagtgggatcttgagtaatgaggctcaagtaaatcctcaatgtgtataattattgcctcataaactctctctttgtttttaaaggaaacatctattatggtaatacaaagaaaagttaaattgtgacagtaatgttatattaacctcttcctactttaaagtgtgaaatgtttcacctcagctgtacaaactccagcattgagaatttgcctcactcattactcctgtgtgacagttatataaatagcatgcagctcacatctgttttagagcatagaagaagcggcacctgccatcttctgaaaactccaaagggaaatttcagtagacatagtgcactaaacccataaggatacttgaccaatatttgagcacagcaagctgacagttctatacagataggcagtgaaagagttttattttccagccaggcgcagtggctcaaatcccagcacttcgggaggctaaggcaggcggatcacttgaggtccggagttccagacaagcctggccaacatgatgaagccctgtctctactaaaaatacaaaa

SEQ ID NO: 102803 - DNA, 686 bp, Homo sapiens
  Payload ID: 54
  Gene Symbol: XRN1
  Gene Name: 5'-3' exoribonuclease 1
  ENST ID: ENST00000477237
  CDS Start-End: 190-686
aattggcaaaatctgagtcatatgaagacacttagcttcagggaagcctgagaactttctaacctacctggtgtcagaaggtcagcaaaggaggcagaagacaaaattaaaaaggcaatagagaagggagaaactcttcctacagaggccagatttgattccaactgtatcacaccaggaactgaatttatggccaggttacatgaacatctgaagtattttgtaaatatgaaaatttccacagacaagtcatggcaaggagttaccatctacttctcaggccatgagactcctggagaaggagagcataaaatcatggaatttatcagatccgagaaagcaaagccagatcatgatccaaacaccagacactgtctttatggtttagatgctgacttgattatgcttggattaacaagtcatgaggcacatttttctctcttaagagaagaagttcgatttggtggcaaaaaaacacaacgggtatgtgctccagaagaaactacatttcaccttctacacttgtctttaatgagagagtatattgactatgagttttcagtattaaaagaaaagatcacatttaaatatgatattgaaaggataatagatgattggattttgatggggtttcttgttggtaatgattttatccctcatctacctcatttacatattaatcatga

SEQ ID NO: 102804 - DNA, 1180 bp, Homo sapiens
  Payload ID: 54
  Gene Symbol: XRN1
  Gene Name: 5'-3' exoribonuclease 1
  ENST ID: ENST00000486211
  CDS Start-End: 69-392
gcggcggagccccggcggggcgtttggtttcggtttggccctgactgggattagtgttgacgatcgaaatgggagtccccaagttttacagatggatctcagagcggtatccctgtctcagcgaagtggtgaaagagcatcagattcctgaatttgacaacttgtacctggatatgaatggaattatacatcagtgctcccatcctaatgatgatgatgttcactttagaatttcagatgataaaatctttactgatatttttcactacctggaggtgttgtttcgcattattaaacccaggaaagtgttctttatggctgtagatggtgtggctcctcgagcaaaaatgaaccagcagcgtgggaggcgttttagattatgcttggattaacaagtcatgaggcacatttttctctcttaagagaagaagttcgatttggtggcaaaaaaacacaacgggtatgtgctccagaagaaactacatttcaccttctacacttgtctttaatgagagagtatattgactatgagttttcagtattaaaagaaaagatcacatttaaatatgatattgaaaggataatagatgattggattttgatggggtttcttgttggtaatgattttatccctcatctacctcatttacatattaatcatgatgcactgcctcttctttatggaacatatgttaccatcctgccagaacttgggggttatattaatgaaagtgggcacctcaacttacctcgatttgagaaataccttgtgaaactatcagattttgatcgggagcacttcagtgaagtttttgtggacctaaaatggtttgaaagcaaagttggtaacaagtacctcaatgaagcagcaggtgtcgcagcagaagaagccaggaactacaaggaaaagaaaaagttaaagggccaggaaaattctctgtgttggactgctttagacaaaaatgaaggcgaaatgataacttctaaggataatttagaagatgagactgaagatgatgacctatttgaaactgagtttagacaatataaaagaacatattacatgacgaagatgggggttgacgtagtatctgagtacgtttttgccaatgcttttattttaaaatagaaaaaattagattttgcagttattcagaaaatatgattttgatgaagtagt

SEQ ID NO: 102805 - DNA, 3437 bp, Homo sapiens
  Payload ID: 55
  Gene Symbol: XRN2
  Gene Name: 5'-3' exoribonuclease 2
  Uniprot ID: Q9H0D6
  ENST ID: ENST00000377191
  CDS Start-End: 96-2948
acgtgggaggaagtgctggtgccctctgccgctgctcccgtctctttggttacgctcgtcagccggtcggccgccgcctccagccgtgtgccgctatgggagtcccggcgttcttccgctggctcagccgcaagtacccgtccatcatagtcaactgcgtggaagagaagccaaaagaatgcaatggtgtaaagattccagttgatgccagtaaacctaatccaaatgatgtggagtttgataatctgtatttggatatgaatggaatcatccatccctgtactcatcctgaagacaaaccagcaccaaaaaatgaagatgaaatgatggttgcaatttttgagtacattgacagacttttcagtattgtaagaccaagaagacttctctacatggcaatagatggagtggcaccacgtgctaaaatgaaccagcagcgttcaaggaggttcagggcatcaaaagaaggaatggaagcagcagtcgagaagcagcgagtcagggaagaaatattggcaaaaggtggctttcttcctccagaagaaataaaagaaagatttgacagcaactgtattacaccaggaactgaattcatggacaatcttgctaaatgccttcgctattacatagctgatcgtttaaataatgaccctgggtggaaaaatttgacagttattttatctgatgctagtgctcctggtgaaggagaacataaaatcatggattacattagaaggcaaagagcccagcctaaccatgacccaaatactcatcattgtttatgtggagcagatgctgatctcattatgcttggccttgccacacatgaaccgaactttaccattattagagaagaattcaaaccaaacaagcccaaaccatgtggtctttgtaatcagtttggacatgaggtcaaagattgtgaaggtttgccaagagaaaagaagggaaagcatgatgaacttgccgatagtcttccttgtgcagaaggagagtttatcttccttcggcttaatgttcttcgtgagtatttggaaagagaactcacaatggccagcctaccattcacatttgatgttgagaggagcattgatgactgggttttcatgtgcttctttgtgggaaatgacttcctccctcatttgccatcgttagagattagggaaaatgcaattgaccgtttggttaacatatacaaaaatgtggtacacaaaactgggggttaccttacagaaagtggttatgtcaatctgcaaagagtacagatgatcatgttagcagttggtgaagttgaggatagcatttttaaaaagagaaaggatgatgaggacagttttagaagacgacagaaagaaaaaagaaagagaatgaagagagatcaaccagctttcactcctagtggaatattaactcctcatgccttgggttcaagaaattcaccaggttctcaagtagccagtaatccgagacaagcagcctatgaaatgaggatgcagaataactctagtccttcgatatctcctaatacgagtttcacatctgatggctccccgtctccattaggaggaattaagcgaaaagcagaagacagtgacagtgaacctgagccagaggataatgtcaggttatgggaagctggctggaagcagcggtactacaagaacaaatttgatgtggatgcagctgatgagaaattccgtcggaaagttgtgcagtcgtacgttgaaggactttgctgggttcttagatattattaccagggctgtgcttcctggaagtggtattatccatttcattatgcaccatttgcttcagactttgaaggcattgcagacatgccatctgattttgagaagggtacgaaaccgtttaaaccactagaacaacttatgggggtatttccagctgcaagtggtaattttctacctccatcatggcggaagctcatgagtgatcctgattctagtataattgacttctatcctgaagattttgctattgatttgaatgggaagaaatatgcatggcaaggtgttgctctcttgccattcgtggatgagcgaaggctacgagctgccctagaagaggtatacccagacctcactccagaagagaccagaagaaacagccttggaggtgatgtcttatttgtggggaaacatcacccactccatgacttcattttagagctgtaccagacaggttccacagagccagtggaggtaccccctgaactatgtcatgggattcaaggaaagttttctttggatgaagaagccattcttccagatcaaatagtatgttctcctgttcctatgttaagggatctgacacagaacactgtagtcagtattaattttaaagacccacagtttgctgaagattacatttttaaagctgtaatgcttccaggagcaagaaagccagcagcagtactgaaacctagtgactgggaaaaatccagcaatggacggcagtggaagcctcagcttggctttaaccgtgaccggaggcctgtgcacctggatcaggcagccttcaggactttgggccatgtgatgccaagaggctcaggaactggcatttacagcaatgctgcaccaccacctgtgacttaccagggaaacttatacaggccgcttttgagaggacaagcccagattccaaaacttatgtcaaatatgaggccccaggattcctggcgaggtcctcctccccttttccagcagcaaaggtttgacagaggcgttggggctgaacctctgctcccatggaaccggatgctgcaaacccagaatgcagccttccagccaaaccagtaccagatgctagctgggcctggtgggtatccacccagacgagatgatcgtggagggagacagggatatcccagagaaggaaggaaataccctttgccaccaccctcaggaagatacaattggaattaagcttttgtaaagctttcccaaatcctttcatcattctacagttttatgctatttgtggaaagatttctttctcaagtagtagtttttaataaaactacagtactttgtgtatttcttttaactgtgtatatttctactgatctgatctcactgtttatgttgctttccaaagatgtatgttgcataatacagtggatctgaatttattattgcttataaaacacatttgatggaataggagtactggtttttcataatggttaaaaatgaaaccagctgtggatttcaaaacacagtgtattctagatcatctaagatccatgctgatttttattgcacaagaattaggtttgaactcgagctggaacctcagcaaactagagtatatattgttcagtatttctttggaaacatttcattaatgtacttgtcttacagaaatttctgaactttagtaaaaaaaaataaagttaaacttttaaaactctg

SEQ ID NO: 102806 - DNA, 2213 bp, Homo sapiens
  Payload ID: 56
  Gene Symbol: ATIC
  Gene Name: 5-aminoimidazole-4-carboxamide ribonucleotide formyltransferase/IMP cyclohydrolase
  Uniprot ID: P31939
  ENST ID: ENST00000236959
  CDS Start-End: 327-2105
actttggggtcgtgggcagatcgctggctcccacgcctggacttcgggatcgcaggcaggatcccttccagcccaagcactccgcccaggcgcgccaggcagagccccaccccatcccgccgttcccttcagccccggggcgcggatcttgcatctgaaactgagcagagcagggcgccgggcagggccggcgggccacgtgataagcccggaaacagctccgccccctcgcttcctgagccgccacatcccggcagccctcctacctgcgcacgtggtgccgccgctgctgcctcccgctcgccctgaacccagtgcctgcagccatggctcccggccagctcgccttatttagtgtctctgacaaaaccggccttgtggaatttgcaagaaacctgaccgctcttggtttgaatctggtcgcttccggagggactgcaaaagctctcagggatgctggtctggcagtcagagatgtctctgagttgacgggatttcctgaaatgttggggggacgtgtgaaaactttgcatcctgcagtccatgctggaatcctagctcgtaatattccagaagataatgctgacatggccagacttgatttcaatcttataagagttgttgcctgcaatctctatccctttgtaaagacagtggcttctccaggtgtaactgttgaggaggctgtggagcaaattgacattggtggagtaaccttactgagagctgcagccaaaaaccacgctcgagtgacagtggtgtgtgaaccagaggactatgtggtggtgtccacggagatgcagagctccgagagtaaggacacctccttggagactagacgccagttagccttgaaggcattcactcatacggcacaatatgatgaagcaatttcagattatttcaggaaacagtacagcaaaggcgtatctcagatgcccttgagatatggaatgaacccacatcagacccctgcccagctgtacacactgcagcccaagcttcccatcacagttctaaatggagcccctggatttataaacttgtgcgatgctttgaacgcctggcagctggtgaaggaactcaaggaggctttaggtattccagccgctgcctctttcaaacatgtcagcccagcaggtgctgctgttggaattccactcagtgaagatgaggccaaagtctgcatggtttatgatctctataaaaccctcacacccatctcagcggcatatgcaagagcaagaggggctgataggatgtcttcatttggtgattttgttgcattgtccgatgtttgtgatgtaccaactgcaaaaattatttccagagaagtatctgatggtataattgccccaggatatgaagaagaagccttgacaatactttccaaaaagaaaaatggaaactattgtgtccttcagatggaccaatcttacaaaccagatgaaaatgaagttcgaactctctttggtcttcatttaagccagaagagaaataatggtgtcgtcgacaagtcattatttagcaatgttgttaccaaaaataaagatttgccagagtctgccctccgagacctcatcgtagccaccattgctgtcaagtacactcagtctaactctgtgtgctacgccaagaacgggcaggttatcggcattggagcaggacagcagtctcgtatacactgcactcgccttgcaggagataaggcaaactattggtggcttagacaccatccacaagtgctttcgatgaagtttaaaacaggagtgaagagagcagaaatctccaatgccatcgatcaatatgtgactggaaccattggcgaggatgaagatttgataaagtggaaggcactgtttgaggaagtccctgagttactcactgaggcagagaagaaggaatgggttgagaaactgactgaagtttctatcagctctgatgccttcttccctttccgagataacgtagacagagctaaaaggagtggtgtggcgtacattgcggctccctccggttctgctgctgacaaagttgtgattgaggcctgcgacgaactgggaatcatcctcgctcatacgaaccttcggctcttccaccactgattttaccacacactgttttttggcttgcttatgtgtaggtgaacagtcacgcctgaaactttgaggataactttttaaaaaaataaaacagtatctcttaatcactgg

SEQ ID NO: 102807 - DNA, 569 bp, Homo sapiens
  Payload ID: 56
  Gene Symbol: ATIC
  Gene Name: 5-aminoimidazole-4-carboxamide ribonucleotide formyltransferase/IMP cyclohydrolase
  ENST ID: ENST00000444305
  CDS Start-End: 188-442
gcgcggatcttgcatctgaaactgagcagagcagggcgccgggcagggccggcgggccacgtgataagcccggaaacagctccgccccctcgcttcctgagccgccacatcccggcagccctcctacctgcgcacgtggtgccgccgctgctgcctcccgctcgccctgaacccagtgcctgcagccatggctcccggccagctcgccttatttagtgtctctgacaaaaccggccttgtggaatttgcaagaaacctgaccgctcttggtttgaatctggtcgcttccggagggactgcaaaagctctcagggatgctggtctggcagtcagagatgtctctgagttgacgggatttcctgaaatgttggggggacgtgtgaaaactttgcatcctgcagtccatgctgagttgttgcctgcaatctctatccctttgtaaagacagtggcttctccaggtgtaactgttgaggaggctgtggagcaaattgacattggtggagtaaccttactgagagctgcagccaaaaaccacgctcgagtgacagtggtgtgtgaaccagagga

SEQ ID NO: 102808 - DNA, 1046 bp, Homo sapiens
  Payload ID: 56
  Gene Symbol: ATIC
  Gene Name: 5-aminoimidazole-4-carboxamide ribonucleotide formyltransferase/IMP cyclohydrolase
  ENST ID: ENST00000427397
  CDS Start-End: 14-145
agtgcctgcagccatggctcccggccagctcggtgaggccctagcggagcggcgcggtctgcgtcctcgcctgcggccccccacgctcccgccttggcggcggccggcgggacccggcactgcaggggcggcgctgcgggattgaaagccagcgtccccgctccccggccgggccgcagcctgcgtggggcccgccttagagcagctcgcgggtccttatttagtgtctctgacaaaaccggccttgtggaatttgcaagaaacctgaccgctcttggtttgaatctggtcgcttccggagggactgcaaaagctctcagggatgctggtctggcagtcagagatgtctctgagttgacgggatttcctgaaatgttggggggacgtgtgaaaactttgcatcctgcagtccatgctggaatcctagctcgtaatattccagaagataatgctgacatggccagacttgatttcaatcttataagagttgttgcctgcaatctctatccctttgtaaagacagtggcttctccaggtgtaactgttgaggaggctgtggagcaaattgacattggtggagtaaccttactgagagctgcagccaaaaaccacgctcgagtgacagtggtgtgtgaaccagaggactatgtggtggtgtccacggagatgcagagctccgagagtaaggacacctccttggagactagacgccagttagccttgaagttctaaatggagcccctggatttataaacttgtgcgatgctttgaacgcctggcagctggtgaaggaactcaaggaggctttaggtattccagccgctgcctctttcaaacatgtcagcccagcaggtgctgctgttggaattccactcagtgaagatgaggccaaagtctgcatggtttatgatctctataaaaccctcacacccatctcagcggcatatgcaagagcaagaggggctgataggatgtcttcatttggtgattttgttgcattgtccgatgtttgtgatgtaccaactgcaaaaattatttccagagaa

SEQ ID NO: 102809 - DNA, 713 bp, Homo sapiens
  Payload ID: 56
  Gene Symbol: ATIC
  Gene Name: 5-aminoimidazole-4-carboxamide ribonucleotide formyltransferase/IMP cyclohydrolase
  ENST ID: ENST00000426233
  CDS Start-End: 1-694
aatatttttgcaggtatctgatggtataattgccccaggatatgaagaagaagccttgacaatactttccaaaaagaaaaatggaaactattgtgtccttcagatggaccaatcttacaaaccagatgaaaatgaagttcgaactctctttggtcttcatttaagccagaagagaaataatggtgtcgtcgacaagtcattatttagcaatgttgttaccaaaaataaagatttgccagagtctgccctccgagacctcatcgtagccaccattgctgtcaagtacactcagtctaactctgtgtgctacgccaagaacgggcaggttatcggcattggagcaggacagcagtctcgtatacactgcactcgccttgcaggagataaggcaaactattggtggcttagacaccatccacaagtgctttcgatgaagtttaaaacaggagtgaagagagcagaaatctccaatgccatcgatcaatatgtgactggaaccattggcgaggatgaagatttgataaagtggaaggcactgtttgaggaagtccctgagttactcactgaggcagagaagaaggaatgggttgagaaactgactgaagtttctatcagctctgatgccttcttccctttccgagataacgtagacagagctaaaagggtaagtatggaattgggtgcatttgcttagagttgagcattatgtagaa

SEQ ID NO: 102810 - DNA, 695 bp, Homo sapiens
  Payload ID: 56
  Gene Symbol: ATIC
  Gene Name: 5-aminoimidazole-4-carboxamide ribonucleotide formyltransferase/IMP cyclohydrolase
  ENST ID: ENST00000413174
  CDS Start-End: 185-695
ccttatttagtgtctctgacaaaaccggccttgtggaatttgcaagaaacctgaccgctcttggtttgaatctggtcgcttccggagggactgcaaaagctctcagggatgctggtctggcagtcagtaccattctgtttatctgtttttcagagatgtctctgagttgacgggatttcctgaaatgttggggggacgtgtgaaaactttgcatcctgcagtccatgctggaatcctagctcgtaatattccagaagataatgctgacatggccagacttgatttcaatcttataagagttgttgcctgcaatctctatccctttgtaaagacagtggcttctccaggtgtaactgttgaggaggctgtggagcaaattgacattggtggagtaaccttactgagagctgcagccaaaaaccacgctcgagtgacagtggtgtgtgaaccagaggactatgtggtggtgtccacggagatgcagagctccgagagtaaggacacctccttggagactagacgccagttagccttgaaggcattcactcatacggcacaatatgatgaagcaatttcagattatttcaggaaacagtacagcaaaggcgtatctcagatgcccttgagatatggaatgaacccacatcagacccctgcccagctgtacacactgcagcccaagcttcccatcacag

SEQ ID NO: 102811 - DNA, 2187 bp, Homo sapiens
  Payload ID: 56
  Gene Symbol: ATIC
  Gene Name: 5-aminoimidazole-4-carboxamide ribonucleotide formyltransferase/IMP cyclohydrolase
  ENST ID: ENST00000443953
  CDS Start-End: 72-203
agccctcctacctgcgcacgtggtgccgccgctgctgcctcccgctcgccctgaacccagtgcctgcagccatggctcccggccagctcggtgaggccctagcggagcggcgcggtctgcgtcctcgcctgcggccccccacgctcccgccttggcggcggccggcgggacccggcactgcaggggcggcgctgcgggattgaaagccagcgtccccgctccccggccgggccgcagcctgcgtggggcccgccttagagcagctcgcgggtgtaagacctggggaggcccggaccaggcctgcgaacgcagggtccagccttatttagtgtctctgacaaaaccggccttgtggaatttgcaagaaacctgaccgctcttggtttgaatctggtcgcttccggagggactgcaaaagctctcagggatgctggtctggcagtcagagatgtctctgagttgacgggatttcctgaaatgttggggggacgtgtgaaaactttgcatcctgcagtccatgctggaatcctagctcgtaatattccagaagataatgctgacatggccagacttgatttcaatcttataagagttgttgcctgcaatctctatccctttgtaaagacagtggcttctccaggtgtaactgttgaggaggctgtggagcaaattgacattggtggagtaaccttactgagagctgcagccaaaaaccacgctcgagtgacagtggtgtgtgaaccagaggactatgtggtggtgtccacggagatgcagagctccgagagtaaggacacctccttggagactagacgccagttagccttgaaggcattcactcatacggcacaatatgatgaagcaatttcagattatttcaggaaacagtacagcaaaggcgtatctcagatgcccttgagatatggaatgaacccacatcagacccctgcccagctgtacacactgcagcccaagcttcccatcacagttctaaatggagcccctggatttataaacttgtgcgatgctttgaacgcctggcagctggtgaaggaactcaaggaggctttaggtattccagccgctgcctctttcaaacatgtcagcccagcaggtgctgctgttggaattccactcagtgaagatgaggccaaagtctgcatggtttatgatctctataaaaccctcacacccatctcagcggcatatgcaagagcaagaggggctgataggatgtcttcatttggtgattttgttgcattgtccgatgtttgtgatgtaccaactgcaaaaattatttccagagaagtatctgatggtataattgccccaggatatgaagaagaagccttgacaatactttccaaaaagaaaaatggaaactattgtgtccttcagatggaccaatcttacaaaccagatgaaaatgaagttcgaactctctttggtcttcatttaagccagaagagaaataatggtgtcgtcgacaagtcattatttagcaatgttgttaccaaaaataaagatttgccagagtctgccctccgagacctcatcgtagccaccattgctgtcaagtacactcagtctaactctgtgtgctacgccaagaacgggcaggttatcggcattggagcaggacagcagtctcgtatacactgcactcgccttgcaggagataaggcaaactattggtggcttagacaccatccacaagtgctttcgatgaagtttaaaacaggagtgaagagagcagaaatctccaatgccatcgatcaatatgtgactggaaccattggcgaggatgaagatttgataaagtggaaggcactgtttgaggaagtccctgagttactcactgaggcagagaagaaggaatgggttgagaaactgactgaagtttctatcagctctgatgccttcttccctttccgagataacgtagacagagctaaaaggagtggtgtggcgtacattgcggctccctccggttctgctgctgacaaagttgtgattgaggcctgcgacgaactgggaatcatcctcgctcatacgaaccttcggctcttccaccactgattttaccacacactgttttttggcttgcttatgtgtaggtgaacagtcacgcctgaaactttgaggataactttttaaaaaaataaaacagtatctcttaatcactgg

SEQ ID NO: 102812 - DNA, 2275 bp, Homo sapiens
  Payload ID: 56
  Gene Symbol: ATIC
  Gene Name: 5-aminoimidazole-4-carboxamide ribonucleotide formyltransferase/IMP cyclohydrolase
  Uniprot ID: P31939
  ENST ID: ENST00000435675
  CDS Start-End: 392-2167
gtggtgccgccgctgctgcctcccgctcgccctgaacccagtgcctgcagccatggctcccggccagctcggtgaggccctagcggagcggcgcggtctgcgtcctcgcctgcggccccccacgctcccgccttggcggcggccggcgggacccggcactgcaggggcggcgctgcgggattgaaagccagcgtccccgctccccggccgggccgcagcctgcgtggggcccgccttagagcagctcgcgggtgtaagacctggggaggcccggaccaggcctgcgaacgcagggtccaggtgctggccttgcgattcgagaatctcctcccccagaccctcccaaggccttgcagaacacagtgcaatgtgctgcgaatcatgagaaaaaatgtcttctctttcagccttatttagtgtctctgacaaaaccggccttgtggaatttgcaagaaacctgaccgctcttggtttgaatctggtcgcttccggagggactgcaaaagctctcagggatgctggtctggcagtcagagatgtctctgagttgacgggatttcctgaaatgttggggggacgtgtgaaaactttgcatcctgcagtccatgctggaatcctagctcgtaatattccagaagataatgctgacatggccagacttgatttcaatcttataagagttgttgcctgcaatctctatccctttgtaaagacagtggcttctccaggtgtaactgttgaggaggctgtggagcaaattgacattggtggagtaaccttactgagagctgcagccaaaaaccacgctcgagtgacagtggtgtgtgaaccagaggactatgtggtggtgtccacggagatgcagagctccgagagtaaggacacctccttggagactagacgccagttagccttgaaggcattcactcatacggcacaatatgatgaagcaatttcagattatttcaggaaacagtacagcaaaggcgtatctcagatgcccttgagatatggaatgaacccacatcagacccctgcccagctgtacacactgcagcccaagcttcccatcacagttctaaatggagcccctggatttataaacttgtgcgatgctttgaacgcctggcagctggtgaaggaactcaaggaggctttaggtattccagccgctgcctctttcaaacatgtcagcccagcaggtgctgctgttggaattccactcagtgaagatgaggccaaagtctgcatggtttatgatctctataaaaccctcacacccatctcagcggcatatgcaagagcaagaggggctgataggatgtcttcatttggtgattttgttgcattgtccgatgtttgtgatgtaccaactgcaaaaattatttccagagaagtatctgatggtataattgccccaggatatgaagaagaagccttgacaatactttccaaaaagaaaaatggaaactattgtgtccttcagatggaccaatcttacaaaccagatgaaaatgaagttcgaactctctttggtcttcatttaagccagaagagaaataatggtgtcgtcgacaagtcattatttagcaatgttgttaccaaaaataaagatttgccagagtctgccctccgagacctcatcgtagccaccattgctgtcaagtacactcagtctaactctgtgtgctacgccaagaacgggcaggttatcggcattggagcaggacagcagtctcgtatacactgcactcgccttgcaggagataaggcaaactattggtggcttagacaccatccacaagtgctttcgatgaagtttaaaacaggagtgaagagagcagaaatctccaatgccatcgatcaatatgtgactggaaccattggcgaggatgaagatttgataaagtggaaggcactgtttgaggaagtccctgagttactcactgaggcagagaagaaggaatgggttgagaaactgactgaagtttctatcagctctgatgccttcttccctttccgagataacgtagacagagctaaaaggagtggtgtggcgtacattgcggctccctccggttctgctgctgacaaagttgtgattgaggcctgcgacgaactgggaatcatcctcgctcatacgaaccttcggctcttccaccactgattttaccacacactgttttttggcttgcttatgtgtaggtgaacagtcacgcctgaaactttgaggataactttttaaaaaaataaaacagtatctcttaatcactgg

SEQ ID NO: 102813 - DNA, 2212 bp, Homo sapiens
  Payload ID: 57
  Gene Symbol: ALAS1
  Gene Name: 5'-aminolevulinate synthase 1
  Uniprot ID: P13196
  ENST ID: ENST00000310271
  CDS Start-End: 146-2068
atattaaggcgccggcgatcgcggcctgaggctgctcccggacaagggcaacgagcgtttcgtttggacttctcgacttgagtgcccgcctccttcgccgccgcctctgcagtcctcagcgcaggagccagcatacttcctgaacatggagagtgttgttcgccgctgcccattcttatcccgagtcccccaggcctttctgcagaaagcaggcaaatctctgttgttctatgcccaaaactgccccaagatgatggaagttggggccaagccagcccctcgggcattgtccactgcagcagtacactaccaacagatcaaagaaacccctccggccagtgagaaagacaaaactgctaaggccaaggtccaacagactcctgatggatcccagcagagtccagatggcacacagcttccgtctggacaccccttgcctgccacaagccagggcactgcaagcaaatgccctttcctggcagcacagatgaatcagagaggcagcagtgtcttctgcaaagccagtcttgagcttcaggaggatgtgcaggaaatgaatgccgtgaggaaagaggttgctgaaacctcagcaggccccagtgtggttagtgtgaaaaccgatggaggggatcccagtggactgctgaagaacttccaggacatcatgcaaaagcaaagaccagaaagagtgtctcatcttcttcaagataacttgccaaaatctgtttccacttttcagtatgatcgtttctttgagaaaaaaattgatgagaaaaagaatgaccacacctatcgagtttttaaaactgtgaaccggcgagcacacatcttccccatggcagatgactattcagactccctcatcaccaaaaagcaagtgtcagtctggtgcagtaatgactacctaggaatgagtcgccacccacgggtgtgtggggcagttatggacactttgaaacaacatggtgctggggcaggtggtactagaaatatttctggaactagtaaattccatgtggacttagagcgggagctggcagacctccatgggaaagatgccgcactcttgttttcctcgtgctttgtggccaatgactcaaccctcttcaccctggctaagatgatgccaggctgtgagatttactctgattctgggaaccatgcctccatgatccaagggattcgaaacagccgagtgccaaagtacatcttccgccacaatgatgtcagccacctcagagaactgctgcaaagatctgacccctcagtccccaagattgtggcatttgaaactgtccattcaatggatggggcggtgtgcccactggaagagctgtgtgatgtggcccatgagtttggagcaatcaccttcgtggatgaggtccacgcagtggggctttatggggctcgaggcggagggattggggatcgggatggagtcatgccaaaaatggacatcatttctggaacacttggcaaagcctttggttgtgttggagggtacatcgccagcacgagttctctgattgacaccgtacggtcctatgctgctggcttcatcttcaccacctctctgccacccatgctgctggctggagccctggagtctgtgcggatcctgaagagcgctgagggacgggtgcttcgccgccagcaccagcgcaacgtcaaactcatgagacagatgctaatggatgccggcctccctgttgtccactgccccagccacatcatccctgtgcgggttgcagatgctgctaaaaacacagaagtctgtgatgaactaatgagcagacataacatctacgtgcaagcaatcaattaccctacggtgccccggggagaagagctcctacggattgcccccacccctcaccacacaccccagatgatgaactacttccttgagaatctgctagtcacatggaagcaagtggggctggaactgaagcctcattcctcagctgagtgcaacttctgcaggaggccactgcattttgaagtgatgagtgaaagagagaagtcctatttctcaggcttgagcaagttggtatctgctcaggcctgagcatgacctcaattatttcacttaaccccaggccattatcatatccagatggtcttcagagttgtctttatatgtgaattaagttatattaaattttaatctatagtaaaaacatagtcctggaaataaattcttgcttaaatg

SEQ ID NO: 102814 - DNA, 2430 bp, Homo sapiens
  Payload ID: 57
  Gene Symbol: ALAS1
  Gene Name: 5'-aminolevulinate synthase 1
  Uniprot ID: P13196
  ENST ID: ENST00000394965
  CDS Start-End: 361-2283
agcgcccaaggcgcatgcgcagcggtcactcccgctgtatattaaggcgccggcgatcgcggcctgaggctgctcccggacaagggcaacgagcgtttcgtttggacttctcgacttgagtgcccgcctccttcgccgccgcctctgcagtcctcagcgcagttatgcccagttcttcccgctgtggggacacgaccacggaggaatccttgcttcagggactcgggaccctgctggaccccttcctcgggtttaggggatgtggggaccaggagaaagtcaggatccctaagagtcttccctgcctggatggatgagtggcttcttctccacctagatgagccagcatacttcctgaacatggagagtgttgttcgccgctgcccattcttatcccgagtcccccaggcctttctgcagaaagcaggcaaatctctgttgttctatgcccaaaactgccccaagatgatggaagttggggccaagccagcccctcgggcattgtccactgcagcagtacactaccaacagatcaaagaaacccctccggccagtgagaaagacaaaactgctaaggccaaggtccaacagactcctgatggatcccagcagagtccagatggcacacagcttccgtctggacaccccttgcctgccacaagccagggcactgcaagcaaatgccctttcctggcagcacagatgaatcagagaggcagcagtgtcttctgcaaagccagtcttgagcttcaggaggatgtgcaggaaatgaatgccgtgaggaaagaggttgctgaaacctcagcaggccccagtgtggttagtgtgaaaaccgatggaggggatcccagtggactgctgaagaacttccaggacatcatgcaaaagcaaagaccagaaagagtgtctcatcttcttcaagataacttgccaaaatctgtttccacttttcagtatgatcgtttctttgagaaaaaaattgatgagaaaaagaatgaccacacctatcgagtttttaaaactgtgaaccggcgagcacacatcttccccatggcagatgactattcagactccctcatcaccaaaaagcaagtgtcagtctggtgcagtaatgactacctaggaatgagtcgccacccacgggtgtgtggggcagttatggacactttgaaacaacatggtgctggggcaggtggtactagaaatatttctggaactagtaaattccatgtggacttagagcgggagctggcagacctccatgggaaagatgccgcactcttgttttcctcgtgctttgtggccaatgactcaaccctcttcaccctggctaagatgatgccaggctgtgagatttactctgattctgggaaccatgcctccatgatccaagggattcgaaacagccgagtgccaaagtacatcttccgccacaatgatgtcagccacctcagagaactgctgcaaagatctgacccctcagtccccaagattgtggcatttgaaactgtccattcaatggatggggcggtgtgcccactggaagagctgtgtgatgtggcccatgagtttggagcaatcaccttcgtggatgaggtccacgcagtggggctttatggggctcgaggcggagggattggggatcgggatggagtcatgccaaaaatggacatcatttctggaacacttggcaaagcctttggttgtgttggagggtacatcgccagcacgagttctctgattgacaccgtacggtcctatgctgctggcttcatcttcaccacctctctgccacccatgctgctggctggagccctggagtctgtgcggatcctgaagagcgctgagggacgggtgcttcgccgccagcaccagcgcaacgtcaaactcatgagacagatgctaatggatgccggcctccctgttgtccactgccccagccacatcatccctgtgcgggttgcagatgctgctaaaaacacagaagtctgtgatgaactaatgagcagacataacatctacgtgcaagcaatcaattaccctacggtgccccggggagaagagctcctacggattgcccccacccctcaccacacaccccagatgatgaactacttccttgagaatctgctagtcacatggaagcaagtggggctggaactgaagcctcattcctcagctgagtgcaacttctgcaggaggccactgcattttgaagtgatgagtgaaagagagaagtcctatttctcaggcttgagcaagttggtatctgctcaggcctgagcatgacctcaattatttcacttaaccccaggccattatcatatccagatggtcttcagagttgtctttatatgtgaattaagttatattaaattttaatctatagtaaaaacatagtcctggaaataaattcttgcttaaatggtg

SEQ ID NO: 102815 - DNA, 758 bp, Homo sapiens
  Payload ID: 57
  Gene Symbol: ALAS1
  Gene Name: 5'-aminolevulinate synthase 1
  ENST ID: ENST00000493402
  CDS Start-End: 1-713
gccgagtgccaaagtacatcttccgccacaatgatgtcagccacctcagagaactgctgcaaagatctgacccctcagtccccaagattgtggcatttgaaactgtccattcaatggatggcaaagcctttggttgtgttggagggtacatcgccagcacgagttctctgattgacaccgtacggtcctatgctgctggcttcatcttcaccacctctctgccacccatgctgctggctggagccctggagtctgtgcggatcctgaagagcgctgagggacgggtgcttcgccgccagcaccagcgcaacgtcaaactcatgagacagatgctaatggatgccggcctccctgttgtccactgccccagccacatcatccctgtgcgggttgcagatgctgctaaaaacacagaagtctgtgatgaactaatgagcagacataacatctacgtgcaagcaatcaattaccctacggtgccccggggagaagagctcctacggattgcccccacccctcaccacacaccccagatgatgaactacttccttgagaatctgctagtcacatggaagcaagtggggctggaactgaagcctcattcctcagctgagtgcaacttctgcaggaggccactgcattttgaagtgatgagtgaaagagagaagtcctatttctcaggcttgagcaagttggtatctgctcaggcctgagcatgacctcaattatttcacttaaccccaggccattatcatatc

SEQ ID NO: 102816 - DNA, 2125 bp, Homo sapiens
  Payload ID: 57
  Gene Symbol: ALAS1
  Gene Name: 5'-aminolevulinate synthase 1
  Uniprot ID: P13196
  ENST ID: ENST00000469224
  CDS Start-End: 203-2125
aagaaggcagcgcccaaggcgcatgcgcagcggtcactcccgctgtatattaaggcgccggcgatcgcggcctgaggctgctcccggacaagggcaacgagcgtttcgtttggacttctcgacttgagtgcccgcctccttcgccgccgcctctgcagtcctcagcgcagtctttccacaggagccagcatacttcctgaacatggagagtgttgttcgccgctgcccattcttatcccgagtcccccaggcctttctgcagaaagcaggcaaatctctgttgttctatgcccaaaactgccccaagatgatggaagttggggccaagccagcccctcgggcattgtccactgcagcagtacactaccaacagatcaaagaaacccctccggccagtgagaaagacaaaactgctaaggccaaggtccaacagactcctgatggatcccagcagagtccagatggcacacagcttccgtctggacaccccttgcctgccacaagccagggcactgcaagcaaatgccctttcctggcagcacagatgaatcagagaggcagcagtgtcttctgcaaagccagtcttgagcttcaggaggatgtgcaggaaatgaatgccgtgaggaaagaggttgctgaaacctcagcaggccccagtgtggttagtgtgaaaaccgatggaggggatcccagtggactgctgaagaacttccaggacatcatgcaaaagcaaagaccagaaagagtgtctcatcttcttcaagataacttgccaaaatctgtttccacttttcagtatgatcgtttctttgagaaaaaaattgatgagaaaaagaatgaccacacctatcgagtttttaaaactgtgaaccggcgagcacacatcttccccatggcagatgactattcagactccctcatcaccaaaaagcaagtgtcagtctggtgcagtaatgactacctaggaatgagtcgccacccacgggtgtgtggggcagttatggacactttgaaacaacatggtgctggggcaggtggtactagaaatatttctggaactagtaaattccatgtggacttagagcgggagctggcagacctccatgggaaagatgccgcactcttgttttcctcgtgctttgtggccaatgactcaaccctcttcaccctggctaagatgatgccaggctgtgagatttactctgattctgggaaccatgcctccatgatccaagggattcgaaacagccgagtgccaaagtacatcttccgccacaatgatgtcagccacctcagagaactgctgcaaagatctgacccctcagtccccaagattgtggcatttgaaactgtccattcaatggatggggcggtgtgcccactggaagagctgtgtgatgtggcccatgagtttggagcaatcaccttcgtggatgaggtccacgcagtggggctttatggggctcgaggcggagggattggggatcgggatggagtcatgccaaaaatggacatcatttctggaacacttggcaaagcctttggttgtgttggagggtacatcgccagcacgagttctctgattgacaccgtacggtcctatgctgctggcttcatcttcaccacctctctgccacccatgctgctggctggagccctggagtctgtgcggatcctgaagagcgctgagggacgggtgcttcgccgccagcaccagcgcaacgtcaaactcatgagacagatgctaatggatgccggcctccctgttgtccactgccccagccacatcatccctgtgcgggttgcagatgctgctaaaaacacagaagtctgtgatgaactaatgagcagacataacatctacgtgcaagcaatcaattaccctacggtgccccggggagaagagctcctacggattgcccccacccctcaccacacaccccagatgatgaactacttccttgagaatctgctagtcacatggaagcaagtggggctggaactgaagcctcattcctcagctgagtgcaacttctgcaggaggccactgcattttgaagtgatgagtgaaagagagaagtcctatttctcaggcttgagcaagttggtatctgctcaggcctga

SEQ ID NO: 102817 - DNA, 2356 bp, Homo sapiens
  Payload ID: 57
  Gene Symbol: ALAS1
  Gene Name: 5'-aminolevulinate synthase 1
  Uniprot ID: P13196
  ENST ID: ENST00000484952
  CDS Start-End: 322-2244
cggcgatcgcggcctgaggctgctcccggacaagggcaacgagcgtttcgtttggacttctcgacttgagtgcccgcctccttcgccgccgcctctgcagtcctcagcgcagttatgcccagttcttcccgctgtggggacacgaccacggaggaatccttgcttcagggactcgggaccctgctggaccccttcctcgggtttaggggatgtggggaccaggagaaagtcaggatccctaagagtcttccctgcctggatggatgagtggcttcttctccacctagattctttccacaggagccagcatacttcctgaacatggagagtgttgttcgccgctgcccattcttatcccgagtcccccaggcctttctgcagaaagcaggcaaatctctgttgttctatgcccaaaactgccccaagatgatggaagttggggccaagccagcccctcgggcattgtccactgcagcagtacactaccaacagatcaaagaaacccctccggccagtgagaaagacaaaactgctaaggccaaggtccaacagactcctgatggatcccagcagagtccagatggcacacagcttccgtctggacaccccttgcctgccacaagccagggcactgcaagcaaatgccctttcctggcagcacagatgaatcagagaggcagcagtgtcttctgcaaagccagtcttgagcttcaggaggatgtgcaggaaatgaatgccgtgaggaaagaggttgctgaaacctcagcaggccccagtgtggttagtgtgaaaaccgatggaggggatcccagtggactgctgaagaacttccaggacatcatgcaaaagcaaagaccagaaagagtgtctcatcttcttcaagataacttgccaaaatctgtttccacttttcagtatgatcgtttctttgagaaaaaaattgatgagaaaaagaatgaccacacctatcgagtttttaaaactgtgaaccggcgagcacacatcttccccatggcagatgactattcagactccctcatcaccaaaaagcaagtgtcagtctggtgcagtaatgactacctaggaatgagtcgccacccacgggtgtgtggggcagttatggacactttgaaacaacatggtgctggggcaggtggtactagaaatatttctggaactagtaaattccatgtggacttagagcgggagctggcagacctccatgggaaagatgccgcactcttgttttcctcgtgctttgtggccaatgactcaaccctcttcaccctggctaagatgatgccaggctgtgagatttactctgattctgggaaccatgcctccatgatccaagggattcgaaacagccgagtgccaaagtacatcttccgccacaatgatgtcagccacctcagagaactgctgcaaagatctgacccctcagtccccaagattgtggcatttgaaactgtccattcaatggatggggcggtgtgcccactggaagagctgtgtgatgtggcccatgagtttggagcaatcaccttcgtggatgaggtccacgcagtggggctttatggggctcgaggcggagggattggggatcgggatggagtcatgccaaaaatggacatcatttctggaacacttggcaaagcctttggttgtgttggagggtacatcgccagcacgagttctctgattgacaccgtacggtcctatgctgctggcttcatcttcaccacctctctgccacccatgctgctggctggagccctggagtctgtgcggatcctgaagagcgctgagggacgggtgcttcgccgccagcaccagcgcaacgtcaaactcatgagacagatgctaatggatgccggcctccctgttgtccactgccccagccacatcatccctgtgcgggttgcagatgctgctaaaaacacagaagtctgtgatgaactaatgagcagacataacatctacgtgcaagcaatcaattaccctacggtgccccggggagaagagctcctacggattgcccccacccctcaccacacaccccagatgatgaactacttccttgagaatctgctagtcacatggaagcaagtggggctggaactgaagcctcattcctcagctgagtgcaacttctgcaggaggccactgcattttgaagtgatgagtgaaagagagaagtcctatttctcaggcttgagcaagttggtatctgctcaggcctgagcatgacctcaattatttcacttaaccccaggccattatcatatccagatggtcttcagagttgtctttatatgtgaattaagttatattaaattttaatctatagtaaaaa

SEQ ID NO: 102818 - DNA, 350 bp, Homo sapiens
  Payload ID: 57
  Gene Symbol: ALAS1
  Gene Name: 5'-aminolevulinate synthase 1
  ENST ID: ENST00000459884
  CDS Start-End: 1-350
tcgccgccagcaccagcgcaacgtcaaactcatgagacagatgctaatggatgccggcctccctgttgtccactgccccagccacatcatccctgtgcgggttgcagatgctgctaaaaacacagaagtctgtgatgaactaatgagcagacataacatctacgtgcaagcaatcaattaccctacggtgccccggggagaagagctcctacggattgcccccacccctcaccacacaccccagatgatgaactacttccttggtgagtacctggggagctgctggtgcctcactgaggagttgcataaagctgtctttgcagtgtttataattgaagcccttcagaggc

SEQ ID NO: 102819 - DNA, 2027 bp, Homo sapiens
  Payload ID: 58
  Gene Symbol: ALAS2
  Gene Name: 5'-aminolevulinate synthase 2
  Uniprot ID: P22557
  ENST ID: ENST00000330807
  CDS Start-End: 139-1902
aatgcagggccaggccggcagaaggcagggtgggtggggctgagtcagaggagaagggataaatgccaggtcctaacccaagtacccacctgtcattcgttcgtcctcagtgcagggcaacaggactttaggttcaagatggtgactgcagccatgctgctacagtgctgcccagtgcttgcccggggccccacaagcctcctaggcaaggtggttaagactcaccagttcctgtttggtattggacgctgtcccatcctggctacccaaggaccaaactgttctcaaatccaccttaaggcaacaaaggctggaggagattctccatcttgggcgaagggccactgtcccttcatgctgtcggaactccaggatgggaagagcaagattgtgcagaaggcagccccagaagtccaggaagatgtgaaggctttcaagacagatctgcctagctccctggtctcagtcagcctaaggaagccattttccggtccccaggagcaggagcagatctctgggaaggtcacacacctgattcagaacaatatgcctggaaactatgtcttcagttatgaccagtttttcagggacaagatcatggagaagaaacaggatcacacctaccgtgtgttcaagactgtgaaccgctgggctgatgcatatccctttgcccaacatttctctgaggcatctgtggcctcaaaggatgtgtccgtctggtgtagtaatgattacctgggcatgagccgacaccctcaggtcttgcaagccacacaggagaccctgcagcgtcatggtgctggagctggtggcacccgcaacatctcaggcaccagtaagtttcatgtggagcttgagcaggagctggctgagctgcaccagaaggactcagccctgctcttctcctcctgctttgttgccaatgactctactctcttcaccttggccaagatcctgccagggtgcgagatttactcagacgcaggcaaccatgcttccatgatccaaggtatccgtaacagtggagcagccaagtttgtcttcaggcacaatgaccctgaccacctaaagaaacttctagagaagtctaaccctaagatacccaaaattgtggcctttgagactgtccactccatggatggtgccatctgtcccctcgaggagttgtgtgatgtgtcccaccagtatggggccctgaccttcgtggatgaggtccatgctgtaggactgtatgggtcccggggcgctgggattggggagcgtgatggaattatgcataagattgacatcatctctggaactcttggcaaggcctttggctgtgtgggcggctacattgccagcacccgtgacttggtggacatggtgcgctcctatgctgcaggcttcatctttaccacttctctgccccccatggtgctctctggagctctagaatctgtgcggctgctcaagggagaggagggccaagccctgaggcgagcccaccagcgcaatgtcaagcacatgcgccagctactcatggacaggggccttcctgtcatcccctgccccagccacatcatccccatccgggtgggcaatgcagcactcaacagcaagctctgtgatctcctgctctccaagcatggcatctatgtgcaggccatcaactacccaactgtcccccggggtgaagagctcctgcgcttggcaccctccccccaccacagccctcagatgatggaagattttgtggagaagctgctgctggcttggactgcggtggggctgcccctccaggatgtgtctgtggctgcctgcaatttctgtcgccgtcctgtacactttgagctcatgagtgagtgggaacgttcctacttcgggaacatggggccccagtatgtcaccacctatgcctgagaagccagctgcctaggattcacaccccacctgcgcttcacttgggtccaggcctactcctgtcttctgctttgttgtgtgcctctagctgaattgagcctaaaaataaagcacaaaccacagca

SEQ ID NO: 102820 - DNA, 1795 bp, Homo sapiens
  Payload ID: 58
  Gene Symbol: ALAS2
  Gene Name: 5'-aminolevulinate synthase 2
  Uniprot ID: P22557
  ENST ID: ENST00000335854
  CDS Start-End: 52-1704
acctgtcattcgttcgtcctcagtgcagggcaacaggactttaggttcaagatggtgactgcagccatgctgctacagtgctgcccagtgcttgcccggggccccacaagcctcctaggcaaggtggttaagactcaccagttcctgtttggtattggacgctgtcccatcctggctacccaaggaccaaactgttctcaaatccaccttaaggcaacaaaggctggaggagattctccatcttgggcgaagggccactgtcccttcatgctgtcggaactccaggatgggaagagcaagattgtgcagaaggcagccccagaagtccaggaagatgtgaaggctttcaagacaggaaactatgtcttcagttatgaccagtttttcagggacaagatcatggagaagaaacaggatcacacctaccgtgtgttcaagactgtgaaccgctgggctgatgcatatccctttgcccaacatttctctgaggcatctgtggcctcaaaggatgtgtccgtctggtgtagtaatgattacctgggcatgagccgacaccctcaggtcttgcaagccacacaggagaccctgcagcgtcatggtgctggagctggtggcacccgcaacatctcaggcaccagtaagtttcatgtggagcttgagcaggagctggctgagctgcaccagaaggactcagccctgctcttctcctcctgctttgttgccaatgactctactctcttcaccttggccaagatcctgccagggtgcgagatttactcagacgcaggcaaccatgcttccatgatccaaggtatccgtaacagtggagcagccaagtttgtcttcaggcacaatgaccctgaccacctaaagaaacttctagagaagtctaaccctaagatacccaaaattgtggcctttgagactgtccactccatggatggtgccatctgtcccctcgaggagttgtgtgatgtgtcccaccagtatggggccctgaccttcgtggatgaggtccatgctgtaggactgtatgggtcccggggcgctgggattggggagcgtgatggaattatgcataagattgacatcatctctggaactcttggcaaggcctttggctgtgtgggcggctacattgccagcacccgtgacttggtggacatggtgcgctcctatgctgcaggcttcatctttaccacttctctgccccccatggtgctctctggagctctagaatctgtgcggctgctcaagggagaggagggccaagccctgaggcgagcccaccagcgcaatgtcaagcacatgcgccagctactcatggacaggggccttcctgtcatcccctgccccagccacatcatccccatccgggtgggcaatgcagcactcaacagcaagctctgtgatctcctgctctccaagcatggcatctatgtgcaggccatcaactacccaactgtcccccggggtgaagagctcctgcgcttggcaccctccccccaccacagccctcagatgatggaagattttgtggagaagctgctgctggcttggactgcggtggggctgcccctccaggatgtgtctgtggctgcctgcaatttctgtcgccgtcctgtacactttgagctcatgagtgagtgggaacgttcctacttcgggaacatggggccccagtatgtcaccacctatgcctgagaagccagctgcctaggattcacaccccacctgcgcttcacttgggtccaggcctactcctgtcttctgctttgttgtgtgcctctagctg

SEQ ID NO: 102821 - DNA, 1936 bp, Homo sapiens
  Payload ID: 58
  Gene Symbol: ALAS2
  Gene Name: 5'-aminolevulinate synthase 2
  Uniprot ID: P22557
  ENST ID: ENST00000396198
  CDS Start-End: 87-1811
acctgtcattcgttcgtcctcagtgcagggcaacagggcccacatgccttggccccacataccaacccaggctgctgtgacagcccatgagagggggagaggttgctctgggatggaacaagaaaaagaggttgttttgtgaggactttaggttcaagatggtgactgcagccatgctgctacagtgctgcccagtgcttgcccggggccccacaagcctcctaggcaaggtggttaagactcaccagttcctgtttggtattggacgctgtcccatcctggctacccaaggaccaaactgttctcaaatccaccttaaggcaacaaaggctggaggagattctccatcttgggcgaagggccactgtcccttcatgctgtcggaactccaggatgggaagagcaagattgtgcagaaggcagccccagaagtccaggaagatgtgaaggctttcaagacaggaaactatgtcttcagttatgaccagtttttcagggacaagatcatggagaagaaacaggatcacacctaccgtgtgttcaagactgtgaaccgctgggctgatgcatatccctttgcccaacatttctctgaggcatctgtggcctcaaaggatgtgtccgtctggtgtagtaatgattacctgggcatgagccgacaccctcaggtcttgcaagccacacaggagaccctgcagcgtcatggtgctggagctggtggcacccgcaacatctcaggcaccagtaagtttcatgtggagcttgagcaggagctggctgagctgcaccagaaggactcagccctgctcttctcctcctgctttgttgccaatgactctactctcttcaccttggccaagatcctgccagggtgcgagatttactcagacgcaggcaaccatgcttccatgatccaaggtatccgtaacagtggagcagccaagtttgtcttcaggcacaatgaccctgaccacctaaagaaacttctagagaagtctaaccctaagatacccaaaattgtggcctttgagactgtccactccatggatggtgccatctgtcccctcgaggagttgtgtgatgtgtcccaccagtatggggccctgaccttcgtggatgaggtccatgctgtaggactgtatgggtcccggggcgctgggattggggagcgtgatggaattatgcataagattgacatcatctctggaactcttggcaaggcctttggctgtgtgggcggctacattgccagcacccgtgacttggtggacatggtgcgctcctatgctgcaggcttcatctttaccacttctctgccccccatggtgctctctggagctctagaatctgtgcggctgctcaagggagaggagggccaagccctgaggcgagcccaccagcgcaatgtcaagcacatgcgccagctactcatggacaggggccttcctgtcatcccctgccccagccacatcatccccatccgggtgggcaatgcagcactcaacagcaagctctgtgatctcctgctctccaagcatggcatctatgtgcaggccatcaactacccaactgtcccccggggtgaagagctcctgcgcttggcaccctccccccaccacagccctcagatgatggaagattttgtggagaagctgctgctggcttggactgcggtggggctgcccctccaggatgtgtctgtggctgcctgcaatttctgtcgccgtcctgtacactttgagctcatgagtgagtgggaacgttcctacttcgggaacatggggccccagtatgtcaccacctatgcctgagaagccagctgcctaggattcacaccccacctgcgcttcacttgggtccaggcctactcctgtcttctgctttgttgtgtgcctctagctgaattgagcctaaaaataaagcacaaaccacagca

SEQ ID NO: 102822 - DNA, 664 bp, Homo sapiens
  Payload ID: 58
  Gene Symbol: ALAS2
  Gene Name: 5'-aminolevulinate synthase 2
  ENST ID: ENST00000455688
  CDS Start-End: 1-664
acctgtcattcgttcgtcctcagtgcagggcaacagattctccatcttgggcgaagggccactgtcccttcatgctgtcggaactccaggatgggaagagcaagattgtgcagaaggcagccccagaagtccaggaagatgtgaaggctttcaagacagatctgcctagctccctggtctcagtcagcctaaggaagccattttccggtccccaggagcaggagcagatctctgggaaggtcacacacctgattcagaacaatatgcctggaaactatgtcttcagttatgaccagtttttcagggacaagatcatggagaagaaacaggatcacacctaccgtgtgttcaagactgtgaaccgctgggctgatgcatatccctttgcccaacatttctctgaggcatctgtggcctcaaaggatgtgtccgtctggtgtagtaatgattacctgggcatgagccgacaccctcaggtcttgcaagccacacaggagaccctgcagcgtcatggtgctggagctggtggcacccgcaacatctcaggcaccagtaagtttcatgtggagcttgagcaggagctggctgagctgcaccagaaggactcagccctgctcttctcctcctgctttgttgccaatgactctactctcttcaccttggc

SEQ ID NO: 102823 - DNA, 943 bp, Homo sapiens
  Payload ID: 59
  Gene Symbol: AZI2
  Gene Name: 5-azacytidine induced 2
  Uniprot ID: Q9H6S1
  ENST ID: ENST00000334100
  CDS Start-End: 35-733
ggggcggccctacgtagcctggcttctggttgtcatggatgcactggtagaagatgatatctgtattctgaatcatgaaaaagcccataagagagatacagtgactccagtttcaatatattcaggagatgaatctgttgcttcccattttgctcttgtcactgcatatgaagacatcaaaaaacgacttaaggattcagagaaagagaactctttgttaaagaagagaataagatttttggaagaaaagctaatagctcgatttgaagaagaaacaagttccgtgggacgagaacaagtaaataaggcctatcatgcatatcgagaggtttgcattgatagagataatttgaagagcaaactggacaaaatgaataaagacaactctgaatctttgaaagtattgaatgagcagctacaatctaaagaagtagaactcctccagctgaggacagaggtggaaactcagcaggtgatgaggaatttaaatccaccttcatcaaactgggaggtggaaaagttgagctgtgacctgaagatccatggtttggaacaagagctggaactgatgaggaaagaatgtagcgatctcaaaatagaactacagaaagccaaacaaacggatccatatcaggaagacaatctgaagagcagagatctccaaaaactaagcatttcaagagtatctgtagcacagcctggagtgcagtggcgcaatcatgggatagcatgaattttgaggactgttccctcttcgcataagaatagaagtagccatcagagttcatatactttttcaaccctttttcctcaaatacgtatcatttttacttaagtaacttcaattctgtgttttaagctatctaataattgttgtttctactatgttaagatagcctctctacattgttaccctccatccaataaaaaatactgatctgac

SEQ ID NO: 102824 - DNA, 1136 bp, Homo sapiens
  Payload ID: 59
  Gene Symbol: AZI2
  Gene Name: 5-azacytidine induced 2
  Uniprot ID: Q9H6S1
  ENST ID: ENST00000457172
  CDS Start-End: 361-1092
tccagaacgtcccgggctcctgccgagtcagaagaaatgggactccctccgcgacgtgcccggagcagctcccttcgctgtggaagcggcggtgtcttcgaagaaaccggaagcccgtggtgacccctggcgacccggtttgttttcggtccgtttccaaacactaaggaatcgaaactcggcggccttgggggcggccctacgtagcctggcttctgggaggtcttaaaaggttttagccacagtttctccttccatcatgtttttcaggaacctaactctcagagaagtaatgctgaacctaacagcaaaagtagatgttcagagcaagtcagtttttcgttaaacaatgaagttgtcatggatgcactggtagaagatgatatctgtattctgaatcatgaaaaagcccataagagagatacagtgactccagtttcaatatattcaggagatgaatctgttgcttcccattttgctcttgtcactgcatatgaagacatcaaaaaacgacttaaggattcagagaaagagaactctttgttaaagaagagaataagatttttggaagaaaagctaatagctcgatttgaagaagaaacaagttccgtgggacgagaacaagtaaataaggcctatcatgcatatcgagaggtttgcattgatagagataatttgaagagcaaactggacaaaatgaataaagacaactctgaatctttgaaagtattgaatgagcagctacaatctaaagaagtagaactcctccagctgaggacagaggtggaaactcagcaggtgatgaggaatttaaatccaccttcatcaaactgggaggtggaaaagttgagctgtgacctgaagatccatggtttggaacaagagctggaactgatgaggaaagaatgtagcgatctcaaaatagaactacagaaagccaaacaaacggatccatatcaggaagacaatctgaagagcagagatctccaaaaactaagcatttcaagacagagtatctgtagcacagcctggagtgcagtggcgcaatcatgggatagcatgaattttgaggactgttccctcttcgcataagaatagaagtagccatcagagttcatatactttttcaacccttt

SEQ ID NO: 102825 - DNA, 1366 bp, Homo sapiens
  Payload ID: 59
  Gene Symbol: AZI2
  Gene Name: 5-azacytidine induced 2
  Uniprot ID: Q9H6S1
  ENST ID: ENST00000420543
  CDS Start-End: 456-1187
cgggcctgacttccggtttcctcgcgcgtccctggcgccgagcccgcggacagcggcagccccttttccggctgagagctcatccacacttccaatcactttccggagtgcttcccctccctccggcccgtgctggtcccgacggcgggcctgggtctcgcgcgcgtattgctgggtaacgggccttctctcgcgtcggcccggcccctcctgcctcggctcgtccctccttccagaacgtcccgggctcctgccgagtcagaagaaatgggactccctccgcgacgtgcccggagcagctcccttcgctgtggaagcggcggtgtcttcgaagaaaccggaagcccgtggtgacccctggcgacccggtttgttttcggtccgtttccaaacactaaggaatcgaaactcggcggccttgggggcggccctacgtagcctggcttctggttgtcatggatgcactggtagaagatgatatctgtattctgaatcatgaaaaagcccataagagagatacagtgactccagtttcaatatattcaggagatgaatctgttgcttcccattttgctcttgtcactgcatatgaagacatcaaaaaacgacttaaggattcagagaaagagaactctttgttaaagaagagaataagatttttggaagaaaagctaatagctcgatttgaagaagaaacaagttccgtgggacgagaacaagtaaataaggcctatcatgcatatcgagaggtttgcattgatagagataatttgaagagcaaactggacaaaatgaataaagacaactctgaatctttgaaagtattgaatgagcagctacaatctaaagaagtagaactcctccagctgaggacagaggtggaaactcagcaggtgatgaggaatttaaatccaccttcatcaaactgggaggtggaaaagttgagctgtgacctgaagatccatggtttggaacaagagctggaactgatgaggaaagaatgtagcgatctcaaaatagaactacagaaagccaaacaaacggatccatatcaggaagacaatctgaagagcagagatctccaaaaactaagcatttcaagacagagtatctgtagcacagcctggagtgcagtggcgcaatcatgggatagcatgaattttgaggactgttccctcttcgcataagaatagaagtagccatcagagttcatatactttttcaaccctttttcctcaaatacgtatcatttttacttaagtaacttcaattctgtgttttaagctatctaataattgttgtttctactatgttaagatagcctctctacattgttaccctccatccaataaaaaatactgatctg

SEQ ID NO: 102826 - DNA, 439 bp, Homo sapiens
  Payload ID: 59
  Gene Symbol: AZI2
  Gene Name: 5-azacytidine induced 2
  ENST ID: ENST00000429369
  CDS Start-End: 1-229
tctgaagagcagagatctccaaaaactaagcatttcaagtgataatatgcagcatgcatactgggaactgaagagagaaatgtctaatttacatctggtgactcaagtacaagctgaactactaagaaaactgaaaacctcaactgcaatcaagaaagcactgtcacagaatagagcaatgagaagcacagctcctgtcctgggaacccacggtgtaaaggacaagtaaagactggattaaaattaaatctacaaaatactgtgacagagctactctcatgaactactctggtccctccttctgaccactggctgccctagttccagactctgccacccctcatctactgtaagtaagcaactatttccaagtgagatcttaaacatcgtccttacaaagaagctgtaggcaaaaaaatgaaaataaaaataaattgtg

SEQ ID NO: 102827 - DNA, 1061 bp, Homo sapiens
  Payload ID: 59
  Gene Symbol: AZI2
  Gene Name: 5-azacytidine induced 2
  ENST ID: ENST00000414162
  CDS Start-End: 415-1061
cccgtgctggtcccgacggcgggcctgggtctcgcgcgcgtattgctgggtaacgggccttctctcgcgtcggcccggcccctcctgcctcggctcgtccctccttccagaacgtcccgggctcctgccgagtcagaagaaatgggactccctccgcgacgtgcccggagcagctcccttcgctgtggaagcggcggtgtcttcgaagaaaccggaagcccgtggtgacccctggcgacccggtttgttttcggtccgtttccaaacactaaggaatcgaaactcggcggccttgggggcggccctacgtagcctggcttctgggaacctaactctcagagaagtaatgctgaacctaacagcaaaagtagatgttcagagcaagtcagtttttcgttaaacaatgaagttgtcatggatgcactggtagaagatgatatctgtattctgaatcatgaaaaagcccataagagagatacagtgactccagtttcaatatattcaggagatgaatctgttgcttcccattttgctcttgtcactgcatatgaagacatcaaaaaacgacttaaggattcagagaaagagaactctttgttaaagaagagaataagatttttggaagaaaagctaatagctcgatttgaagaagaaacaagttccgtgggacgagaacaagtaaataaggcctatcatgcatatcgagaggtttgcattgatagagataatttgaagagcaaactggacaaaatgaataaagacaactctgaatctttgaaagtattgaatgagcagctacaatctaaagaagtagaactcctccagctgaggacagaggtggaaactcagcaggtgatgaggaatttaaatccaccttcatcaaactgggaggtggaaaagttgagctgtgacctgaagatccatggtttggaacaagagctggaactgatgaggaaagaatgtagcgatctcaaaatagaactacagaaagccaaacaaacggatccatatcaggaagacaatctgaagagcagagatctccaaaaactaagcatttcaag

SEQ ID NO: 102828 - DNA, 608 bp, Homo sapiens
  Payload ID: 59
  Gene Symbol: AZI2
  Gene Name: 5-azacytidine induced 2
  ENST ID: ENST00000415852
  CDS Start-End: 323-608
ctttgactagggagcggcccactcctgggcatccctttccccagtcacccccacacccagctgtccacaccctttcccctgtcaccctcacccccagctgtccaggcccttcttggtcattcacttctctaattactccttttcttttcgtactcttactggggcgccttcagttttttttcattcattgagactgctaaatgcttctttccgatacaaattatcggaaagaaaagagggacattggctaggacggtactccctggggcatctgagtggtgaatatcgaccccctgcacttgatcgagggctaacagttgtcatggatgcactggtagaagatgatatctgtattctgaatcatgaaaaagcccataagagagatacagtgactccagtttcaatatattcaggagatgaatctgttgcttcccattttgctcttgtcactgcatatgaagacatcaaaaaacgacttaaggattcagagaaagagaactctttgttaaagaagagaataagatttttggaagaaaagctaatagctcgatttgaagaagaaacaagttccgtgggacgagaacaagtaaataaggcctatcatgcat

SEQ ID NO: 102829 - DNA, 4706 bp, Homo sapiens
  Payload ID: 59
  Gene Symbol: AZI2
  Gene Name: 5-azacytidine induced 2
  Uniprot ID: Q9H6S1
  ENST ID: ENST00000479665
  CDS Start-End: 533-1711
agtacgccgcgcgccactcctgcacttccccacccccacgaccgaacctggcttcgctaacgccctcccagctccctcgggcctgacttccggtttcctcgcgcgtccctggcgccgagcccgcggacagcggcagccccttttccggctgagagctcatccacacttccaatcactttccggagtgcttcccctccctccggcccgtgctggtcccgacggcgggcctgggtctcgcgcgcgtattgctgggtaacgggccttctctcgcgtcggcccggcccctcctgcctcggctcgtccctccttccagaacgtcccgggctcctgccgagtcagaagaaatgggactccctccgcgacgtgcccggagcagctcccttcgctgtggaagcggcggtgtcttcgaagaaaccggaagcccgtggtgacccctggcgacccggtttgttttcggtccgtttccaaacactaaggaatcgaaactcggcggccttgggggcggccctacgtagcctggcttctggttgtcatggatgcactggtagaagatgatatctgtattctgaatcatgaaaaagcccataagagagatacagtgactccagtttcaatatattcaggagatgaatctgttgcttcccattttgctcttgtcactgcatatgaagacatcaaaaaacgacttaaggattcagagaaagagaactctttgttaaagaagagaataagatttttggaagaaaagctaatagctcgatttgaagaagaaacaagttccgtgggacgagaacaagtaaataaggcctatcatgcatatcgagaggtttgcattgatagagataatttgaagagcaaactggacaaaatgaataaagacaactctgaatctttgaaagtattgaatgagcagctacaatctaaagaagtagaactcctccagctgaggacagaggtggaaactcagcaggtgatgaggaatttaaatccaccttcatcaaactgggaggtggaaaagttgagctgtgacctgaagatccatggtttggaacaagagctggaactgatgaggaaagaatgtagcgatctcaaaatagaactacagaaagccaaacaaacggatccatatcaggaagacaatctgaagagcagagatctccaaaaactaagcatttcaagtgataatatgcagcatgcatactgggaactgaagagagaaatgtctaatttacatctggtgactcaagtacaagctgaactactaagaaaactgaaaacctcaactgcaatcaagaaagcctgtgcccctgtaggatgcagtgaagaccttggaagagacagcacaaaactgcacttgatgaattttactgcaacatacacaagacatccccctctcttaccaaatggcaaagctctttgtcataccacatcttcccctttaccaggagatgtaaaggttttatcagagaaagcaatcctccaatcatggacagacaatgagagatccattcctaatgatggtacatgctttcaggaacacagttcttatggcagaaattctctggaagacaattcctgggtatttccaagtcctcctaaatcaagtgagacagcatttggggaaactaaaactaaaactttgcctttacccaaccttccaccactgcattacttggatcaacataatcagaactgcctttataagaattaatttggaagagattcacgatttcaccatgaggacacttatctctttcagtggtcctcccaagaaattatttaacaaactgaaaggagattttgattaaaattttgcagaggtcttcagtatctatatttgaacacactgtacaatagtacaaaaaccaacatagttggttttctagtatgaaagagcaccctctagctccatattctaagaatctgaaatatgctactatactaattaataagtaaacttaaggtgtttaaaaaactctgccttctatattaattgtaaaattttgcctctcagaagaatggaattggagattgtagacgtggttttacaaaatgtgaaatgtctaaatatctgttcataaaaataaaaggaaaacatgtttcttcaaattgcataatggaacaaatggcaatgtgagtaggttacatttctgttgttataatgcgtaaagatattgaaaatataatgaaataaaagcatcttaggttataccatctttatatgctattgcgtttcaatatttaagatttaaagtgattttttggtcacagtgttttgttgataaaatttttttagaattgaagtttgaattctaagacttgaaacaacctgatcactgaagccaactttgtcccagcacattccttaagtcctaattgggaaaaaaaaaaaaaaaaatgaaatagttgaaaaactctggggtgtaaacaaatgattgtaaccctacacactattcaataagtagtagaaggagcatcacacagatttcagtctaatctgcccttctgtgggccataatataaacataaatgtgtgtaatgataaaaagtcattttcttcaaagagactacagctagctgcacattgtgtagagcagcttctaaattgttagactttgtgttgaaatgtaatattctatttattgagaaagtgatttaaaattattatttttaatcatagaaatcagggtttgggctgtattgatattgtcgatcatgaaatgtccacacttattctaagtggccaattatttggaaataaagaaggaaataaagatggcttcacatggaaatttaagttctttcagggtggagatttacttggttcatacaccttttgcctgaattaaagtatttcatgtaggaggacttttatcctttttgatagacagtttcatatatcttgaactcaatatctcagatctcttctactgtattactgaatagcatacatacatagacaatgttcgccattcactagatatttttttctattatcttacacttattcaagcttgtctgtgattaatggaattggtgtcagatgctggaatttattctgaccaatgaacacagctgactcaggggagtacaatctcctgccaagtaatagaaccaaacccaatatgcataaaagaaatacaatactccaggctttagctgaaggaagcaactacctgtgtaataacaaagcagcaaaaactatttctcatgtggctgcataggctgtatattatatctgatctctaatgtagcttactggtttgccttttttaaaaccaaaattggaaattttcctttgtaaagaaaaaaagtcttatgagataattgcttgattaatgttttgaacaataccaagaaattgtttaattaaaataaatatttttgtttgaaattgaagtggatgtgaaatattgtccttgcctatagatctcaaaatctagtactaattgttggttgttaatatgattcatacaatagacatttgttaaaccagcttttgagtggagaaaattattttccatttaaacagtacagtgatgatagctatcaaacaggtatactaaaaagtcagtgactgtgacagtttaaagtgttagacaaatgatgtataaggttctttagtaaggaaagattagccaaaaattttttacccagctagaagcttttaaatctacacttgatatctctgttctaggtaaaattcaaacaaccaaaaaacagtggcccatctgtagcttatgaatctatttaaaattgaatattttatgttgacttctttcatactagctgaaacttgctctaaagagcttcctttggaatctttagatttctttttataaggttcaattcagtacatccataaatcgacagaatgaagaaaacataacaaaaagccacctattccttcctcttgctcccttattagctaaagtaaaatttacatctgtaagacttactgagttgctgccaaaatggaactgaattcttaaaagcaggaacatgcctatgtgaaacattagaaaaccaaaataaatgggaaaattcagacttgaagagctgaatcatgtgacaacaaagtactgatcttaattcagaaaggctacttggagaaggtgtatcttaaggggtaaaaaacctgtgggttaccacatattaacagggaataatatcaacagaggcacccataagcaagcaagacacaactgagacagatgtaccaggtgaaaaaaatcttcagtatggatacacatgggtattctgaaggctacaatgaatggtttagtctttgacataaggaggatgaacatattatttatactgtgtaatctaatctggcttctatggggaaagcaacatgtacataagtgaattttctacatgaagtgggctacttctgattttaatcaaagctataaaatagattgtatatttcactagcttcttaaagtaactcttccattttcatttatctctaaaaacagttaacttcctgtgctctaggaaatgcaccaataccaaaggtcaatgtggaaatatgggcatgtttgcccctatgctgtgtggtctctagatttctatatttgctttgcttttgtctgctctagtaatctccctccttttgatctgtggcctgggaaaatgtggtttctttgtatttcaaataaaagtaaaatagttttttgagtggttcactcaagagtaaa

SEQ ID NO: 102830 - DNA, 2515 bp, Homo sapiens
  Payload ID: 60
  Gene Symbol: HMCES
  Gene Name: 5-hydroxymethylcytosine (hmC) binding, ES cell-specific
  Uniprot ID: Q96FZ2
  ENST ID: ENST00000383463
  CDS Start-End: 90-1154
tggccaaagcggagcggagcgggggtgaggagagtcgagggaggtgacgcgcgctgccggggcgaggttgcgaggggcggtgttgaagaatgtgtgggcgaacatcctgtcacttacctagagatgttctcacgagagcttgcgcctaccaggatcggcggggccagcagcggctcccggagtggagggaccctgataagtactgcccctcttacaacaagagtcctcaatccaacagcccagtgcttctgtctcgactgcactttgagaaggatgcagactcatctgagcgtatcattgctcccatgcgctggggcttggtcccttcttggttcaaagaaagtgatccttccaagctgcagttcaatactaccaactgtcgtagtgataccgtaatggagaaacggtcatttaaggtgcctctgggaaagggaagacgctgtgtcgttttagcagatggattctatgagtggcagcgatgtcagggaacaaaccagaggcagccatacttcatctattttcctcaaatcaagacagagaagtcaggtagcattggtgctgcagatagtcctgagaactgggagaaagtctgggacaactggaggctgctgacaatggccgggatctttgactgctgggagcccccagagggaggagatgtcctgtattcctataccatcatcacagtggattcctgcaaaggcttgagtgacatccaccacaggatgcctgccatattagatggagaggaggcagtttctaaatggcttgactttggtgaagtctcaactcaggaagctctgaaattaatccacccaacagagaacatcaccttccatgcagtctcttctgtggtgaacaactcgcgaaacaacactcctgagtgtctggctcctgtcgacttggtggtcaaaaaggagctcagggcaagtggcagtagccagaggatgttgcagtggttggccacaaagtcacccaaaaaggaagactcaaaaacacctcaaaaggaagagtcagatgttccccagtggtccagtcagttcctgcagaagagtccactccccaccaagagaggcactgcaggactcctagagcaatggctgaagcgggagaaggaggaggaacctgtggccaagcgtccttacagccagtgacacaggactttcagagaccaaggccagggtctgctgcactgctgttctgataataggttcttaacattgtatgtatatgtgtttgctttgggaggaggtggcactgtgttagttgacagttgtgggctcatgtagtcttttttgccatgagtaggagcccctagtggggctggtggacagctttggaagaggtgtcctgctgctgttaccagccatgtgggccccataggggcactgcgcctgctgccctttcctggcagggctggtggagtcttccctcaaagcatgccttacccagctgggaagtctctgccctgatctggtactccttgtagtaagctgttttctgctcagccactgggctctttcacttttttagttcttaaaaatttatttttaagttctaaaataaaataaaaataagttcttaaaatttatttttttcctgaataaattgtatttggtaaacttctgcctacattttggaaagtgatgctggtggggaaagttctagatcttacttggtttcttctagaatcagtcttcaggaatggattttgtcacaaatggggcatgggggctttctgaggaaataactacaagtcttggtggtgggctccttattatgtttctttttctttcattcttgatacttggaagtcgtctgaatcctttagcttcaaaccagcctgagtttgagtgcttgccgtagcagaaactatccttaccacaggtgggaaggaaaggaccagtttctagcagtgtcgggccactcctctttcgaacatccctaagggaggcattcacaaaagctgtcccaagcagctggaagaaaacagcttccgagatgaccaggaggactgggcggcgccgagcccagaacgctcctggcgcagcaccgttggcgttggccgattgctgctggtggggggcgggggtgcaggccccagtctctatgcaaatcagggatcagaagatcggaatttccaccaatcagcgggaagcctcggccctgtaactgctaatgggagacagcagcgccacgccacaggcttttcccctggtttcgggaggggtggggagccaggtggggctcccgcccagaccctttcccgaggtccgccctctccgccttttctctaaattcctcttttgagtgccctcccttccggttgagaggcgggggttggcccgtagttgtacactcagtcaccctgcactgtggaggcgggggcctcccttgtggactgatttgcgtgggatttggttgttttattaagagatttaaaaaattcagatgacttactagtatgactgttttgtcatatttgcttccaggttaataaatgacaaaaatgaaa

SEQ ID NO: 102831 - DNA, 1763 bp, Homo sapiens
  Payload ID: 60
  Gene Symbol: HMCES
  Gene Name: 5-hydroxymethylcytosine (hmC) binding, ES cell-specific
  Uniprot ID: Q96FZ2
  ENST ID: ENST00000389735
  CDS Start-End: 262-1326
gcgagctgacagaggggagcagaggcccgagcggacgcgaggcgacgcggagagggcggcctgggccgaagtgaggcgacgcggggcggcggagtctgagggccggagcggagcggaggcgacgcggggaggggcgagggatcgcggccggtggctgggggccacctgctccccgagcaccggcccccgctccggggagcagagtccggagcgggatccgcggcccacaggttcgcaggttgcgaggggcggtgttgaagaatgtgtgggcgaacatcctgtcacttacctagagatgttctcacgagagcttgcgcctaccaggatcggcggggccagcagcggctcccggagtggagggaccctgataagtactgcccctcttacaacaagagtcctcaatccaacagcccagtgcttctgtctcgactgcactttgagaaggatgcagactcatctgagcgtatcattgctcccatgcgctggggcttggtcccttcttggttcaaagaaagtgatccttccaagctgcagttcaatactaccaactgtcgtagtgataccgtaatggagaaacggtcatttaaggtgcctctgggaaagggaagacgctgtgtcgttttagcagatggattctatgagtggcagcgatgtcagggaacaaaccagaggcagccatacttcatctattttcctcaaatcaagacagagaagtcaggtagcattggtgctgcagatagtcctgagaactgggagaaagtctgggacaactggaggctgctgacaatggccgggatctttgactgctgggagcccccagagggaggagatgtcctgtattcctataccatcatcacagtggattcctgcaaaggcttgagtgacatccaccacaggatgcctgccatattagatggagaggaggcagtttctaaatggcttgactttggtgaagtctcaactcaggaagctctgaaattaatccacccaacagagaacatcaccttccatgcagtctcttctgtggtgaacaactcgcgaaacaacactcctgagtgtctggctcctgtcgacttggtggtcaaaaaggagctcagggcaagtggcagtagccagaggatgttgcagtggttggccacaaagtcacccaaaaaggaagactcaaaaacacctcaaaaggaagagtcagatgttccccagtggtccagtcagttcctgcagaagagtccactccccaccaagagaggcactgcaggactcctagagcaatggctgaagcgggagaaggaggaggaacctgtggccaagcgtccttacagccagtgacacaggactttcagagaccaaggccagggtctgctgcactgctgttctgataataggttcttaacattgtatgtatatgtgtttgctttgggaggaggtggcactgtgttagttgacagttgtgggctcatgtagtcttttttgccatgagtaggagcccctagtggggctggtggacagctttggaagaggtgtcctgctgctgttaccagccatgtgggccccataggggcactgcgcctgctgccctttcctggcagggctggtggagtcttccctcaaagcatgccttacccagctgggaagtctctgccctgatctggtactccttgtagtaagctgttttctgctcagccactgggctctttcacttttttagttcttaaaaatttatttttaagttctaaaataaaataaaaataagttcttaaaattta

SEQ ID NO: 102832 - DNA, 1490 bp, Homo sapiens
  Payload ID: 60
  Gene Symbol: HMCES
  Gene Name: 5-hydroxymethylcytosine (hmC) binding, ES cell-specific
  ENST ID: ENST00000417226
  CDS Start-End: 84-1022
aagcggagcggagcgggggtgaggagagtcgagggaggtgacgcgcgctgccggggcgaggttgcgaggggcggtgttgaagaatgtgtgggcgaacatcctgtcacttacctagagatgttctcacgagagcttgcgcctaccaggatcggcggggccagcagcggctcccggagtggagggaccctgataagtactgcccctcttacaacaagagtcctcaatccaacagcccagtgcttctgtctcgactgcactttgagaaggatgcagactcatctgagcgtatcattgctcccatgcgctggggcttggtcccttcttggttcaaagaaagtgatccttccaagctgcagttcaatactaccaactgtcgtagtgataccgtaatggagaaacggtcatttaagtcaggtagcattggtgctgcagatagtcctgagaactgggagaaagtctgggacaactggaggctgctgacaatggccgggatctttgactgctgggagcccccagagggaggagatgtcctgtattcctataccatcatcacagtggattcctgcaaaggcttgagtgacatccaccacaggatgcctgccatattagatggagaggaggcagtttctaaatggcttgactttggtgaagtctcaactcaggaagctctgaaattaatccacccaacagagaacatcaccttccatgcagtctcttctgtggtgaacaactcgcgaaacaacactcctgagtgtctggctcctgtcgacttggtggtcaaaaaggagctcagggcaagtggcagtagccagaggatgttgcagtggttggccacaaagtcacccaaaaaggaagactcaaaaacacctcaaaaggaagagtcagatgttccccagtggtccagtcagttcctgcagaagagtccactccccaccaagagaggcactgcaggactcctagagcaatggctgaagcgggagaaggaggaggaacctgtggccaagcgtccttacagccagtgacacaggactttcagagaccaaggccagggtctgctgcactgctgttctgataataggttcttaacattgtatgtatatgtgtttgctttgggaggaggtggcactgtgttagttgacagttgtgggctcatgtagtcttttttgccatgagtaggagcccctagtggggctggtggacagctttggaagaggtgtcctgctgctgttaccagccatgtgggccccataggggcactgcgcctgctgccctttcctggcagggctggtggagtcttccctcaaagcatgccttacccagctgggaagtctctgccctgatctggtactccttgtagtaagctgttttctgctcagccactgggctctttcacttttttagttcttaaaaatttatttttaagttctaaaataaaataaaaataagttcttaaaatttatttttttcctgaataaattgtatttggtaaa

SEQ ID NO: 102833 - DNA, 643 bp, Homo sapiens
  Payload ID: 60
  Gene Symbol: HMCES
  Gene Name: 5-hydroxymethylcytosine (hmC) binding, ES cell-specific
  ENST ID: ENST00000511665
  CDS Start-End: 223-643
cggacgcgaggcgacgcggagagggcggcctgggccgaagtgaggcgacgcggggcggcggagtctgagggccggagcggagcggaggcgacgcggggaggggcgagggatcgcggccggtggctgggggccacctgctccccgagcaccggcccccgctccggggagcagagtccggagcgggatccgcggcccacaggttgcgaggggcggtgttgaagaatgtgtgggcgaacatcctgtcacttacctagagatgttctcacgagagcttgcgcctaccaggatcggcggggccagcagcggctcccggagtggagggaccctgataagtactgcccctcttacaacaagagtcctcaatccaacagcccagtgcttctgtctcgactgcactttgagaagtcaggtagcattggtgctgcagatagtcctgagaactgggagaaagtctgggacaactggaggctgctgacaatggccgggatctttgactgctgggagcccccagagggaggagatgtcctgtattcctataccatcatcacagtggattcctgcaaaggcttgagtgacatccaccacaggatgcctgccatattagatggagaggaggcagtttctaaatggcttgactttggtg

SEQ ID NO: 102834 - DNA, 948 bp, Homo sapiens
  Payload ID: 60
  Gene Symbol: HMCES
  Gene Name: 5-hydroxymethylcytosine (hmC) binding, ES cell-specific
  ENST ID: ENST00000509042
  CDS Start-End: 102-948
cggtgacgcgggtggccaaagcggagcggagcgggggtgaggagagtcgagggaggtgacgcgcgctgccggggcgaggttgcgaggggcggtgttgaagaatgtgtgggcgaacatcctgtcacttacctagagatgttctcacgagagcttgcgcctaccaggatcggcggggccagcagcggctcccggagtggagggaccctgataagtactgcccctcttacaacaagagtcctcaatccaacagcccagtgcttctgtctcgactgcactttgagaaggtgcctctgggaaagggaagacgctgtgtcgttttagcagatggattctatgagtggcagcgatgtcagggaacaaaccagaggcagccatacttcatctattttcctcaaatcaagacagagaagtcaggtagcattggtgctgcagatagtcctgagaactgggagaaagtctgggacaactggaggctgctgacaatggccgggatctttgactgctgggagcccccagagggaggagatgtcctgtattcctataccatcatcacagtggattcctgcaaaggcttgagtgacatccaccacaggatgcctgccatattagatggagaggaggcagtttctaaatggcttgactttggtgaagtctcaactcaggaagctctgaaattaatccacccaacagagaacatcaccttccatgcagtctcttctgtggtgaacaactcgcgaaacaacactcctgagtgtctggctcctgtcgacttggtggtcaaaaaggagctcagggcaagtggcagtagccagaggatgttgcagtggttggccacaaagtcacccaaaaaggaagactcaaaaacacctcaaaaggaagagtcagatgttccccagtggtccagtcagttcctgcagaagagtccactccccaccaagagaggcactg

SEQ ID NO: 102835 - DNA, 774 bp, Homo sapiens
  Payload ID: 60
  Gene Symbol: HMCES
  Gene Name: 5-hydroxymethylcytosine (hmC) binding, ES cell-specific
  ENST ID: ENST00000509551
  CDS Start-End: 75-774
cagaggcccgagcggacgcgaggcgacgcggagagggcggcctgggccgaagttgcgaggggcggtgttgaagaatgtgtgggcgaacatcctgtcacttacctagagatgttctcacgagagcttgcgcctaccaggatcggcggggccagcagcggctcccggagtggagggaccctgataagtactgcccctcttacaacaagagtcctcaatccaacagcccagtgcttctgtctcgactgcactttgagaaggatgcagactcatctgagcgtatcattgctcccatgcgctggggcttggtcccttcttggttcaaagaaagtgatccttccaagctgcagttcaatactaccaactgtcgtagtgataccgtaatggagaaacggtcatttaaggtgcctctgggaaagggaagacgctgtgtcgttttagcagatggattctatgagtggcagcgatgtcagggaacaaaccagaggcagccatacttcatctattttcctcaaatcaagacagagaagtcaggtagcattggtgctgcagatagtcctgagaactgggagaaagtctgggacaactggaggctgctgacaatggccgggatctttgactgctgggagcccccagagggaggagatgtcctgtattcctataccatcatcacagtggattcctgcaaaggcttgagtgacatccaccacaggatgcctgccatattagatggagaggaggcagtttctaaatggcttgactttggtgaagtctcaa

SEQ ID NO: 102836 - DNA, 1952 bp, Homo sapiens
  Payload ID: 60
  Gene Symbol: HMCES
  Gene Name: 5-hydroxymethylcytosine (hmC) binding, ES cell-specific
  Uniprot ID: Q96FZ2
  ENST ID: ENST00000502878
  CDS Start-End: 272-1336
gaggggaaaggaagcgacgcgagctgacagaggggagcagaggcccgagcggacgcgaggcgacgcggagagggcggcctgggccgaagtgaggcgacgcggggcggcggagtctgagggccggagcggagcggaggcgacgcggggaggggcgagggatcgcggccggtggctgggggccacctgctccccgagcaccggcccccgctccggggagcagagtccggagcgggatccgcggcccacaggttgcgaggggcggtgttgaagaatgtgtgggcgaacatcctgtcacttacctagagatgttctcacgagagcttgcgcctaccaggatcggcggggccagcagcggctcccggagtggagggaccctgataagtactgcccctcttacaacaagagtcctcaatccaacagcccagtgcttctgtctcgactgcactttgagaaggatgcagactcatctgagcgtatcattgctcccatgcgctggggcttggtcccttcttggttcaaagaaagtgatccttccaagctgcagttcaatactaccaactgtcgtagtgataccgtaatggagaaacggtcatttaaggtgcctctgggaaagggaagacgctgtgtcgttttagcagatggattctatgagtggcagcgatgtcagggaacaaaccagaggcagccatacttcatctattttcctcaaatcaagacagagaagtcaggtagcattggtgctgcagatagtcctgagaactgggagaaagtctgggacaactggaggctgctgacaatggccgggatctttgactgctgggagcccccagagggaggagatgtcctgtattcctataccatcatcacagtggattcctgcaaaggcttgagtgacatccaccacaggatgcctgccatattagatggagaggaggcagtttctaaatggcttgactttggtgaagtctcaactcaggaagctctgaaattaatccacccaacagagaacatcaccttccatgcagtctcttctgtggtgaacaactcgcgaaacaacactcctgagtgtctggctcctgtcgacttggtggtcaaaaaggagctcagggcaagtggcagtagccagaggatgttgcagtggttggccacaaagtcacccaaaaaggaagactcaaaaacacctcaaaaggaagagtcagatgttccccagtggtccagtcagttcctgcagaagagtccactccccaccaagagaggcactgcaggactcctagagcaatggctgaagcgggagaaggaggaggaacctgtggccaagcgtccttacagccagtgacacaggactttcagagaccaaggccagggtctgctgcactgctgttctgataataggttcttaacattgtatgtatatgtgtttgctttgggaggaggtggcactgtgttagttgacagttgtgggctcatgtagtcttttttgccatgagtaggagcccctagtggggctggtggacagctttggaagaggtgtcctgctgctgttaccagccatgtgggccccataggggcactgcgcctgctgccctttcctggcagggctggtggagtcttccctcaaagcatgccttacccagctgggaagtctctgccctgatctggtactccttgtagtaagctgttttctgctcagccactgggctctttcacttttttagttcttaaaaatttatttttaagttctaaaataaaataaaaataagttcttaaaatttatttttttcctgaataaattgtatttggtaaacttctgcctacattttggaaagtgatgctggtggggaaagttctagatcttacttggtttcttctagaatcagtcttcaggaatggattttgtcacaaatggggcatgggggctttctgaggaaataactacaagtcttggtggtggg

SEQ ID NO: 102837 - DNA, 599 bp, Homo sapiens
  Payload ID: 60
  Gene Symbol: HMCES
  Gene Name: 5-hydroxymethylcytosine (hmC) binding, ES cell-specific
  ENST ID: ENST00000510314
  CDS Start-End: 50-599
gaggtgacgcgcgctgccggggcgaggttgcgaggggcggtgttgaagaatgtgtgggcgaacatcctgtcacttacctagagatgttctcacgagagcttgcgcctaccaggatcggcggggccagcagcggctcccggagtggagggaccctgataagtactgcccctcttacaacaagagtcctcaatccaacagcccagtgcttctgtctcgactgcactttgagaagtcaggtagcattggtgctgcagatagtcctgagaactgggagaaagtctgggacaactggaggctgctgacaatggccgggatctttgactgctgggagcccccagagggaggagatgtcctgtattcctataccatcatcacagtggattcctgcaaaggcttgagtgacatccaccacaggatgcctgccatattagatggagaggaggcagtttctaaatggcttgactttggtgaagtctcaactcaggaagctctgaaattaatccacccaacagagaacatcaccttccatgcagtctcttctgtggtgaacaactcgcgaaacaacactcctgagtgtctggctcctgtcgacttggtgg

SEQ ID NO: 102838 - DNA, 1778 bp, Homo sapiens
  Payload ID: 61
  Gene Symbol: HTR1A
  Gene Name: 5-hydroxytryptamine (serotonin) receptor 1A, G protein-coupled
  Uniprot ID: P08908
  ENST ID: ENST00000323865
  CDS Start-End: 415-1683
gtggaggatggggcttctcggttctagatatttctgggattggagactgtttgctagtggggagactccagctccggcagccagttcgggagcggcaaagtaaaatggacagcgacagacagacgttccagccacctctccgccgccgggagatcctggagctgctttcaggccaactccagtttcccagctggagcttctgaacgcgctggactgcgagagcccagggagcgcctgaaagctgctcctcggagatacccttcgccgaagcagtaagaacttcctgcttgggtctctgcattcccttcctccgaaacttcccaggagaagggcggaagaccccaggggaaggggcgaggcgaatcttcgcgctgctttttcttccctcccccttcccgcgccgggcgcgcaggcatggatgtgctcagccctggtcagggcaacaacaccacatcaccaccggctccctttgagaccggcggcaacactactggtatctccgacgtgaccgtcagctaccaagtgatcacctctctgctgctgggcacgctcatcttctgcgcggtgctgggcaatgcgtgcgtggtggctgccatcgccttggagcgctccctgcagaacgtggccaattatcttattggctctttggcggtcaccgacctcatggtgtcggtgttggtgctgcccatggccgcgctgtatcaggtgctcaacaagtggacactgggccaggtaacctgcgacctgttcatcgccctcgacgtgctgtgctgcacctcatccatcttgcacctgtgcgccatcgcgctggacaggtactgggccatcacggaccccatcgactacgtgaacaagaggacgccccggcgcgccgctgcgctcatctcgctcacttggcttattggcttcctcatctctatcccgcccatgctgggctggcgcaccccggaagaccgctcggaccccgacgcatgcaccattagcaaggatcatggctacactatctattccacctttggagctttctacatcccgctgctgctcatgctggttctctatgggcgcatattccgagctgcgcgcttccgcatccgcaagacggtcaaaaaggtggagaagaccggagcggacacccgccatggagcatctcccgccccgcagcccaagaagagtgtgaatggagagtcggggagcaggaactggaggctgggcgtggagagcaaggctgggggtgctctgtgcgccaatggcgcggtgaggcaaggtgacgatggcgccgccctggaggtgatcgaggtgcaccgagtgggcaactccaaagagcacttgcctctgcccagcgaggctggtcctaccccttgtgcccccgcctctttcgagaggaaaaatgagcgcaacgccgaggcgaagcgcaagatggccctggcccgagagaggaagacagtgaagacgctgggcatcatcatgggcaccttcatcctctgctggctgcccttcttcatcgtggctcttgttctgcccttctgcgagagcagctgccacatgcccaccctgttgggcgccataatcaattggctgggctactccaactctctgcttaaccccgtcatttacgcatacttcaacaaggactttcaaaacgcgtttaagaagatcattaagtgtaagttctgccgccagtgatgacggaggagtagccggccagtcgaggctacaggatccgtcccattcactatgcttcccccaaccctagggaatcaacacttaagataattcgc

SEQ ID NO: 102839 - DNA, 553 bp, Homo sapiens
  Payload ID: 61
  Gene Symbol: HTR1A
  Gene Name: 5-hydroxytryptamine (serotonin) receptor 1A, G protein-coupled
  ENST ID: ENST00000506598
  CDS Start-End: 429-553
tttgttacaaccttggtctgaccggcagggatctggtgtgtatatttctgggattggagactgtttgctagtggggagactccagctccggcagccagttcgggagcggcaaagtaaaatggacagcgacagacagacgttccagccacctctccgccgccgggagatcctggagctgctttcaggccaactccagtttcccagctggagcttctgaacgcgctggactgcgagagcccagggagcgcctgaaagctgctcctcggagatacccttcgccgaagcagtaagaacttcctgcttgggtctctgcattcccttcctccgaaacttcccaggagaagggcggaagaccccaggggaaggggcgaggcgaatcttcgcgctgctttttcttccctcccccttcccgcgccgggcgcgcaggcatggatgtgctcagccctggtcagggcaacaacaccacatcaccaccggctccctttgagaccggcggcaacactactggtatctccgacgtgaccgtcagctaccaagtgatcacctctctgct

SEQ ID NO: 102840 - DNA, 1260 bp, Homo sapiens
  Payload ID: 62
  Gene Symbol: HTR1B
  Gene Name: 5-hydroxytryptamine (serotonin) receptor 1B, G protein-coupled
  Uniprot ID: P28222
  ENST ID: ENST00000369947
  CDS Start-End: 62-1234
ccctctccttcgtccgctccatgcccaagagctgcgctccggagctggggcgaggagagccatggaggaaccgggtgctcagtgcgctccaccgccgcccgcgggctccgagacctgggttcctcaagccaacttatcctctgctccctcccaaaactgcagcgccaaggactacatttaccaggactccatctccctaccctggaaagtactgctggttatgctattggcgctcatcaccttggccaccacgctctccaatgcctttgtgattgccacagtgtaccggacccggaaactgcacaccccggctaactacctgatcgcctctctggcggtcaccgacctgcttgtgtccatcctggtgatgcccatcagcaccatgtacactgtcaccggccgctggacactgggccaggtggtctgtgacttctggctgtcgtcggacatcacttgttgcactgcctccatcctgcacctctgtgtcatcgccctggaccgctactgggccatcacggacgccgtggagtactcagctaaaaggactcccaagagggcggcggtcatgatcgcgctggtgtgggtcttctccatctctatctcgctgccgcccttcttctggcgtcaggctaaggccgaagaggaggtgtcggaatgcgtggtgaacaccgaccacatcctctacacggtctactccacggtgggtgctttctacttccccaccctgctcctcatcgccctctatggccgcatctacgtagaagcccgctcccggattttgaaacagacgcccaacaggaccggcaagcgcttgacccgagcccagctgataaccgactcccccgggtccacgtcctcggtcacctctattaactcgcgggttcccgacgtgcccagcgaatccggatctcctgtgtatgtgaaccaagtcaaagtgcgagtctccgacgccctgctggaaaagaagaaactcatggccgctagggagcgcaaagccaccaagaccctagggatcattttgggagcctttattgtgtgttggctacccttcttcatcatctccctagtgatgcctatctgcaaagatgcctgctggttccacctagccatctttgacttcttcacatggctgggctatctcaactccctcatcaaccccataatctataccatgtccaatgaggactttaaacaagcattccataaactgatacgttttaagtgcacaagttgacttgccgtttgcagtggggtcgccta

SEQ ID NO: 102841 - DNA, 2835 bp, Homo sapiens
  Payload ID: 63
  Gene Symbol: HTR1D
  Gene Name: 5-hydroxytryptamine (serotonin) receptor 1D, G protein-coupled
  Uniprot ID: P28221
  ENST ID: ENST00000374619
  CDS Start-End: 511-1644
ctaaatccagaatcgtttcaattactgtgaggggaattctgaagttctcattaaacacacgaatgtctcaagctttgaaaagagccagatgccaaaggcaagaatcccagggcattgcccacctgggtgtgatcccctgataattgtctaacaaattcagcatgtgtcccctgggcatgaccatctgctgggaaaagttccaggaccctgagacatcttgggattcctgtggtttaggaaagacctttaactaccagctggtagttgtctcagcattcttcaaatagtccggtcttgtttaatattattattattattgttatttaattttattttattgcaactgtacttagagaatagtctggtcttgagaccttttcactgtggtctgttctggtgtacggctcccaccagtgtgaagcagaaggatgactttgctctgttgtcaggacaaccttgaaggaaggagccaaatgtgtggaggtctgtgggaagagagagccacctagcatgtccccactgaaccagtcagcagaaggccttccccaggaggcctccaacagatccctgaatgccacagaaacctcagaggcttgggatcccaggaccctccaggcgctcaagatctcccttgccgtggtcctttccgtcatcacactggccacagtcctctccaatgcctttgtactcaccaccatcttactcaccaggaagctccacacccctgccaactacctgattggctccctggccaccaccgacctcttggtttccatcttggtaatgcccatcagcatcgcctataccatcacccacacctggaactttggccaaatcttgtgtgacatctggctgtcctctgacatcacgtgctgcacagcctccatcctgcatctctgtgtcattgctctggacaggtactgggcaatcacagatgccctggaatacagtaaacgcaggacggctggccacgcggccaccatgatcgccattgtctgggccatctccatctgcatctccatccccccgctcttctggcggcaggccaaggcccaggaggagatgtcggactgtctggtgaacacctctcagatctcctacaccatctactccacctgtggggccttctacattccctcggtgttgctcatcatcctatatggccggatctaccgggctgcccggaaccgcatcctgaatccaccctcactctatgggaagcgcttcaccacggcccacctcatcacaggctctgccgggtcctcgctctgctcgctcaactccagcctccatgaggggcactcgcactcggctggctcccctctctttttcaaccacgtgaaaatcaagcttgctgacagtgccctggaacgcaagaggatttctgctgctcgagaaaggaaagccactaaaatcctgggcatcattctgggggcctttatcatctgctggctgcccttcttcgtggtgtctctggtcctccccatctgccgggactcctgctggatccacccggcgctctttgacttcttcacctggctaggctatttaaactccctcatcaatccaataatctacactgtgtttaatgaagagtttcggcaagcttttcagaaaattgtccctttccggaaggcctcctagtcttattcggtgatgactcttgttatcttttgtgtcctgtaacctcatcgggattgtcttttttttttttaattattttctgagacttggattaattcatggtatcttgagtcttggttcaatcaacagaattgttctttttcctgttgttttcttaacttctgaaagagctgtgggtggtggggggcggggggcaggactgaagatttcactacttagcataatattttctttctttttttttttttttgagacggagtcttgccctctcgccaggctggagtgtagtggcacaatctcagctcactgcaacctccgcatcccgggttcaagagattctgcctcagcctccagagtagctgggactacaaacgtgtgtcaccaggcccagctaatttttgtatttttaataaagacggggtttcatcatgttggccagggtggtctcgatctcttgacctcgtgatccgcccgcctcagcatcccaaagtgctgggattacaggcatgagccactgtgcctggccaacataatgttttcacagttcctctttgttggaagaagtgtgtgacctacaagattcctggttgatacagttcaggtgagaaactgtttgattatagaaaagaccccagactcagagggaaggctctctggtctacctgagatctatatggagcttaaaggagggtgaataagattaatgacctgaattgaaagagaatttggagccaggatgggtctccattctgtgtggcaccttgattggaaaataatatccatgcgtttcttccactgagtctttcttagattaaatctctcccagttgtccgtgaagagaaagacagtatttgcagtgccgatgatatagagtgacttggagagagattcagaagttaggggtagcgggggtaggatggttgggaccagattgactaccctgtacccttccttcttccccaatatgcctgcgccatcttcacattctgaagttgaaacccatgatcacccctttgaggtagattgaccggctttagacgcccaccccccacccaccgcaagctttgagtgggacaccattctgaattttttttctgaatttttttttaacatctctttctcattagagatctgaaaactcattagagatgttgagtcttatcaaataaaaagcatgagacatcatggcca

SEQ ID NO: 102842 - DNA, 2052 bp, Homo sapiens
  Payload ID: 64
  Gene Symbol: HTR1E
  Gene Name: 5-hydroxytryptamine (serotonin) receptor 1E, G protein-coupled
  Uniprot ID: P28566
  ENST ID: ENST00000305344
  CDS Start-End: 704-1801
aagacctggagtacctcggagctgcgacctccagttcacaataccacctgcctcacacccgggctcatcttttcatcccacacccaccacccccctctccgttcacggtgtcccgggaggctgcgacctgcgtagatgatttagcagactgcccctgcccatgctcctgctcctgctcctcctcctcctcttccccgctctctccctctcgcctcctcttccagtccaggcgcccagactcggcgaagcgcagcgcctgccaccagcggtgcctcgggctgcccggcgcgccgcgctcccaggttctgtctcgccgcaccccggcgggcactggcgcgggcaaggacgctggcggggagaacgccctgggctcaacgtactccagaatcgaatgttgagagaagcagtgctctgatccagctcaggagaaaaaggagcgggttccgagtgagacttctggagccagctggacgtgccggtttgcccagtgcggcgcggctgcacgcaccgtccacaaggaaccttcactcagaagaaatgctgtggcccttccctttaccaacagaaaatggaacacaagagaccacatagctgaacaaattatagcctccttacaagtgagaaaccttcgaggctacatagttttcagccaaaggaaaataaccaacagcttctccacagtgtagactgaaacaagggaaacatgaacatcacaaactgtaccacagaggccagcatggctataagacccaagaccatcactgagaagatgctcatttgcatgactctggtggtcatcaccaccctcaccacgttgctgaacttggctgtgatcatggctattggcaccaccaagaagctccaccagcctgccaactacctaatctgttctctggccgtgacggacctcctggtggcagtgctcgtcatgcccctgagcatcatctacattgtcatggatcgctggaagcttgggtacttcctctgtgaggtgtggctgagtgtggacatgacctgctgcacctgctccatcctccacctctgtgtcattgccctggacaggtactgggccatcaccaatgctattgaatacgccaggaagaggacggccaagagggccgcgctgatgatccttaccgtctggaccatctccattttcatctccatgccccctctgttctggagaagccaccgccgcctaagccctccccctagtcagtgcaccatccagcacgaccatgttatctacaccatttactccacgctgggtgcgttttatatccccttgactttgatactgattctctattaccggatttaccacgcggccaagagcctttaccagaaaaggggatcaagtcggcacttaagcaacagaagcacagatagccagaattcttttgcaagttgtaaacttacacagactttctgtgtgtctgacttctccacctcagaccctaccacagagtttgaaaagttccatgcctccatcaggatcccccccttcgacaatgatctagatcacccaggagaacgtcagcagatctctagcaccagggaacggaaggcagcacgcatcctggggctgattctgggtgcattcattttatcctggctgccatttttcatcaaagagttgattgtgggtctgagcatctacaccgtgtcctcggaagtggccgactttctgacgtggctcggttatgtgaattctctgatcaaccctctgctctatacgagttttaatgaagactttaagctggcttttaaaaagctcattagatgccgagagcatacttagactgtaaaaagctaaaaggcacgactttttccagagcctcatgagtggatgggggtaaggggtgcaacttattaattcttgaacatacttggttcaggagagtttgtaagtatgtgtggtcttgtttccttgtttgtttgtttgttttgttctgttttgtttgaggattgttatttggcgtgctgttttctacctctggtcttatctgtgatacataatttcaaataaacattatcatacaaaaacagaaa

SEQ ID NO: 102843 - DNA, 3140 bp, Homo sapiens
  Payload ID: 65
  Gene Symbol: HTR1F
  Gene Name: 5-hydroxytryptamine (serotonin) receptor 1F, G protein-coupled
  Uniprot ID: P30939
  ENST ID: ENST00000319595
  CDS Start-End: 55-1155
cccttgttacaggtatccatttttcagctatattaatcttttaaaacaaagaaaatggatttcttaaattcatctgatcaaaacttgacctcagaggaactgttaaacagaatgccatccaaaattctggtgtccctcactctgtctgggctggcactgatgacaacaactatcaactcccttgtgatcgctgcaattattgtgacccggaagctgcaccatccagccaattatttaatttgttcccttgcagtcacagattttcttgtggctgtcctggtgatgcccttcagcattgtgtatattgtgagagagagctggattatggggcaagtggtctgtgacatttggctgagtgttgacattacctgctgcacgtgctccatcttgcatctctcagctatagctttggatcggtatcgagcaatcacagatgctgttgagtatgccaggaaaaggactccaaagcatgctggcattatgattacaatagtttggattatatctgtttttatctctatgcctcctctattctggaggcaccaaggaactagcagagatgatgaatgcatcatcaagcacgaccacattgtttccaccatttactcaacatttggagctttctacatcccactggcattgattttgatcctttactacaaaatatatagagcagcaaagacattataccacaagagacaagcaagtaggattgcaaaggaggaggtgaatggccaagtccttttggagagtggtgagaaaagcactaaatcagtttccacatcctatgtactagaaaagtctttatctgacccatcaacagactttgataaaattcatagcacagtgagaagtctcaggtctgaattcaagcatgagaaatcttggagaaggcaaaagatctcaggtacaagagaacggaaagcagccactaccctgggattaatcttgggtgcatttgtaatatgttggcttcctttttttgtaaaagaattagttgttaatgtctgtgacaaatgtaaaatttctgaagaaatgtccaattttttggcatggcttgggtatctcaattcccttataaatccactgatttacacaatctttaatgaagacttcaagaaagcattccaaaagcttgtgcgatgtcgatgttagttttaaaaatgtttattattgaaggatgggggtttttgaggggaggaataactagatgaatgccaaataataaaacacttaagcttttagagggaaatacatgaaaactgctaaattgataaggctataatttatattttaatagcaatgtgaatataaaagttattgatcaccactattctagggtattcaaaattagaaaataatttatgtaggttataaacaatattttgcctatgcaatgttcctaaaaagctaactggaaaaaatatatatatatacaatagtaatgacagtgattttccatgtttacatcttacaataattatagaggagttttcaattaacaacatacctccctccataatttctatctagtcctactgttttataatataattctattattttgtataagaaaatataattcaccacaaagtacacatttctcctgtctccattcttgtcccttctccatcttaccctgagcaaaagggagggggaaggagcaactcttacttagtgtgactgcagaaaatgtaaaaaagtcagagcttgaaattgtccttgtgtttaggtagcaaagagtaatcataaagtgggttaggtacagcaaaataattcaatactgaacttgtgcatatttaatgtattatgtttgatataaacttctagaataatattatcttatccttatattatcagcatttgaaatcaaagccttaccttagtaacaataactcaacaaaggggcatgggtgacgttgttataattgctctctgtttacttaggaatcaaatttaaagcactaaatatcatagattactcaccacagttatactcttaacatctttttaaaagtataaaatgtatttcatttctgttaataagctcagttattaactaaattgtctgtggtattttgcacttcagtattttccatacctttgatttcaacattatttcccgtttactagacagaatataatggaaatttttagaactttccctttactttaaaatatttctacttttccaattggtagaaatgaacaggaaaaaagactcatattacactaattaataaatgtacacacatatatatttttgtaattagtcactctactagttcagtgagccaaagcaattccataagtttttcttccatatttataaaaggatttgaaaacaatagaaccatgagtttgagaggattttattttatttgaaccagcaaggtcatagactacctttgggaagacctatcatcaaccaagatcgtttgaaaaacaatatatacctttttttaagttgtacatttatgtgcattgtaaatattccttcctgatggtgtggttaagagtacattacatcaattttatgtatatatagatctgtgacaaattactctcaatctaacaaacatttacagagttcccattttatacaaggcattgagacatatactagatagaagatatacgaaataataaaatacagttttttttcctgaatatgtttacagtctaaaaggagaaacaagaaaaaataaaactataatagaaaagagcaaactaaaatctggcatggaagttgtttacacagttatgatggtgcagaggaaaaactgatcgcatcttgtttagaaaaatcagaaatatttcacaaagaatgtatctagaacacatgtcaaatacacagcactggggcaagaaaaatggaagagcacactccaggttgtgacaacatcaggatacaaactgcaccatgcaagtatttggtggggcatgttcataaatagcaatgagtttggcaactatttagagcaatagaggaaaaggatattaaaagaaaaattgggcatttttgtggctgactttgaacgtcagaaaaaagtctacagtcaattttattgctgacgatgggtaatcactgatacttttagcaaaaatattacaagtttagagcaaatctaaacaaaaaa

SEQ ID NO: 102844 - DNA, 4835 bp, Homo sapiens
  Payload ID: 66
  Gene Symbol: HTR2A
  Gene Name: 5-hydroxytryptamine (serotonin) receptor 2A, G protein-coupled
  Uniprot ID: P28223
  ENST ID: ENST00000378688
  CDS Start-End: 133-1548
ccagccccgggagaacagcatgtacaccagcctcagtgttacagagtgtgggtacatcaaggtgaatggtgagcagaaactataacctgttagtccttctacacctcatctgctacaagttctggcttagacatggatattctttgtgaagaaaatacttctttgagctcaactacgaactccctaatgcaattaaatgatgacaccaggctctacagtaatgactttaactccggagaagctaacacttctgatgcatttaactggacagtcgactctgaaaatcgaaccaacctttcctgtgaagggtgcctctcaccgtcgtgtctctccttacttcatctccaggaaaaaaactggtctgctttactgacagccgtagtgattattctaactattgctggaaacatactcgtcatcatggcagtgtccctagagaaaaagctgcagaatgccaccaactatttcctgatgtcacttgccatagctgatatgctgctgggtttccttgtcatgcccgtgtccatgttaaccatcctgtatgggtaccggtggcctctgccgagcaagctttgtgcagtctggatttacctggacgtgctcttctccacggcctccatcatgcacctctgcgccatctcgctggaccgctacgtcgccatccagaatcccatccaccacagccgcttcaactccagaactaaggcatttctgaaaatcattgctgtttggaccatatcagtaggtatatccatgccaataccagtctttgggctacaggacgattcgaaggtctttaaggaggggagttgcttactcgccgatgataactttgtcctgatcggctcttttgtgtcatttttcattcccttaaccatcatggtgatcacctactttctaactatcaagtcactccagaaagaagctactttgtgtgtaagtgatcttggcacacgggccaaattagcttctttcagcttcctccctcagagttctttgtcttcagaaaagctcttccagcggtcgatccatagggagccagggtcctacacaggcaggaggactatgcagtccatcagcaatgagcaaaaggcatgcaaggtgctgggcatcgtcttcttcctgtttgtggtgatgtggtgccctttcttcatcacaaacatcatggccgtcatctgcaaagagtcctgcaatgaggatgtcattggggccctgctcaatgtgtttgtttggatcggttatctctcttcagcagtcaacccactagtctacacactgttcaacaagacctataggtcagccttttcacggtatattcagtgtcagtacaaggaaaacaaaaaaccattgcagttaattttagtgaacacaataccggctttggcctacaagtctagccaacttcaaatgggacaaaaaaagaattcaaagcaagatgccaagacaacagataatgactgctcaatggttgctctaggaaagcagcattctgaagaggcttctaaagacaatagcgacggagtgaatgaaaaggtgagctgtgtgtgataggctagttgccgtggcaactgtggaaggcacactgagcaagttttcacctatctggaaaaaaaaaaatatgagattggaaaaaattagacaagtctagtggaaccaacgatcatatctgtatgcctcattttattctgtcaatgaaaagcggggttcaatgctacaaaatgtgtgcttggaaaatgttctgacagcatttcagctgtgagctttctgatacttatttataacattgtaaatgatatgtctttaaaatgattcacttttattgtataattatgaagccctaagtaaatctaaattaacttctattttcaagtggaaaccttgctgctatgctgttcattgatgacatgggattgagttggttacctattgctgtaaataaaaatagctataaatagtgaaaattttattgaatataatggcctcttaaaaattatctttaaaacttactatggtatatattttgaaaggagaaaaaaaaagccactaaggtcagtgttataaaatctgtattgctaagataattaaatgaaatacttgacaacatttttcattcctgctttttcatagataccattttgaaatattcacaaggttgctggcatttgctgcatttcaagttaattctcagaagtgaaaaagacttcaaatgttattcaataactattgctgctttctcttctacttcttgtgctttactctgaatttccagtgtggtcttgtttaatatttgttcctctaggtaaactagcaaaaggatgatttaacattaccaaatgcctttctagcaattgcttctctaaaacagcactatcgaggtatttggtaacttgctgtgaaatgactgcatcatgcatgcactcttttgagcagtaaatgtatattgatgtaactgtgtcaggattgaggatgaactcaggtttccggctactgacagtggtagagtcctaggacatctctgtaaaaagcaggtgactttcctatgacactcatcaggtaaactgatgctttcagatccatcggtttatactatttattaaaaccattctgcttggttccacaatcatctattgagtgtacatttatgtgtgaagcaaatttctagatatgagaaatataaaaataattaaaacaaaatccttgccttcaaacgaaatggctcggccaggcacggaggctcgtgcatgtaatcctagcactttgggaggctgagatgggaggatcacttgaggccaagagtttgagaccaacctgggtaacaaagtgagacctccctgtctctacaaaaaaaatcaaaaaattatctgatccttgtggcacacaactgtggtcccagctacaggggaggctgagacgcaaggatcacttgagcccagaagctcaaggctgcagtgagccaagttcacaccactgccatttcctcctgggcaacagagtgagaccctatcacaaaaaaaaagaaagaaaaaaagaaaatgactaaactgaaatggtcttagtcaaaaaatatatacagacttatttttagaatcatttcaacttatttccttcttacctggttcagaaacaagtttgtttcaactgtgagagtagttttaaaaataagttttcctgattggttaccaataaacaccaaacaaataaaggagggggaaaatatcacttgaggcttaacattgcaattaatttagaaatacgcacctcaatctcaagccagtttataactaccatagttttgagcaaaatttttcttctatttctccaaaaactcactcatttcagtattactcattgacactgggctccctaatagaaaagcagatattataatatttcattgaaatggttactaaagagaaaaagagattaacaacagttaatccaccttgatattataacactcaaggttaaattgcatgttgttattagaatcaatgttatatatatgattacaatgctgaagcatttctattgaatgagaaatagtgtttgccctaaacctttgggaaaaaaatacagatttgaaaactaaagaatgtgggaagtgtcattgtgtaatttggaaatgcataaaattctcattatgtcctcatagatatgttgaaagatggttcactgtttcaaagatagaatgtataatatgctgctagtaccaaggctgcatttgaactgaactactccttatgatataccatactaactgatgaaaatataaatgttaaaatgtctccactctaatgtattttgccttcacttgtaactctgcacatttcattatatattagggaaaagattacagattctacccccatatactcaatcttgatcagaatgtacattaatgttgcctgatagatgtcttttgactacctatatattacaaatgtgtatgtgtttttttcttccataagtatctattcaagtgtatactgtataggcaaatgtgtagctgtatatatgtacagacatgttctcatgcactttattcaatatttatatatttatatggacgaaaagcaagtcaatgaaaacactcagtatatacacatgtgtgcatgtttgtatcatgtttatttaaatgtgaattcatgttctaatatttctatgaccttccattgctgcaaagcagattaaagtgtaacaaaaatatcagctctttaaataaactggaaattaatctaattttgtggaagaactttaagacaagtctatgaggatggcgaaaacaatggtccacatatatagtttcttgatcctaaataaaatggtacctttgggccctttgtttagtctggcaattttctgactactatggctttttaaacagactcacacctaagtgaaacacagttgtcaaatgatttatggatctgtgattaaaggattcacttttaatgaatactattaaaacggagtaacaaaccttgctctactttaagttgaatgatagattcctctatattcaaaaaaaagcaattaactgccataattagggaaaactgtttaaagcatactgcatttacttggccacagcgccatctcatggtaattttttaaagtgctaccgtagccaaattgaactaagtcactgtactgctttcagcaaagggtgctcctcccatttgtgcatcaatgagacatatttataaagtgctaaattattctgtgccatatgtaacaaatacagtgaagattattttatgaacttattttaatcaaggcgatgctaaaagttttcaagaaaggataaataactgtaaataaagtagactcaaaaa

SEQ ID NO: 102845 - DNA, 5429 bp, Homo sapiens
  Payload ID: 66
  Gene Symbol: HTR2A
  Gene Name: 5-hydroxytryptamine (serotonin) receptor 2A, G protein-coupled
  Uniprot ID: P28223
  ENST ID: ENST00000542664
  CDS Start-End: 732-2147
ctgatgaaatgaacgagacagtcagagagctactccattcccgtggaaaccaggagtcccttggtgcagacagctcttcctactttcccatgcagttcttttgtgcgactttgaggggctcgtgaatgatttctaaatgtgtgcctgctgaggcgagccgcacagggagggaggaacccagccgagccgtgccagaggaagccaacaggatcctagcagtgcgggagctggctcagctcttgcatgcagtttttgaagtcagcaaaacagaaaccaaattactatcatattatgctggtggaagatcaagaagaggggactctacaccagtttaattactgtgagagatgcagcgagtcacagaataacaaatgtatctcatgtgtggaccctgaagacaaatgacatttatcttcccgagcgctcaaaaaaaaccctgcaacctctatgctaaaagttcattctgcttttttgtcctcggtttggtgagaaaataataaaaccaaacagtggactctcctaaaattgtgaatgaagaaaacttacagccaccacagttcagttctttaactatcattgtaataatggaagacaaaaatccagccccgggagaacagcatgtacaccagcctcagtgttacagagtgtgggtacatcaaggtgaatggtgagcagaaactataacctgttagtccttctacacctcatctgctacaagttctggcttagacatggatattctttgtgaagaaaatacttctttgagctcaactacgaactccctaatgcaattaaatgatgacaccaggctctacagtaatgactttaactccggagaagctaacacttctgatgcatttaactggacagtcgactctgaaaatcgaaccaacctttcctgtgaagggtgcctctcaccgtcgtgtctctccttacttcatctccaggaaaaaaactggtctgctttactgacagccgtagtgattattctaactattgctggaaacatactcgtcatcatggcagtgtccctagagaaaaagctgcagaatgccaccaactatttcctgatgtcacttgccatagctgatatgctgctgggtttccttgtcatgcccgtgtccatgttaaccatcctgtatgggtaccggtggcctctgccgagcaagctttgtgcagtctggatttacctggacgtgctcttctccacggcctccatcatgcacctctgcgccatctcgctggaccgctacgtcgccatccagaatcccatccaccacagccgcttcaactccagaactaaggcatttctgaaaatcattgctgtttggaccatatcagtaggtatatccatgccaataccagtctttgggctacaggacgattcgaaggtctttaaggaggggagttgcttactcgccgatgataactttgtcctgatcggctcttttgtgtcatttttcattcccttaaccatcatggtgatcacctactttctaactatcaagtcactccagaaagaagctactttgtgtgtaagtgatcttggcacacgggccaaattagcttctttcagcttcctccctcagagttctttgtcttcagaaaagctcttccagcggtcgatccatagggagccagggtcctacacaggcaggaggactatgcagtccatcagcaatgagcaaaaggcatgcaaggtgctgggcatcgtcttcttcctgtttgtggtgatgtggtgccctttcttcatcacaaacatcatggccgtcatctgcaaagagtcctgcaatgaggatgtcattggggccctgctcaatgtgtttgtttggatcggttatctctcttcagcagtcaacccactagtctacacactgttcaacaagacctataggtcagccttttcacggtatattcagtgtcagtacaaggaaaacaaaaaaccattgcagttaattttagtgaacacaataccggctttggcctacaagtctagccaacttcaaatgggacaaaaaaagaattcaaagcaagatgccaagacaacagataatgactgctcaatggttgctctaggaaagcagcattctgaagaggcttctaaagacaatagcgacggagtgaatgaaaaggtgagctgtgtgtgataggctagttgccgtggcaactgtggaaggcacactgagcaagttttcacctatctggaaaaaaaaaaatatgagattggaaaaaattagacaagtctagtggaaccaacgatcatatctgtatgcctcattttattctgtcaatgaaaagcggggttcaatgctacaaaatgtgtgcttggaaaatgttctgacagcatttcagctgtgagctttctgatacttatttataacattgtaaatgatatgtctttaaaatgattcacttttattgtataattatgaagccctaagtaaatctaaattaacttctattttcaagtggaaaccttgctgctatgctgttcattgatgacatgggattgagttggttacctattgctgtaaataaaaatagctataaatagtgaaaattttattgaatataatggcctcttaaaaattatctttaaaacttactatggtatatattttgaaaggagaaaaaaaaagccactaaggtcagtgttataaaatctgtattgctaagataattaaatgaaatacttgacaacatttttcattcctgctttttcatagataccattttgaaatattcacaaggttgctggcatttgctgcatttcaagttaattctcagaagtgaaaaagacttcaaatgttattcaataactattgctgctttctcttctacttcttgtgctttactctgaatttccagtgtggtcttgtttaatatttgttcctctaggtaaactagcaaaaggatgatttaacattaccaaatgcctttctagcaattgcttctctaaaacagcactatcgaggtatttggtaacttgctgtgaaatgactgcatcatgcatgcactcttttgagcagtaaatgtatattgatgtaactgtgtcaggattgaggatgaactcaggtttccggctactgacagtggtagagtcctaggacatctctgtaaaaagcaggtgactttcctatgacactcatcaggtaaactgatgctttcagatccatcggtttatactatttattaaaaccattctgcttggttccacaatcatctattgagtgtacatttatgtgtgaagcaaatttctagatatgagaaatataaaaataattaaaacaaaatccttgccttcaaacgaaatggctcggccaggcacggaggctcgtgcatgtaatcctagcactttgggaggctgagatgggaggatcacttgaggccaagagtttgagaccaacctgggtaacaaagtgagacctccctgtctctacaaaaaaaatcaaaaaattatctgatccttgtggcacacaactgtggtcccagctacaggggaggctgagacgcaaggatcacttgagcccagaagctcaaggctgcagtgagccaagttcacaccactgccatttcctcctgggcaacagagtgagaccctatcacaaaaaaaaagaaagaaaaaaagaaaatgactaaactgaaatggtcttagtcaaaaaatatatacagacttatttttagaatcatttcaacttatttccttcttacctggttcagaaacaagtttgtttcaactgtgagagtagttttaaaaataagttttcctgattggttaccaataaacaccaaacaaataaaggagggggaaaatatcacttgaggcttaacattgcaattaatttagaaatacgcacctcaatctcaagccagtttataactaccatagttttgagcaaaatttttcttctatttctccaaaaactcactcatttcagtattactcattgacactgggctccctaatagaaaagcagatattataatatttcattgaaatggttactaaagagaaaaagagattaacaacagttaatccaccttgatattataacactcaaggttaaattgcatgttgttattagaatcaatgttatatatatgattacaatgctgaagcatttctattgaatgagaaatagtgtttgccctaaacctttgggaaaaaaatacagatttgaaaactaaagaatgtgggaagtgtcattgtgtaatttggaaatgcataaaattctcattatgtcctcatagatatgttgaaagatggttcactgtttcaaagatagaatgtataatatgctgctagtaccaaggctgcatttgaactgaactactccttatgatataccatactaactgatgaaaatataaatgttaaaatgtctccactctaatgtattttgccttcacttgtaactctgcacatttcattatatattagggaaaagattacagattctacccccatatactcaatcttgatcagaatgtacattaatgttgcctgatagatgtcttttgactacctatatattacaaatgtgtatgtgtttttttcttccataagtatctattcaagtgtatactgtataggcaaatgtgtagctgtatatatgtacagacatgttctcatgcactttattcaatatttatatatttatatggacgaaaagcaagtcaatgaaaacactcagtatatacacatgtgtgcatgtttgtatcatgtttatttaaatgtgaattcatgttctaatatttctatgaccttccattgctgcaaagcagattaaagtgtaacaaaaatatcagctctttaaataaactggaaattaatctaattttgtggaagaactttaagacaagtctatgaggatggcgaaaacaatggtccacatatatagtttcttgatcctaaataaaatggtacctttgggccctttgtttagtctggcaattttctgactactatggctttttaaacagactcacacctaagtgaaacacagttgtcaaatgatttatggatctgtgattaaaggattcacttttaatgaatactattaaaacggagtaacaaaccttgctctactttaagttgaatgatagattcctctatattcaaaaaaaagcaattaactgccataattagggaaaactgtttaaagcatactgcatttacttggccacagcgccatctcatggtaattttttaaagtgctaccgtagccaaattgaactaagtcactgtactgctttcagcaaagggtgctcctcccatttgtgcatcaatgagacatatttataaagtgctaaattattctgtgccatatgtaacaaatacagtgaagattattttatgaacttattttaatcaaggcgatgctaaaagttttcaagaaaggataaataactgtaaataaagtagactc

SEQ ID NO: 102846 - DNA, 4689 bp, Homo sapiens
  Payload ID: 66
  Gene Symbol: HTR2A
  Gene Name: 5-hydroxytryptamine (serotonin) receptor 2A, G protein-coupled
  Uniprot ID: P28223
  ENST ID: ENST00000543956
  CDS Start-End: 244-1407
ctgatgaaatgaacgagacagtcagagagctactccattcccgtggaaaccaggagtcccttggtgcagacagctcttcctactttcccatgcagttcttttgtgcgactttgaggggctcgtgaatgatttctaaatgtgtgcctgctgaggcgagccgcacagggagggaggaacccagccgagccgtgccagaggaagccaacaggatcctagcagtgcgggagctggctcagctcttgcatgcagtttttgaagtcagcaaaacagaaaccaaattactatcatattatgctggtggaagatcaagaagaggggactctacaccagtttaattactgtgagagatgcagcgagtcacagaataacaaatgtatctcatgtgtggaccctgaagacaaatggtaccggtggcctctgccgagcaagctttgtgcagtctggatttacctggacgtgctcttctccacggcctccatcatgcacctctgcgccatctcgctggaccgctacgtcgccatccagaatcccatccaccacagccgcttcaactccagaactaaggcatttctgaaaatcattgctgtttggaccatatcagtaggtatatccatgccaataccagtctttgggctacaggacgattcgaaggtctttaaggaggggagttgcttactcgccgatgataactttgtcctgatcggctcttttgtgtcatttttcattcccttaaccatcatggtgatcacctactttctaactatcaagtcactccagaaagaagctactttgtgtgtaagtgatcttggcacacgggccaaattagcttctttcagcttcctccctcagagttctttgtcttcagaaaagctcttccagcggtcgatccatagggagccagggtcctacacaggcaggaggactatgcagtccatcagcaatgagcaaaaggcatgcaaggtgctgggcatcgtcttcttcctgtttgtggtgatgtggtgccctttcttcatcacaaacatcatggccgtcatctgcaaagagtcctgcaatgaggatgtcattggggccctgctcaatgtgtttgtttggatcggttatctctcttcagcagtcaacccactagtctacacactgttcaacaagacctataggtcagccttttcacggtatattcagtgtcagtacaaggaaaacaaaaaaccattgcagttaattttagtgaacacaataccggctttggcctacaagtctagccaacttcaaatgggacaaaaaaagaattcaaagcaagatgccaagacaacagataatgactgctcaatggttgctctaggaaagcagcattctgaagaggcttctaaagacaatagcgacggagtgaatgaaaaggtgagctgtgtgtgataggctagttgccgtggcaactgtggaaggcacactgagcaagttttcacctatctggaaaaaaaaaaatatgagattggaaaaaattagacaagtctagtggaaccaacgatcatatctgtatgcctcattttattctgtcaatgaaaagcggggttcaatgctacaaaatgtgtgcttggaaaatgttctgacagcatttcagctgtgagctttctgatacttatttataacattgtaaatgatatgtctttaaaatgattcacttttattgtataattatgaagccctaagtaaatctaaattaacttctattttcaagtggaaaccttgctgctatgctgttcattgatgacatgggattgagttggttacctattgctgtaaataaaaatagctataaatagtgaaaattttattgaatataatggcctcttaaaaattatctttaaaacttactatggtatatattttgaaaggagaaaaaaaaagccactaaggtcagtgttataaaatctgtattgctaagataattaaatgaaatacttgacaacatttttcattcctgctttttcatagataccattttgaaatattcacaaggttgctggcatttgctgcatttcaagttaattctcagaagtgaaaaagacttcaaatgttattcaataactattgctgctttctcttctacttcttgtgctttactctgaatttccagtgtggtcttgtttaatatttgttcctctaggtaaactagcaaaaggatgatttaacattaccaaatgcctttctagcaattgcttctctaaaacagcactatcgaggtatttggtaacttgctgtgaaatgactgcatcatgcatgcactcttttgagcagtaaatgtatattgatgtaactgtgtcaggattgaggatgaactcaggtttccggctactgacagtggtagagtcctaggacatctctgtaaaaagcaggtgactttcctatgacactcatcaggtaaactgatgctttcagatccatcggtttatactatttattaaaaccattctgcttggttccacaatcatctattgagtgtacatttatgtgtgaagcaaatttctagatatgagaaatataaaaataattaaaacaaaatccttgccttcaaacgaaatggctcggccaggcacggaggctcgtgcatgtaatcctagcactttgggaggctgagatgggaggatcacttgaggccaagagtttgagaccaacctgggtaacaaagtgagacctccctgtctctacaaaaaaaatcaaaaaattatctgatccttgtggcacacaactgtggtcccagctacaggggaggctgagacgcaaggatcacttgagcccagaagctcaaggctgcagtgagccaagttcacaccactgccatttcctcctgggcaacagagtgagaccctatcacaaaaaaaaagaaagaaaaaaagaaaatgactaaactgaaatggtcttagtcaaaaaatatatacagacttatttttagaatcatttcaacttatttccttcttacctggttcagaaacaagtttgtttcaactgtgagagtagttttaaaaataagttttcctgattggttaccaataaacaccaaacaaataaaggagggggaaaatatcacttgaggcttaacattgcaattaatttagaaatacgcacctcaatctcaagccagtttataactaccatagttttgagcaaaatttttcttctatttctccaaaaactcactcatttcagtattactcattgacactgggctccctaatagaaaagcagatattataatatttcattgaaatggttactaaagagaaaaagagattaacaacagttaatccaccttgatattataacactcaaggttaaattgcatgttgttattagaatcaatgttatatatatgattacaatgctgaagcatttctattgaatgagaaatagtgtttgccctaaacctttgggaaaaaaatacagatttgaaaactaaagaatgtgggaagtgtcattgtgtaatttggaaatgcataaaattctcattatgtcctcatagatatgttgaaagatggttcactgtttcaaagatagaatgtataatatgctgctagtaccaaggctgcatttgaactgaactactccttatgatataccatactaactgatgaaaatataaatgttaaaatgtctccactctaatgtattttgccttcacttgtaactctgcacatttcattatatattagggaaaagattacagattctacccccatatactcaatcttgatcagaatgtacattaatgttgcctgatagatgtcttttgactacctatatattacaaatgtgtatgtgtttttttcttccataagtatctattcaagtgtatactgtataggcaaatgtgtagctgtatatatgtacagacatgttctcatgcactttattcaatatttatatatttatatggacgaaaagcaagtcaatgaaaacactcagtatatacacatgtgtgcatgtttgtatcatgtttatttaaatgtgaattcatgttctaatatttctatgaccttccattgctgcaaagcagattaaagtgtaacaaaaatatcagctctttaaataaactggaaattaatctaattttgtggaagaactttaagacaagtctatgaggatggcgaaaacaatggtccacatatatagtttcttgatcctaaataaaatggtacctttgggccctttgtttagtctggcaattttctgactactatggctttttaaacagactcacacctaagtgaaacacagttgtcaaatgatttatggatctgtgattaaaggattcacttttaatgaatactattaaaacggagtaacaaaccttgctctactttaagttgaatgatagattcctctatattcaaaaaaaagcaattaactgccataattagggaaaactgtttaaagcatactgcatttacttggccacagcgccatctcatggtaattttttaaagtgctaccgtagccaaattgaactaagtcactgtactgctttcagcaaagggtgctcctcccatttgtgcatcaatgagacatatttataaagtgctaaattattctgtgccatatgtaacaaatacagtgaagattattttatgaacttattttaatcaaggcgatgctaaaagttttcaagaaaggataaataactgtaaataaagtagactc

SEQ ID NO: 102847 - DNA, 509 bp, Homo sapiens
  Payload ID: 66
  Gene Symbol: HTR2A
  Gene Name: 5-hydroxytryptamine (serotonin) receptor 2A, G protein-coupled
  ENST ID: ENST00000612998
  CDS Start-End: 1-333
tttaactccggagaagctaacacttctgatgcatttaactggacagtcgactctgaaaatcgaaccaacctttcctgtgaagggtgcctctcaccgtcgtgtctctccttacttcatctccaggaaaaaaactggtctgctttactgacagccgtagtgattattctaactattgctggaaacatactcgtcatcatggcagtgtccctagagaaaaagctgcagaatgccaccaactatttcctgatgtcacttgccatagctgatatgctgctgggtttccttgtcatgcccgtgtccatgttaaccatcctgtatggtgagtggcattagtttcccagctatattcgcactggtaataaagagcatgtgcatgccaccagcagatgagatggggctcagggggcaaacaaactataaatagaagtctttgtttatagactagagcctactatgttacttatattttactcttaaaatgggatttcacataaaaatcagacagtcta

SEQ ID NO: 102848 - DNA, 2246 bp, Homo sapiens
  Payload ID: 67
  Gene Symbol: HTR2B
  Gene Name: 5-hydroxytryptamine (serotonin) receptor 2B, G protein-coupled
  Uniprot ID: P41595
  ENST ID: ENST00000258400
  CDS Start-End: 514-1959
tatacaacgtatttgtttcactgctttcaaccgcctgtgctggaggctcagaataagtcaatgggaggaggatttcagtcacagcagcaagcaagtctagtgaacagataagatgacatgctcagcaaaataacaacgaaaccagagggggaactctctggcatgcaagttcaaacacgactctacaactacggcagaaaaagagagagagagaaactaaaaatatatatatatcctatttttttcacagctatcagtttctttcactgagctttcctaaatttaagcctctagaaaataataaatacttggatatcttacctacaaacatggacagatgtgtgtatgcgctcattttagagaacttgaatttttttttttaaaggaaggtgtcaactttggcttttgagtgtttggcatggttacaatgccttaaaaaaacagatgagcagcttagctactaaccatgctgaccactgttcggaacgggattgaatcacagaaaaacagcaaatggctctctcttacagagtgtctgaacttcaaagcacaattcctgagcacattttgcagagcacctttgttcacgttatctcttctaactggtctggattacagacagaatcaataccagaggaaatgaaacagattgttgaggaacagggaaataaactgcactgggcagctcttctgatactcatggtgataatacccacaattggtggaaatacccttgttattctggctgtttcactggagaagaagctgcagtatgctactaattactttctaatgtccttggcggtggctgatttgctggttggattgtttgtgatgccaattgccctcttgacaataatgtttgaggctatgtggcccctcccacttgttctatgtcctgcctggttatttcttgacgttctcttttcaaccgcatccatcatgcatctctgtgccatttcagtggatcgttacatagccatcaaaaagccaatccaggccaatcaatataactcacgggctacagcattcatcaagattacagtggtgtggttaatttcaataggcattgccattccagtccctattaaagggatagagactgatgtggacaacccaaacaatatcacttgtgtgctgacaaaggaacgttttggcgatttcatgctctttggctcactggctgccttcttcacacctcttgcaattatgattgtcacctactttctcactatccatgctttacagaagaaggcttacttagtcaaaaacaagccacctcaacgcctaacatggttgactgtgtctacagttttccaaagggatgaaacaccttgctcgtcaccggaaaaggtggcaatgctggatggttctcgaaaggacaaggctctgcccaactcaggtgatgaaacacttatgcgaagaacatccacaattgggaaaaagtcagtgcagaccatttccaacgaacagagagcctcaaaggtcctagggattgtgtttttcctctttttgcttatgtggtgtcccttctttattacaaatataactttagttttatgtgattcctgtaaccaaactactctccaaatgctcctggagatatttgtgtggataggctatgtttcctcaggagtgaatcctttggtctacaccctcttcaataagacatttcgggatgcatttggccgatatatcacctgcaattaccgggccacaaagtcagtaaaaactctcagaaaacgctccagtaagatctacttccggaatccaatggcagagaactctaagtttttcaagaaacatggaattcgaaatgggattaaccctgccatgtaccagagtccaatgaggctccgaagttcaaccattcagtcttcatcaatcattctactagatacgcttctcctcactgaaaatgaaggtgacaaaactgaagagcaagttagttatgtatagcagaactggcagttgtcatcaaacataatgatgagtaagatgatgaatgagatgtaaatgtgccaagaatatattatataaagaattttatgtcatatatcaaatcatctctttaacctaagatgtaagtattaagaatatctaattttcctaatttggacaagattattccatgaggaaaataattttatatagctacaaatgaaaacaatccagcactctggttaaattttaaggtattcgaatgaaataaagtcaaatcaataaatttcaggctttaaaaagaa

SEQ ID NO: 102849 - DNA, 4751 bp, Homo sapiens
  Payload ID: 68
  Gene Symbol: HTR2C
  Gene Name: 5-hydroxytryptamine (serotonin) receptor 2C, G protein-coupled
  Uniprot ID: P28335
  ENST ID: ENST00000276198
  CDS Start-End: 729-2105
acccgcgcgaggtaggcgctctggtgcttgccgaggacgcttccttcctcagatgcaccgatcttcccgatactgcctttggagcggctagattgctagccttggctgctccattggcctgccttgccccttacctgccgattgcatatgaactcttcttctgtctgtacatcgttgtcgtcggagtcgtcgcgatcgtcgtggcgctcgtgtgatggccttcgtccgtttagagtagtgtagttagttaggggccaacgaagaagaaagaagacgcgattagtgcagagatgctggaggtggtcagttactaagctagagtaagatagcggagcgaaaagagccaaacctagccggggggcgcacggtcacccaaaggaggtcgactcgccggcgcttcctatcgcgccgagctccctccattcctctccctccgccgaggcgcgaggttgcggcgcgcagcgcagcgcagctcagcgcaccgactgccgcgggctccgctgggcgattgcagccgagtccgtttctcgtctagctgccgccgcggcgaccgctgcctggtcttcctcccggacgctagtgggttatcagctaacacccgcgagcatctataacataggccaactgacgccatccttcaaaaacaactaaaggatgatatgatgaacctagcctgttaatttcgtcttctcaattttaaactttggttgcttaagactgaagcaatcatggtgaacctgaggaatgcggtgcattcattccttgtgcacctaattggcctattggtttggcaatctgatatttctgtgagcccagtagcagctatagtaactgacattttcaatacctccgatggtggacgcttcaaattcccagacggggtacaaaactggccagcactttcaatcgtcatcataataatcatgacaataggtggcaacatccttgtgatcatggcagtaagcatggaaaagaaactgcacaatgccaccaattacttcttaatgtccctagccattgctgatatgctagtgggactacttgtcatgcccctgtctctcctggcaatcctttatgattatgtctggccactacctagatatttgtgccccgtctggatttctttagatgttttattttcaacagcgtccatcatgcacctctgcgctatatcgctggatcggtatgtagcaatacgtaatcctattgagcatagccgtttcaattcgcggactaaggccatcatgaagattgctattgtttgggcaatttctataggtgtatcagttcctatccctgtgattggactgagggacgaagaaaaggtgttcgtgaacaacacgacgtgcgtgctcaacgacccaaatttcgttcttattgggtccttcgtagctttcttcataccgctgacgattatggtgattacgtattgcctgaccatctacgttctgcgccgacaagctttgatgttactgcacggccacaccgaggaaccgcctggactaagtctggatttcctgaagtgctgcaagaggaatacggccgaggaagagaactctgcaaaccctaaccaagaccagaacgcacgccgaagaaagaagaaggagagacgtcctaggggcaccatgcaggctatcaacaatgaaagaaaagcttcgaaagtccttgggattgttttctttgtgtttctgatcatgtggtgcccatttttcattaccaatattctgtctgttctttgtgagaagtcctgtaaccaaaagctcatggaaaagcttctgaatgtgtttgtttggattggctatgtttgttcaggaatcaatcctctggtgtatactctgttcaacaaaatttaccgaagggcattctccaactatttgcgttgcaattataaggtagagaaaaagcctcctgtcaggcagattccaagagttgccgccactgctttgtctgggagggagcttaatgttaacatttatcggcataccaatgaaccggtgatcgagaaagccagtgacaatgagcccggtatagagatgcaagttgagaatttagagttaccagtaaatccctccagtgtggttagcgaaaggattagcagtgtgtgagaaagaacagcacagtcttttcctacggtacaagctacatatgtaggaaaattttcttctttaatttttctgttggtcttaactaatgtaaatattgctgtctgaaaaagtgtttttacatatagctttgcaaccttgtactttacaatcatgcctacattagtgagatttagggttctatatttactgtttataataggtggagactaacttattttgattgtttgatgaataaaatgtttatttttgctctccctcccttctttccttccttttttcctttcttccttcctttctctctttcttttgtgcatatggcaacgttcatgttcatctcaggtggcatttgcaggtgaccagaatgaggcacatgacagtggttatatttcaaccacacctaaattaacaaattcagtggacatttgttctgggttaacagtaaatatacactttacattcttgctctgctcatctacacatataaacacagtaagataggttctgctttctgatacatctgtcagtgagtcagaggcagaacctagtcttgttgttcatataggggcaaaaatttgacattgtcagaatgttgtgttggtatttactgcaatgtctgtccctaaacatagtggtattttaacatagcagctggttaaccgggactacagaagtggaaggataatgagatgtaatacaccaaatagcttttcacttcttaaggacagtgttcaaattctgattattacaacaagcaaactgaaattagtgttttcattctggtccttagtaaattcctaattctatgattaaactgggaaatgagatcccagagttatttcccaacccaggattcaacatcaattgggttttgatctcagcatcctggaaatttgtgtgcttcacacaaagtgaaattagtattttgagccttattaaaatattttcttaattatggtacctctgtctataggacttaatttagcagtccatttttgagtaaaacttgtattggaagtatagatggtagaaactttggaagttttacttgattaaggactacagaattgggcccttagaatgtgaaaaaaaaaagtaattaaaaagacacttttaccgaactcgggattacagaaacacggagtttccatttggattttaaacaaaatttatgtcattttcagatccttccaaactctctagtgcaggaaaaggctgcagctaatttgtgaaagtggcaagctcttcattgcactgcagttatttaccagaagtttaaatctttgttaaaatatagtgttgtgttacaataagtgttggccatcatttcattcgtgggcctgctgctctctaagaattcagtagcattttaatagtttctaaaccatgaaaagttttcaagcattgctaaagtcaggccattcagtctatgctgtgtgcagagtatacaagtgtttctagtaacagtatttccatacgtgcccatttcacacaactgtggataaattttggaagaattcatgatgctagttcttacgcttgacagttacttacacacctgagaatgtgcctctcagtatcttaaaattggttaatgaaaaatctgaatttctaaaacccttggtctgtgttctcaacacacagtatagataaatccaatagtctgccacaagggcagtggaagagctgctgtatttgaggaaactcatacagtctctatttgatttgcaacactgccaaacatcagtcaattgcttgagcatgcccaaatataacatgaaagtcaagtctacctgccttgcctgttaggtctgttgaagtgcatgttaaaataattatatgaagcagaatgagatgatttaattcttaccgaaatgaaaatggctgaagaaacacagcatgcatttagcatgagttctgcacatacagatggtgtcctgcatgtatgccatgtatgttgcatgaatccatcgatttgtattaatgtagggcagaatagctgatagaagaaggactgaagaaaatccttcagcaatccttaaaaagaccatgcattcagatctgaagtagtgtgagtgttagaaaaaactggaaacatctgatttctgaactatcagggcaagctcatagcacatgttttacaaagaaacaaaatataaatcacagatttccaaaagtactagcaataagttgaatgataatagctcacagcacatttgttaatgattcttgtgtcatcaagtagtagtacttaatagtacccaacctggtaattatcctcaagttgtgtgctattcgtaagttctgtgcagtttggtatgaaacaaatatactcatttggatataaatcttacccttcaatgttaaatctacaaacttttataaatgttttaaagaagtccatgtgataattgtaaaggtgatgaatttaccatcaaacaaatcattttgatgtattattatatatgtatatctgtgtaagacacgtgcaacagactgccttatattattttctgtaattcttctcctttgtcaaatggtattttttgtgaatggttgcaaagtgttgtcttattcctaattcctgtatgttatccactacaggttttatgagacttcctattaatttattaaatttattaaatgttg

SEQ ID NO: 102850 - DNA, 4652 bp, Homo sapiens
  Payload ID: 68
  Gene Symbol: HTR2C
  Gene Name: 5-hydroxytryptamine (serotonin) receptor 2C, G protein-coupled
  Uniprot ID: P28335
  ENST ID: ENST00000371950
  CDS Start-End: 725-1471
gcgcgaggtaggcgctctggtgcttgccgaggacgcttccttcctcagatgcaccgatcttcccgatactgcctttggagcggctagattgctagccttggctgctccattggcctgccttgccccttacctgccgattgcatatgaactcttcttctgtctgtacatcgttgtcgtcggagtcgtcgcgatcgtcgtggcgctcgtgtgatggccttcgtccgtttagagtagtgtagttagttaggggccaacgaagaagaaagaagacgcgattagtgcagagatgctggaggtggtcagttactaagctagagtaagatagcggagcgaaaagagccaaacctagccggggggcgcacggtcacccaaaggaggtcgactcgccggcgcttcctatcgcgccgagctccctccattcctctccctccgccgaggcgcgaggttgcggcgcgcagcgcagcgcagctcagcgcaccgactgccgcgggctccgctgggcgattgcagccgagtccgtttctcgtctagctgccgccgcggcgaccgctgcctggtcttcctcccggacgctagtgggttatcagctaacacccgcgagcatctataacataggccaactgacgccatccttcaaaaacaactaaaggatgatatgatgaacctagcctgttaatttcgtcttctcaattttaaactttggttgcttaagactgaagcaatcatggtgaacctgaggaatgcggtgcattcattccttgtgcacctaattggcctattggtttggcaatctgatatttctgtgagcccagtagcagctatagtaactgacattttcaatacctccgatggtggacgcttcaaattcccagacggggtacaaaactggccagcactttcaatcgtcatcataataatcatgacaataggtggcaacatccttgtgatcatggcagtaagcatggaaaagaaactgcacaatgccaccaattacttcttaatgtccctagccattgctgatatgctagtgggactacttgtcatgcccctgtctctcctggcaatcctttatgattatgtctggccactacctagatatttgtgccccgtctggatttctttagatgttttattttcaacagcgtccatcatgcacctctgcgctatatcgctggatcggtgtatcagttcctatccctgtgattggactgagggacgaagaaaaggtgttcgtgaacaacacgacgtgcgtgctcaacgacccaaatttcgttcttattgggtccttcgtagctttcttcataccgctgacgattatggtgattacgtattgcctgaccatctacgttctgcgccgacaagctttgatgttactgcacggccacaccgaggaaccgcctggactaagtctggatttcctgaagtgctgcaagaggaatacggccgaggaagagaactctgcaaaccctaaccaagaccagaacgcacgccgaagaaagaagaaggagagacgtcctaggggcaccatgcaggctatcaacaatgaaagaaaagcttcgaaagtccttgggattgttttctttgtgtttctgatcatgtggtgcccatttttcattaccaatattctgtctgttctttgtgagaagtcctgtaaccaaaagctcatggaaaagcttctgaatgtgtttgtttggattggctatgtttgttcaggaatcaatcctctggtgtatactctgttcaacaaaatttaccgaagggcattctccaactatttgcgttgcaattataaggtagagaaaaagcctcctgtcaggcagattccaagagttgccgccactgctttgtctgggagggagcttaatgttaacatttatcggcataccaatgaaccggtgatcgagaaagccagtgacaatgagcccggtatagagatgcaagttgagaatttagagttaccagtaaatccctccagtgtggttagcgaaaggattagcagtgtgtgagaaagaacagcacagtcttttcctacggtacaagctacatatgtaggaaaattttcttctttaatttttctgttggtcttaactaatgtaaatattgctgtctgaaaaagtgtttttacatatagctttgcaaccttgtactttacaatcatgcctacattagtgagatttagggttctatatttactgtttataataggtggagactaacttattttgattgtttgatgaataaaatgtttatttttgctctccctcccttctttccttccttttttcctttcttccttcctttctctctttcttttgtgcatatggcaacgttcatgttcatctcaggtggcatttgcaggtgaccagaatgaggcacatgacagtggttatatttcaaccacacctaaattaacaaattcagtggacatttgttctgggttaacagtaaatatacactttacattcttgctctgctcatctacacatataaacacagtaagataggttctgctttctgatacatctgtcagtgagtcagaggcagaacctagtcttgttgttcatataggggcaaaaatttgacattgtcagaatgttgtgttggtatttactgcaatgtctgtccctaaacatagtggtattttaacatagcagctggttaaccgggactacagaagtggaaggataatgagatgtaatacaccaaatagcttttcacttcttaaggacagtgttcaaattctgattattacaacaagcaaactgaaattagtgttttcattctggtccttagtaaattcctaattctatgattaaactgggaaatgagatcccagagttatttcccaacccaggattcaacatcaattgggttttgatctcagcatcctggaaatttgtgtgcttcacacaaagtgaaattagtattttgagccttattaaaatattttcttaattatggtacctctgtctataggacttaatttagcagtccatttttgagtaaaacttgtattggaagtatagatggtagaaactttggaagttttacttgattaaggactacagaattgggcccttagaatgtgaaaaaaaaaagtaattaaaaagacacttttaccgaactcgggattacagaaacacggagtttccatttggattttaaacaaaatttatgtcattttcagatccttccaaactctctagtgcaggaaaaggctgcagctaatttgtgaaagtggcaagctcttcattgcactgcagttatttaccagaagtttaaatctttgttaaaatatagtgttgtgttacaataagtgttggccatcatttcattcgtgggcctgctgctctctaagaattcagtagcattttaatagtttctaaaccatgaaaagttttcaagcattgctaaagtcaggccattcagtctatgctgtgtgcagagtatacaagtgtttctagtaacagtatttccatacgtgcccatttcacacaactgtggataaattttggaagaattcatgatgctagttcttacgcttgacagttacttacacacctgagaatgtgcctctcagtatcttaaaattggttaatgaaaaatctgaatttctaaaacccttggtctgtgttctcaacacacagtatagataaatccaatagtctgccacaagggcagtggaagagctgctgtatttgaggaaactcatacagtctctatttgatttgcaacactgccaaacatcagtcaattgcttgagcatgcccaaatataacatgaaagtcaagtctacctgccttgcctgttaggtctgttgaagtgcatgttaaaataattatatgaagcagaatgagatgatttaattcttaccgaaatgaaaatggctgaagaaacacagcatgcatttagcatgagttctgcacatacagatggtgtcctgcatgtatgccatgtatgttgcatgaatccatcgatttgtattaatgtagggcagaatagctgatagaagaaggactgaagaaaatccttcagcaatccttaaaaagaccatgcattcagatctgaagtagtgtgagtgttagaaaaaactggaaacatctgatttctgaactatcagggcaagctcatagcacatgttttacaaagaaacaaaatataaatcacagatttccaaaagtactagcaataagttgaatgataatagctcacagcacatttgttaatgattcttgtgtcatcaagtagtagtacttaatagtacccaacctggtaattatcctcaagttgtgtgctattcgtaagttctgtgcagtttggtatgaaacaaatatactcatttggatataaatcttacccttcaatgttaaatctacaaacttttataaatgttttaaagaagtccatgtgataattgtaaaggtgatgaatttaccatcaaacaaatcattttgatgtattattatatatgtatatctgtgtaagacacgtgcaacagactgccttatattattttctgtaattcttctcctttgtcaaatggtattttttgtgaatggttgcaaagtgttgtcttattcctaattcctgtatgttatccactacaggttttatgagacttcctattaatttattaaatttattaaatgttg

SEQ ID NO: 102851 - DNA, 3288 bp, Homo sapiens
  Payload ID: 68
  Gene Symbol: HTR2C
  Gene Name: 5-hydroxytryptamine (serotonin) receptor 2C, G protein-coupled
  Uniprot ID: P28335
  ENST ID: ENST00000371951
  CDS Start-End: 820-2196
acccgcgcgaggtaggcgctctggtgcttgccgaggacgcttccttcctcagatgcaccgatcttcccgatactgcctttggagcggctagattgctagccttggctgctccattggcctgccttgccccttacctgccgattgcatatgaactcttcttctgtctgtacatcgttgtcgtcggagtcgtcgcgatcgtcgtggcgctcgtgtgatggccttcgtccgtttagagtagtgtagttagttaggggccaacgaagaagaaagaagacgcgattagtgcagagatgctggaggtggtcagttactaagctagagtaagatagcggagcgaaaagagccaaacctagccggggggcgcacggtcacccaaaggaggtcgactcgccggcgcttcctatcgcgccgagctccctccattcctctccctccgccgaggcgcgaggttgcggcgcgcagcgcagcgcagctcagcgcaccgactgccgcgggctccgctgggcgattgcagccgagtccgtttctcgtctagctgccgccgcggcgaccgctgcctggtcttcctcccggacgctagtgggttatcagctaacacccgcgagcatctataacataggccaactgacgccatccttcaaaaacaactgtctgggaaaaaaagaataaaaagtagtgtgagagcagaaaacgtgattgaaacacgaccaatctttcttcagtgccaaagggtggaaaagaaaggatgatatgatgaacctagcctgttaatttcgtcttctcaattttaaactttggttgcttaagactgaagcaatcatggtgaacctgaggaatgcggtgcattcattccttgtgcacctaattggcctattggtttggcaatctgatatttctgtgagcccagtagcagctatagtaactgacattttcaatacctccgatggtggacgcttcaaattcccagacggggtacaaaactggccagcactttcaatcgtcatcataataatcatgacaataggtggcaacatccttgtgatcatggcagtaagcatggaaaagaaactgcacaatgccaccaattacttcttaatgtccctagccattgctgatatgctagtgggactacttgtcatgcccctgtctctcctggcaatcctttatgattatgtctggccactacctagatatttgtgccccgtctggatttctttagatgttttattttcaacagcgtccatcatgcacctctgcgctatatcgctggatcggtatgtagcaatacgtaatcctattgagcatagccgtttcaattcgcggactaaggccatcatgaagattgctattgtttgggcaatttctataggtgtatcagttcctatccctgtgattggactgagggacgaagaaaaggtgttcgtgaacaacacgacgtgcgtgctcaacgacccaaatttcgttcttattgggtccttcgtagctttcttcataccgctgacgattatggtgattacgtattgcctgaccatctacgttctgcgccgacaagctttgatgttactgcacggccacaccgaggaaccgcctggactaagtctggatttcctgaagtgctgcaagaggaatacggccgaggaagagaactctgcaaaccctaaccaagaccagaacgcacgccgaagaaagaagaaggagagacgtcctaggggcaccatgcaggctatcaacaatgaaagaaaagcttcgaaagtccttgggattgttttctttgtgtttctgatcatgtggtgcccatttttcattaccaatattctgtctgttctttgtgagaagtcctgtaaccaaaagctcatggaaaagcttctgaatgtgtttgtttggattggctatgtttgttcaggaatcaatcctctggtgtatactctgttcaacaaaatttaccgaagggcattctccaactatttgcgttgcaattataaggtagagaaaaagcctcctgtcaggcagattccaagagttgccgccactgctttgtctgggagggagcttaatgttaacatttatcggcataccaatgaaccggtgatcgagaaagccagtgacaatgagcccggtatagagatgcaagttgagaatttagagttaccagtaaatccctccagtgtggttagcgaaaggattagcagtgtgtgagaaagaacagcacagtcttttcctacggtacaagctacatatgtaggaaaattttcttctttaatttttctgttggtcttaactaatgtaaatattgctgtctgaaaaagtgtttttacatatagctttgcaaccttgtactttacaatcatgcctacattagtgagatttagggttctatatttactgtttataataggtggagactaacttattttgattgtttgatgaataaaatgtttatttttgctctccctcccttctttccttccttttttcctttcttccttcctttctctctttcttttgtgcatatggcaacgttcatgttcatctcaggtggcatttgcaggtgaccagaatgaggcacatgacagtggttatatttcaaccacacctaaattaacaaattcagtggacatttgttctgggttaacagtaaatatacactttacattcttgctctgctcatctacacatataaacacagtaagataggttctgctttctgatacatctgtcagtgagtcagaggcagaacctagtcttgttgttcatataggggcaaaaatttgacattgtcagaatgttgtgttggtatttactgcaatgtctgtccctaaacatagtggtattttaacatagcagctggttaaccgggactacagaagtggaaggataatgagatgtaatacaccaaatagcttttcacttcttaaggacagtgttcaaattctgattattacaacaagcaaactgaaattagtgttttcattctggtccttagtaaattcctaattctatgattaaactgggaaatgagatcccagagttatttcccaacccaggattcaacatcaattgggttttgatctcagcatcctggaaatttgtgtgcttcacacaaagtgaaattagtattttgagccttattaaaatattttcttaattatggtacctctgtctataggacttaatttagcagtccatttttgagtaaaacttgtattggaagtatagatggtagaaactttggaagttttacttgattaaggactacagaattgggcccttagaatgtgaaaaaaaaaa

SEQ ID NO: 102852 - DNA, 1994 bp, Homo sapiens
  Payload ID: 69
  Gene Symbol: HTR3A
  Gene Name: 5-hydroxytryptamine (serotonin) receptor 3A, ionotropic
  Uniprot ID: P46098
  ENST ID: ENST00000299961
  CDS Start-End: 56-1447
agctgtcttgtgccacttgctcttccaagccagatctctgctttcctgtcaatgaatgcataggtcctttctacaagccaggaggagccgaaacaccaccaggcccgctctgctgaggctgtcggattaccttttgaccaactacaggaagggtgtgcgccccgtgagggactggaggaagccaaccaccgtatccattgacgtcattgtctatgccatcctcaacgtggatgagaagaatcaggtgctgaccacctacatctggtaccggcagtactggactgatgagtttctccagtggaaccctgaggactttgacaacatcaccaagttgtccatccccacggacagcatctgggtcccggacattctcatcaatgagttcgtggatgtggggaagtctccaaatatcccgtacgtgtatattcggcatcaaggcgaagttcagaactacaagccccttcaggtggtgactgcctgtagcctcgacatctacaacttccccttcgatgtccagaactgctcgctgaccttcaccagttggctgcacaccatccaggacatcaacatctctttgtggcgcttgccagaaaaggtgaaatccgacaggagtgtcttcatgaaccagggagagtgggagttgctgggggtgctgccctactttcgggagttcagcatggaaagcagtaactactatgcagaaatgaagttctatgtggtcatccgccggcggcccctcttctatgtggtcagcctgctactgcccagcatcttcctcatggtcatggacatcgtgggcttctacctgccccccaacagtggcgagagggtctctttcaagattacactcctcctgggctactcggtcttcctgatcatcgtttctgacacgctgccggccactgccatcggcactcctctcattggtgtctactttgtggtgtgcatggctctgctggtgataagtttggccgagaccatcttcattgtgcggctggtgcacaagcaagacctgcagcagcccgtgcctgcttggctgcgtcacctggttctggagagaatcgcctggctactttgcctgagggagcagtcaacttcccagaggcccccagccacctcccaagccaccaagactgatgactgctcagccatgggaaaccactgcagccacatgggaggaccccaggacttcgagaagagcccgagggacagatgtagccctcccccaccacctcgggaggcctcgctggcggtgtgtgggctgctgcaggagctgtcctccatccggcaattcctggaaaagcgggatgagatccgagaggtggcccgagactggctgcgcgtgggctccgtgctggacaagctgctattccacatttacctgctagcggtgctggcctacagcatcaccctggttatgctctggtccatctggcagtacgcttgagtgggtacagcccagtggaggagggggtacagtcctggttaggtggggacagaggatttctgcttaggcccctcaggacccagggaatgccagggacattttcaagacacagacaaagtcccgtgccctgtttccaatgccaattcatctcagcaatcacaagccaaggtctgaacccttccaccaaaaactgggtgttcaaggcccttacacccttgtcccacccccagcagctcaccatggctttaaaacatgctgtcttagatcaggagaaactcgggcactccctaagtccactctagttgtggacttttccccattgaccctcacctgaataagggactttggaattctgcttctctttcacaactttgcttttaggttgaaggcaaaaccaactctctactacacaggcctgataactctgtacgaggcttctctaacccctagtgtcttttttttcttcacctcacttgtggcagcttccctgaacactcatcccccatcagatgatgggagtgggaagaataaaatgcagtgaaaccct

SEQ ID NO: 102853 - DNA, 2331 bp, Homo sapiens
  Payload ID: 69
  Gene Symbol: HTR3A
  Gene Name: 5-hydroxytryptamine (serotonin) receptor 3A, ionotropic
  Uniprot ID: P46098
  ENST ID: ENST00000355556
  CDS Start-End: 234-1784
ctctcagctgtcccctcccctttcctcccgcctgaaacatgatccagctgaaggactgattgcaggaaaacttggcagctccccaaccttggtggcccagggagtgtgaggctgcagcctcagaaggtgtgagcagtggccacgagaggcaggctggctgggacatgaggttggcagagggcaggcaagctggcccttggtgggcctcgtcctgagcactcggaggcactcctatgcttggaaagctcgctatgctgctgtgggtccagcaggcgctgctcgccttgctcctccccacactcctggcacagggagaagccaggaggagccgaaacaccaccaggcccgctctgctgaggctgtcggattaccttttgaccaactacaggaagggtgtgcgccccgtgagggactggaggaagccaaccaccgtatccattgacgtcattgtctatgccatcctcaacgtggatgagaagaatcaggtgctgaccacctacatctggtaccggcagtactggactgatgagtttctccagtggaaccctgaggactttgacaacatcaccaagttgtccatccccacggacagcatctgggtcccggacattctcatcaatgagttcgtggatgtggggaagtctccaaatatcccgtacgtgtatattcggcatcaaggcgaagttcagaactacaagccccttcaggtggtgactgcctgtagcctcgacatctacaacttccccttcgatgtccagaactgctcgctgaccttcaccagttggctgcacaccatccaggacatcaacatctctttgtggcgcttgccagaaaaggtgaaatccgacaggagtgtcttcatgaaccagggagagtgggagttgctgggggtgctgccctactttcgggagttcagcatggaaagcagtaactactatgcagaaatgaagttctatgtggtcatccgccggcggcccctcttctatgtggtcagcctgctactgcccagcatcttcctcatggtcatggacatcgtgggcttctacctgccccccaacagtggcgagagggtctctttcaagattacactcctcctgggctactcggtcttcctgatcatcgtttctgacacgctgccggccactgccatcggcactcctctcattggtaaggcccctcctggcagcagagctcagtctggtgagaaacccgccccctcccacctcctgcatgtgtctcttgcctctgccctgggctgcacaggtgtctactttgtggtgtgcatggctctgctggtgataagtttggccgagaccatcttcattgtgcggctggtgcacaagcaagacctgcagcagcccgtgcctgcttggctgcgtcacctggttctggagagaatcgcctggctactttgcctgagggagcagtcaacttcccagaggcccccagccacctcccaagccaccaagactgatgactgctcagccatgggaaaccactgcagccacatgggaggaccccaggacttcgagaagagcccgagggacagatgtagccctcccccaccacctcgggaggcctcgctggcggtgtgtgggctgctgcaggagctgtcctccatccggcaattcctggaaaagcgggatgagatccgagaggtggcccgagactggctgcgcgtgggctccgtgctggacaagctgctattccacatttacctgctagcggtgctggcctacagcatcaccctggttatgctctggtccatctggcagtacgcttgagtgggtacagcccagtggaggagggggtacagtcctggttaggtggggacagaggatttctgcttaggcccctcaggacccagggaatgccagggacattttcaagacacagacaaagtcccgtgccctgtttccaatgccaattcatctcagcaatcacaagccaaggtctgaacccttccaccaaaaactgggtgttcaaggcccttacacccttgtcccacccccagcagctcaccatggctttaaaacatgctgtcttagatcaggagaaactcgggcactccctaagtccactctagttgtggacttttccccattgaccctcacctgaataagggactttggaattctgcttctctttcacaactttgcttttaggttgaaggcaaaaccaactctctactacacaggcctgataactctgtacgaggcttctctaacccctagtgtcttttttttcttcacctcacttgtggcagcttccctgaacactcatcccccatcagatgatgggagtgggaagaataaaatgcagtgaaaccct

SEQ ID NO: 102854 - DNA, 2235 bp, Homo sapiens
  Payload ID: 69
  Gene Symbol: HTR3A
  Gene Name: 5-hydroxytryptamine (serotonin) receptor 3A, ionotropic
  Uniprot ID: P46098
  ENST ID: ENST00000375498
  CDS Start-End: 234-1688
ctctcagctgtcccctcccctttcctcccgcctgaaacatgatccagctgaaggactgattgcaggaaaacttggcagctccccaaccttggtggcccagggagtgtgaggctgcagcctcagaaggtgtgagcagtggccacgagaggcaggctggctgggacatgaggttggcagagggcaggcaagctggcccttggtgggcctcgtcctgagcactcggaggcactcctatgcttggaaagctcgctatgctgctgtgggtccagcaggcgctgctcgccttgctcctccccacactcctggcacagggagaagccaggaggagccgaaacaccaccaggcccgctctgctgaggctgtcggattaccttttgaccaactacaggaagggtgtgcgccccgtgagggactggaggaagccaaccaccgtatccattgacgtcattgtctatgccatcctcaacgtggatgagaagaatcaggtgctgaccacctacatctggtaccggcagtactggactgatgagtttctccagtggaaccctgaggactttgacaacatcaccaagttgtccatccccacggacagcatctgggtcccggacattctcatcaatgagttcgtggatgtggggaagtctccaaatatcccgtacgtgtatattcggcatcaaggcgaagttcagaactacaagccccttcaggtggtgactgcctgtagcctcgacatctacaacttccccttcgatgtccagaactgctcgctgaccttcaccagttggctgcacaccatccaggacatcaacatctctttgtggcgcttgccagaaaaggtgaaatccgacaggagtgtcttcatgaaccagggagagtgggagttgctgggggtgctgccctactttcgggagttcagcatggaaagcagtaactactatgcagaaatgaagttctatgtggtcatccgccggcggcccctcttctatgtggtcagcctgctactgcccagcatcttcctcatggtcatggacatcgtgggcttctacctgccccccaacagtggcgagagggtctctttcaagattacactcctcctgggctactcggtcttcctgatcatcgtttctgacacgctgccggccactgccatcggcactcctctcattggtgtctactttgtggtgtgcatggctctgctggtgataagtttggccgagaccatcttcattgtgcggctggtgcacaagcaagacctgcagcagcccgtgcctgcttggctgcgtcacctggttctggagagaatcgcctggctactttgcctgagggagcagtcaacttcccagaggcccccagccacctcccaagccaccaagactgatgactgctcagccatgggaaaccactgcagccacatgggaggaccccaggacttcgagaagagcccgagggacagatgtagccctcccccaccacctcgggaggcctcgctggcggtgtgtgggctgctgcaggagctgtcctccatccggcaattcctggaaaagcgggatgagatccgagaggtggcccgagactggctgcgcgtgggctccgtgctggacaagctgctattccacatttacctgctagcggtgctggcctacagcatcaccctggttatgctctggtccatctggcagtacgcttgagtgggtacagcccagtggaggagggggtacagtcctggttaggtggggacagaggatttctgcttaggcccctcaggacccagggaatgccagggacattttcaagacacagacaaagtcccgtgccctgtttccaatgccaattcatctcagcaatcacaagccaaggtctgaacccttccaccaaaaactgggtgttcaaggcccttacacccttgtcccacccccagcagctcaccatggctttaaaacatgctgtcttagatcaggagaaactcgggcactccctaagtccactctagttgtggacttttccccattgaccctcacctgaataagggactttggaattctgcttctctttcacaactttgcttttaggttgaaggcaaaaccaactctctactacacaggcctgataactctgtacgaggcttctctaacccctagtgtcttttttttcttcacctcacttgtggcagcttccctgaacactcatcccccatcagatgatgggagtgggaagaataaaatgcagtgaaaccct

SEQ ID NO: 102855 - DNA, 1385 bp, Homo sapiens
  Payload ID: 69
  Gene Symbol: HTR3A
  Gene Name: 5-hydroxytryptamine (serotonin) receptor 3A, ionotropic
  ENST ID: ENST00000510849
  CDS Start-End: 41-757
ctgagcactcggaggcactcctatgcttggaaagctcgctatgctgctgtgggtccagcaggcgctgctcgccttgctcctccccacactcctggcacagggagaagccaggaggagccgaaacaccaccaggcccgctctgctgaggctgtcggattaccttttgaccaactacaggaagggtgtgcgccccgtgagggactggaggaagccaaccaccgtatccattgacgtcattgtctatgccatcctcaacgtggatgagaagaatcaggtgctgaccacctacatctggtaccggcagtactggactgatgagtttctccagtggaaccctgaggactttgacaacatcaccaagttgtccatccccacggacagcatctgggtcccggacattctcatcaatgagttcgtggatgtggggaagtctccaaatatcccgtacgtgtatattcggcatcaaggcgaagttcagaactacaagccccttcaggtggtgactgcctgtagcctcgacatctacaacttccccttcgatgtccagaactgctcgctgaccttcaccagttggctgcacaccagtggtcatccgccggcggcccctcttctatgtggtcagcctgctactgcccagcatcttcctcatggtcatggacatcgtgggcttctacctgccccccaacagtggcgagagggtctctttcaagattacactcctcctgggctactcggtcttcctgatcatcgtttctgacacgctgccggccactgccatcggcactcctctcattggtgtctactttgtggtgtgcatggctctgctggtgataagtttggccgagaccatcttcattgtgcggctggtgcacaagcaagacctgcagcagcccgtgcctgcttggctgcgtcacctggttctggagagaatcgcctggctactttgcctgagggagcagtcaacttcccagaggcccccagccacctcccaagccaccaagactgatgactgctcagccatgggaaaccactgcagccacatgggaggaccccaggacttcgagaagagcccgagggacagatgtagccctcccccaccacctcgggaggcctcgctggcggtgtgtgggctgctgcaggagctgtcctccatccggcaattcctggaaaagcgggatgagatccgagaggtggcccgagactggctgcgcgtgggctccgtgctggacaagctgctattccacatttacctgctagcggtgctggcctacagcatcaccctggttatgctctggtccatctggcagtacgcttgagtgggtacagcccagtggaggagggggtacagtcctggttaggtggggacagaggatttctgcttaggc

SEQ ID NO: 102856 - DNA, 2432 bp, Homo sapiens
  Payload ID: 69
  Gene Symbol: HTR3A
  Gene Name: 5-hydroxytryptamine (serotonin) receptor 3A, ionotropic
  Uniprot ID: P46098
  ENST ID: ENST00000504030
  CDS Start-End: 446-1882
acatacttgccaagggacatcaatgaaagcagcagcgtggtgcacctcccaggggtcaggctgcacccttgtctcatgggcttctgcagcccctgtccccacctaagttactccttggggaaacatggccaagccccctggctgaatgggtggactgagctcccacagcatgacatcagctagggcgggctcccctctcagctgtcccctcccctttcctcccgcctgaaacatgatccagctgaaggactgattgcaggaaaacttggcagctccccaaccttggtggcccagggagtgtgaggctgcagcctcagaaggtgtgagcagtggccacgagaggcaggctggctgggacatgaggttggcagagggcaggcaagctggcccttggtgggcctcgtcctgagcactcggaggcactcctatgcttggaaagctcgctatgctgctgtgggtccagcaggcgctgctcgccttgctcctccccacactcctggcacagggagaagccaggaggagccgaaacaccaccaggcccgctctgctgaggctgtcggattaccttttgaccaactacaggaagggtgtgcgccccgtgagggactggaggaagccaaccaccgtatccattgacgtcattgtctatgccatcctcaacgtggatgagaagaatcaggtgctgaccacctacatctggtaccggcagtactggactgatgagtttctccagtggaaccctgaggactttgacaacatcaccaagttgtccatccccacggacagcatctgggtcccggacattctcatcaatgagttcgtggatgtggggaagtctccaaatatcccgtacgtgtatattcggcatcaaggcgaagttcagaactacaagccccttcaggtggtgactgcctgtagcctcgacatctacaacttccccttcgatgtccagaactgctcgctgaccttcaccagttggctgcacaccatccaggacatcaacatctctttgtggcgcttgccagaaaaggtgaaatccgacaggagtgtcttcatgaaccagggagagtgggagttgctgggggtgctgccctactttcgggagttcagcatggaaagcagtaactactatgcagaaatgaagttctatgtggtcatccgccggcggcccctcttctatgtggtcagcctgctactgcccagcatcttcctcatggtcatggacatcgtgggcttctacctgccccccaacagtggcgagagggtctctttcaagattacactcctcctgggctactcggtcttcctgatcatcgtttctgacacgctgccggccactgccatcggcactcctctcattggtgtctactttgtggtgtgcatggctctgctggtgataagtttggccgagaccatcttcattgtgcggctggtgcacaagcaagacctgcagcagcccgtgcctgcttggctgcgtcacctggttctggagagaatcgcctggctactttgcctgagggagcagtcaacttcccagaggcccccagccacctcccaagccaccaagactgatgactgctcagccatgggaaaccactgcagccacatgggaggaccccaggacttcgagaagagcccgagggacagatgtagccctcccccaccacctcgggaggcctcgctggcggtgtgtgggctgctgcaggagctgtcctccatccggcaattcctggaaaagcgggatgagatccgagaggtggcccgagactggctgcgcgtgggctccgtgctggacaagctgctattccacatttacctgctagcggtgctggcctacagcatcaccctggttatgctctggtccatctggcagtacgcttgagtgggtacagcccagtggaggagggggtacagtcctggttaggtggggacagaggatttctgcttaggcccctcaggacccagggaatgccagggacattttcaagacacagacaaagtcccgtgccctgtttccaatgccaattcatctcagcaatcacaagccaaggtctgaacccttccaccaaaaactgggtgttcaaggcccttacacccttgtcccacccccagcagctcaccatggctttaaaacatgctgtcttagatcaggagaaactcgggcactccctaagtccactctagttgtggacttttccccattgaccctcacctgaataagggactttggaattctgcttctctttcacaactttgcttttaggttgaaggcaaaaccaactctctactacacaggcctgataactctgtacgaggcttctctaacccctagtgtcttttttttcttcacctcacttgtggcagcttccctgaacactcatcccccatcagatgatgggagtgggaagaataaaatgcagtgaaaccctaaa

SEQ ID NO: 102857 - DNA, 2221 bp, Homo sapiens
  Payload ID: 69
  Gene Symbol: HTR3A
  Gene Name: 5-hydroxytryptamine (serotonin) receptor 3A, ionotropic
  Uniprot ID: P46098
  ENST ID: ENST00000506841
  CDS Start-End: 139-1671
gcagcctcagaaggtgtgagcagtggccacgagaggcaggctggctgggacatgaggttggcagagggcaggcaagctggcccttggtgggcctcgtcctgagcactcggaggcactcctatgcttggaaagctcgctatgctgctgtgggtccagcaggcgctgctcgccttgctcctccccacactcctggcacagggagaagccaggaggagccgaaacaccaccaggcccgctctgctgaggctgtcggattaccttttgaccaactacaggaagggtgtgcgccccgtgagggactggaggaagccaaccaccgtatccattgacgtcattgtctatgccatcctcaacgtggatgagaagaatcaggtgctgaccacctacatctggtaccggcagtactggactgatgagtttctccagtggaaccctgaggactttgacaacatcaccaagttgtccatccccacggacagcatctgggtcccggacattctcatcaatgagttcgtggatgtggggaagtctccaaatatcccgtacgtgtatattcggcatcaaggcgaagttcagaactacaagccccttcaggtggtgactgcctgtagcctcgacatctacaacttccccttcgatgtccagaactgctcgctgaccttcaccagttggctgcacaccatccaggacatcaacatctctttgtggcgcttgccagaaaaggtgaaatccgacaggagtgtcttcatgaaccagggagagtgggagttgctgggggtgctgccctactttcgggagttcagcatggaaagcagtaactactatgcagaaatgaagttctatgtggtcatccgccggcggcccctcttctatgtggtcagcctgctactgcccagcatcttcctcatggtcatggacatcgtgggcttctacctgccccccaacagtggcgagagggtctctttcaagattacactcctcctgggctactcggtcttcctgatcatcgtttctgacacgctgccggccactgccatcggcactcctctcattggtaaggcccctcctggcagcagagctcagtctggtgagaaacccgccccctcccacctcctgcatgtgtctcttgcctctgccctgggctgcacaggtgtctactttgtggtgtgcatggctctgctggtgataagtttggccgagaccatcttcattgtgcggctggtgcacaagcaagacctgcagcagcccgtgcctgcttggctgcgtcacctggttctggagagaatcgcctggctactttgcctgagggagcagtcaacttcccagaggcccccagccacctcccaagccaccaagactgatgactgctcagccatgggaaaccactgcagccacatgggaggaccccaggacttcgagaagagcccgagggacagatgtagccctcccccaccacctcgggaggcctcgctggcggtgtgtgggctgctgcaggagctgtcctccatccggcaattcctggaaaagcgggatgagatccgagaggtggcccgagactggctgcgcgtgggctccgtgctggacaagctgctattccacatttacctgctagcggtgctggcctacagcatcaccctggttatgctctggtccatctggcagtacgcttgagtgggtacagcccagtggaggagggggtacagtcctggttaggtggggacagaggatttctgcttaggcccctcaggacccagggaatgccagggacattttcaagacacagacaaagtcccgtgccctgtttccaatgccaattcatctcagcaatcacaagccaaggtctgaacccttccaccaaaaactgggtgttcaaggcccttacacccttgtcccacccccagcagctcaccatggctttaaaacatgctgtcttagatcaggagaaactcgggcactccctaagtccactctagttgtggacttttccccattgaccctcacctgaataagggactttggaattctgcttctctttcacaactttgcttttaggttgaaggcaaaaccaactctctactacacaggcctgataactctgtacgaggcttctctaacccctagtgtcttttttttcttcacctcacttgtggcagcttccctgaacactcatcccccatcagatgatgggagtgggaagaataaaatgcagtgaaaccctaaa

SEQ ID NO: 102858 - DNA, 2011 bp, Homo sapiens
  Payload ID: 70
  Gene Symbol: HTR3B
  Gene Name: 5-hydroxytryptamine (serotonin) receptor 3B, ionotropic
  Uniprot ID: O95264
  ENST ID: ENST00000260191
  CDS Start-End: 258-1583
acggtctgatcttggggcagaaccaaagggagaagttaagggatttcatgacggcatcaattccaaaacatttgcatggtgctggtattgcctttggtcccactgagtgtttacaaaatagcaccagtaaggatagcatcaactggcaaacggagaaggaggagaacagagtggagaggaaccctgttaggagaaattgagcggcattccatctggtaggcaagtttgcatttctcctttttgggatctgcccaggaatgttgtcaagtgtaatggctcccctgtgggcctgcatcctggtggctgcaggaattctagccacagatacacatcatccccaggattctgctctgtatcatctcagcaagcagctattacagaaatatcataaagaagtgagacctgtttacaactggaccaaggccaccacagtctacctggacctgttcgtccatgctatattggatgtggatgcagagaatcaaatattaaagacaagtgtatggtaccaagaggtctggaatgatgaatttttatcctggaactccagcatgtttgatgagattagagagatctccctacctctaagtgccatctgggcccccgatatcatcatcaatgagtttgtggacattgaaagataccctgaccttccctatgtttatgtgaactcatctgggaccattgagaactataagcccatccaggtggtctctgcgtgcagtttagagacatatgcttttccatttgatgtccagaattgcagcctgaccttcaagagcattctgcatacagtggaagacgtagacctggcctttctgaggagcccagaagacattcagcatgacaaaaaggcgtttttgaatgacagtgagtgggaacttctatctgtgtcctccacatacagcatcctgcagagcagcgctggaggatttgcacagattcagtttaatgtggtgatgcgcaggcaccccctggtctatgtcgtgagtctgctgattcctagcatctttctcatgctggtggacctggggagcttctacctgccacccaactgccgagccaggattgtgttcaagaccagtgtgctggtgggctacaccgtcttcagggtcaacatgtccaaccaggtgccacggagtgtagggagcacccctctgattgggcacttcttcaccatctgcatggccttcttggttctcagcttagctaagtccatcgtgttggtcaaattcctccatgatgagcagcgtggtggacaggagcagcccttcttgtgccttcgaggggacaccgatgctgacaggcctagagtggaacccagggcccaacgtgctgtggtaacagagtcctcgctgtatggagagcacctggcccagccaggaaccctgaaggaagtctggtcgcagcttcaatctatcagcaactacctccaaactcaggaccagacagaccaacaggaggcagagtggctggtcctcctgtcccgctttgaccgactgctcttccaaagctaccttttcatgctggggatctacaccatcactctgtgctccctctgggcactgtggggcggcgtgtgaagactgaagtgttcttcagtaattgtgctggcacttaggagagagaggagggggaataatagtgggttaaaaagctttctgggtcgggtgtggtggttcttgcctatagtcccagtgctttgggaggccatagcaggaggattgcttgagcccaggagttcgagaccagccagagcaacatagtgagaccacatctctaccagtaaataaataaataaataaataaataaataaataaataaatagctgggcatagtggctcatgcctgtactctcagctacttgggaggttgaggtgggaggattgcttgagcccaggatttcaaggctgcagtgagccatgattgcaccactgcaccccagcctgggtgacagagcaagaccctgtctcaaaaaaaataaaataaaaggctttctgccttcattgc

SEQ ID NO: 102859 - DNA, 612 bp, Homo sapiens
  Payload ID: 70
  Gene Symbol: HTR3B
  Gene Name: 5-hydroxytryptamine (serotonin) receptor 3B, ionotropic
  ENST ID: ENST00000543092
  CDS Start-End: 1-527
atgcagagaatcaaatattaaagacaagtgtatggtaccaagaggtctggaatgatgaatttttatcctggaactccagcatgtttgatgagattagagagatctccctacctctaagtgccatctgggcccccgatatcatcatcaatgagtttgtggacattgaaagataccctgaccttccctatgtttatgtgaactcatctgggaccattgagaactataagcccatccaggtggtctctgcgtgcagtttagagacatatgcttttccatttgatgtccagaattgcagcctgaccttcaagagcattctgcatacagtggaagacgtagacctggcctttctgaggagcccagaagacattcagcatgacaaaaaggcgtttttgaatgacagtgagtgggaacttctatctgtgtcctccacatacagcatcctgcagagcagcgctggaggatttgcacagattcagtttaatggcacttcttcaccatctgcatggccttcttggttctcagcttagctaagtccatcgtgttggtcaaattcctccatgatgagcagcgtggtggacaggagcagcccttcttgtgccttcgaggggacac

SEQ ID NO: 102860 - DNA, 1692 bp, Homo sapiens
  Payload ID: 70
  Gene Symbol: HTR3B
  Gene Name: 5-hydroxytryptamine (serotonin) receptor 3B, ionotropic
  Uniprot ID: O95264
  ENST ID: ENST00000537778
  CDS Start-End: 285-1577
aattattctgtctccaaaatgcaagattgttgtaaaatggaattgtaggtacagttttccaaccttggagatggcgttgatttacttgtttttacaatgaggtttctccattgggcacttaggccatcagcttactttaagcatttgccaaaggccccaccagctggctgtgaattgatgcagattttggtgagctgaaagctatattctagtaaaagccaccgagtcctgaacagtctgaaacctcctaaagaaaccaagctcctcttacttttatcttcacaatgatagtttattttccaggaattctagccacagatacacatcatccccaggattctgctctgtatcatctcagcaagcagctattacagaaatatcataaagaagtgagacctgtttacaactggaccaaggccaccacagtctacctggacctgttcgtccatgctatattggatgtggatgcagagaatcaaatattaaagacaagtgtatggtaccaagaggtctggaatgatgaatttttatcctggaactccagcatgtttgatgagattagagagatctccctacctctaagtgccatctgggcccccgatatcatcatcaatgagtttgtggacattgaaagataccctgaccttccctatgtttatgtgaactcatctgggaccattgagaactataagcccatccaggtggtctctgcgtgcagtttagagacatatgcttttccatttgatgtccagaattgcagcctgaccttcaagagcattctgcatacagtggaagacgtagacctggcctttctgaggagcccagaagacattcagcatgacaaaaaggcgtttttgaatgacagtgagtgggaacttctatctgtgtcctccacatacagcatcctgcagagcagcgctggaggatttgcacagattcagtttaatgtggtgatgcgcaggcaccccctggtctatgtcgtgagtctgctgattcctagcatctttctcatgctggtggacctggggagcttctacctgccacccaactgccgagccaggattgtgttcaagaccagtgtgctggtgggctacaccgtcttcagggtcaacatgtccaaccaggtgccacggagtgtagggagcacccctctgattgggcacttcttcaccatctgcatggccttcttggttctcagcttagctaagtccatcgtgttggtcaaattcctccatgatgagcagcgtggtggacaggagcagcccttcttgtgccttcgaggggacaccgatgctgacaggcctagagtggaacccagggcccaacgtgctgtggtaacagagtcctcgctgtatggagagcacctggcccagccaggaaccctgaaggaagtctggtcgcagcttcaatctatcagcaactacctccaaactcaggaccagacagaccaacaggaggcagagtggctggtcctcctgtcccgctttgaccgactgctcttccaaagctaccttttcatgctggggatctacaccatcactctgtgctccctctgggcactgtggggcggcgtgtgaagactgaagtgttcttcagtaattgtgctggcacttaggagagagaggagggggaataatagtgggttaaaaagctttctgggtcgggtgtggtggttcttgcctatagtcccag

SEQ ID NO: 102861 - DNA, 1697 bp, Homo sapiens
  Payload ID: 71
  Gene Symbol: HTR3C
  Gene Name: 5-hydroxytryptamine (serotonin) receptor 3C, ionotropic
  Uniprot ID: Q8WXA8
  ENST ID: ENST00000318351
  CDS Start-End: 35-1378
tggtgaatccccagagaagagtccagaaagaagaatggaaggagggtggcctgcaaggcagagtgccctcctctgcctcactgtcagtcttctgcttcaaggaagaggcgacgcttttaccatcaattgctcaggctttgaccagcatggggttgaccctgctgtcttccaagcagtgtttgacagaaaggccttccgtccattcaccaactacagcatccctacccgtgtcaacatctccttcaccctgtctgccatcctgggagtggatgcacagctccagctgctgacatcattcctgtggatggatttggtatgggacaatcctttcattaattggaacccaaaagagtgtgttggcatcaataaactcacagtattagctgaaaacctgtggctcccagacatcttcatcgtggaatccatggatgtggatcagacgccttccggtctcactgcctatatcagcagtgaaggtcgaattaagtatgataagccaatgagggtgaccagcatctgtaacctggacatcttctacttcccttttgaccaacagaactgtaccttcaccttcagttctttcctctacacagtggacagcatgctgctgggcatggacaaggaggtgtgggagatcacagacacgtctcgcaaagtcatccaaacccagggggagtgggagctcttgggcatcaacaaggccaccccaaagatgtccatgggcaacaacctatatgaccagatcatgttttatgtggccatcaggcgcaggccaagcctctacatcataaacctgctggtgcccagtagctttctggttgccattgatgccctcagcttctacctgccagcagagagcgagaatcgtgccccattcaagataacacttctgctgggctacaacgtcttcctgctcatgatgaatgacttgctccctgccagtggcacccccctcatcagtgtctacttcgccctgtgcctgtccctgatggtggtcagcctgctggagaccgtcttcattacctacctgctgcacgtggccaccacccagcccccacccatgcctaggtggcttcactccctgctgctccactgcaccagcccagggagatgctgtcccactgcgccccagaagggaaataagggcctgggtctcaccctcacccacctgcctggcccaaaggagccgggggagttagcagggaagaagctgggacccagagagaccgagccagatgggggctcaggatggacaaagacccagctaatggagctgtgggtgcagttcagccacgcgatggacaccctgctcttccgcctctacctgctcttcatggcctcctccatccttactgtcattgtcctctggaacacctaggcagacatcccccctctctggcaaacaacagcttggagtttctgctggtcttgggccagccggactcattttcctaatcttagccacttatccccagtgactaccatgtccccttctaaattccaaagactccaacgcagcactagcaagcaggttcgggacagccctggacgatttcccgaccgctgctcaggctgctcattcctgctcaccctcagtctccctgagctaccacctaactcctcactccctgatcaatggaagtccaggtcagtggagtctctccttgattgatcaccccaataaacaactttccagg

SEQ ID NO: 102862 - DNA, 1459 bp, Homo sapiens
  Payload ID: 72
  Gene Symbol: HTR3D
  Gene Name: 5-hydroxytryptamine (serotonin) receptor 3D, ionotropic
  ENST ID: ENST00000334128
  CDS Start-End: 226-1065
ctagattcaggcccagttaaagcacaggtggcttagatcaaaaatcattattgccacatggaccagccttggaagtgaacaaggagagggtggtggcatgggacctgccttcctggagttaatcatctagatgaaagctgctattccaggattcacaccttcaactggtgacatcgttcctgtggctaaatatgcatcagtgtggatcagacacctgcaggtctcatggctagtatgtcaatagtgaaggccacatcaaacacaataagccaatgtgggtggtcagcatctgcaaactggacaccttctatttccccttccatggacagaggtgaacgctctccttcagccctttcacctacacaggtggccatcaggcgcaggtgcaggcccagcccctacgtggtaaactttctggtgcccagtggcattctgattgccatcgatgccctcagtttctacctgccactggaaagtgggaattgtgccccattcaagatgactgttctgctgggctacagcgtcttcctgctcatgatgaatgacttgctcccagccactagcacttcatcacatgcttcactagtacgtcctcatccatcaagagaccaaaagcgaggtgtctacttcgccctgtgcctgtccctgatggtgggcagcctgctggagaccatcttcatcacccacctgctgcacgtggccaccacccagcccctacctctgcctcggtggctccactccctgctgctgcactgcaccggccaagggagatgctgtcccactgcgccccagaagggaaataagggcccgggtctcacccccacccacctgcccggtgtgaaggagccagaggtatcagcagggcagatgccaggccctggggaggcagagctgacagggggctcagaatggacaagggcccagcgggaacacgaggcccagaagcagcactcggtggagctgtgggtgcagttcagccacgcgatggacgccctgctcttccgcctctacctgctcttcatggcctcctccatcatcaccgtcatatgcctctggaacacctaggcaggtgctcacctgcaaacttcagtctggacttctttttgccagagaactccagaaaccagtcaggctctcagtcagccttgtggccctgtcaaccgcctcatttttaacccagtcctctgtgtagtttcagaccagacctgaatagtctcctatgccctccaaaagtcgggtccttgctcctgcatgccatcagccccactcagccctcccatacctccctggctcctcaggattcaggttcctagggtacgtccttgattaaatcaccccaatatgcccctttgcagaaagtattggcttttccctgaattctgttatggtaaaaaaaatcttgggattgagagtcttcttgcagaaacttctcagccaaagtaaaaaggattttctctta

SEQ ID NO: 102863 - DNA, 1674 bp, Homo sapiens
  Payload ID: 72
  Gene Symbol: HTR3D
  Gene Name: 5-hydroxytryptamine (serotonin) receptor 3D, ionotropic
  Uniprot ID: Q70Z44
  ENST ID: ENST00000382489
  CDS Start-End: 1-1365
atgcagaaacactctccaggccccccagccctggccctcctctctcagtctctgctcactacaggaaatggcgacactttgattatcaattgcccaggctttggccagcacagggtggaccctgcagcctttcaagcagtgtttgacagaaaggctattggtccagtcaccaactacagtgtcgccactcatgtcaacatctccttcaccttgtctgccatctggaactgctattccaggattcacaccttcaactgccaccatgcccggccttggcacaatcaatttgtgcagtggaacccagatgaatgcggaggcatcaagaagtccggcatggcaactgagaacctatggctttcagatgtcttcatcgaggagtctgtggatcagacacctgcaggtctcatggctagtatgtcaatagtgaaggccacatcaaacacaataagccaatgtgggtggtcagcatctgcaaactggacaccttctatttccccttccatggacagagcccgggcatggagaaggatgtccaggagctttcaaatacatcacagaacctcattcagaacaaggagggagtgggtactgctgggtatccaaaaaagaacaataaaggtgaccgtggccactaaccagtatgaacaagccatcttccatgtggccatcaggcgcaggtgcaggcccagcccctacgtggtaaactttctggtgcccagtggcattctgattgccatcgatgccctcagtttctacctgccactggaaagtgggaattgtgccccattcaagatgactgttctgctgggctacagcgtcttcctgctcatgatgaatgacttgctcccagccactagcacttcatcacatgcttcactagtggcgcctctggccctcatgcagacccccttgcctgcaggtgtctacttcgccctgtgcctgtccctgatggtgggcagcctgctggagaccatcttcatcacccacctgctgcacgtggccaccacccagcccctacctctgcctcggtggctccactccctgctgctgcactgcaccggccaagggagatgctgtcccactgcgccccagaagggaaataagggcccgggtctcacccccacccacctgcccggtgtgaaggagccagaggtatcagcagggcagatgccaggccctggggaggcagagctgacagggggctcagaatggacaagggcccagcgggaacacgaggcccagaagcagcactcggtggagctgtgggtgcagttcagccacgcgatggacgccctgctcttccgcctctacctgctcttcatggcctcctccatcatcaccgtcatatgcctctggaacacctaggcaggtgctcacctgcaaacttcagtctggacttctttttgccagagaactccagaaaccagtcaggctctcagtcagccttgtggccctgtcaaccgcctcatttttaacccagtcctctgtgtagtttcagaccagacctgaatagtctcctatgccctccaaaagtcgggtccttgctcctgcatgccatcagccccactcagccctcccatacctccctggctcctcaggattcaggttcctagggtacgtccttgattaaatcaccccaatatgcccctttgcagaaagtattggcttttccct

SEQ ID NO: 102864 - DNA, 1043 bp, Homo sapiens
  Payload ID: 72
  Gene Symbol: HTR3D
  Gene Name: 5-hydroxytryptamine (serotonin) receptor 3D, ionotropic
  Uniprot ID: Q70Z44
  ENST ID: ENST00000453435
  CDS Start-End: 117-818
tgaacaaggagagggtggtggcatgggacctgccttcctggagttaatcatctagatgaaagctgctattccaggattcacaccttcaactggtgacatcgttcctgtggctaaatatggtggccatcaggcgcaggtgcaggcccagcccctacgtggtaaactttctggtgcccagtggcattctgattgccatcgatgccctcagtttctacctgccactggaaagtgggaattgtgccccattcaagatgactgttctgctgggctacagcgtcttcctgctcatgatgaatgacttgctcccagccactagcacttcatcacatgcttcactagtacgtcctcatccatcaagagaccaaaagcgaggtgtctacttcgccctgtgcctgtccctgatggtgggcagcctgctggagaccatcttcatcacccacctgctgcacgtggccaccacccagcccctacctctgcctcggtggctccactccctgctgctgcactgcaccggccaagggagatgctgtcccactgcgccccagaagggaaataagggcccgggtctcacccccacccacctgcccggtgtgaaggagccagaggtatcagcagggcagatgccaggccctggggaggcagagctgacagggggctcagaatggacaagggcccagcgggaacacgaggcccagaagcagcactcggtggagctgtgggtgcagttcagccacgcgatggacgccctgctcttccgcctctacctgctcttcatggcctcctccatcatcaccgtcatatgcctctggaacacctaggcaggtgctcacctgcaaacttcagtctggacttctttttgccagagaactccagaaaccagtcaggctctcagtcagccttgtggccctgtcaaccgcctcatttttaacccagtcctctgtgtagtttcagaccagacctgaatagtctcctatgccctccaaaagtcgggtccttgctcctgcatgccatcagccccactcagccctcccatacctccctgg

SEQ ID NO: 102865 - DNA, 1215 bp, Homo sapiens
  Payload ID: 72
  Gene Symbol: HTR3D
  Gene Name: 5-hydroxytryptamine (serotonin) receptor 3D, ionotropic
  Uniprot ID: Q70Z44
  ENST ID: ENST00000428798
  CDS Start-End: 1-1215
atggaaagaggctggttccatgggaaaggattcctccttggcttcatcctccacctgctgctgcaagattcacaccttcaactggtgacatcgttcctgtggctaaatatgtggaacccagatgaatgcggaggcatcaagaagtccggcatggcaactgagaacctatggctttcagatgtcttcatcgaggagtctgtggatcagacacctgcaggtctcatggctagtatgtcaatagtgaaggccacatcaaacacaataagccaatgtgggtggtcagcatctgcaaactggacaccttctatttccccttccatggacagaggtgaacgctctccttcagccctttcacctacacaggtaacccgggcatggagaaggatgtccaggagctttcaaatacatcacagaacctcattcagaacaaggagggagtgggtactgctgggtatccaaaaaagaacaataaaggtgaccgtggccactaaccagtatgaacaagccatcttccatgtggccatcaggcgcaggtgcaggcccagcccctacgtggtaaactttctggtgcccagtggcattctgattgccatcgatgccctcagtttctacctgccactggaaagtgggaattgtgccccattcaagatgactgttctgctgggctacagcgtcttcctgctcatgatgaatgacttgctcccagccactagcacttcatcacatgcttcactagtacgtcctcatccatcaagagaccaaaagcgaggtgtctacttcgccctgtgcctgtccctgatggtgggcagcctgctggagaccatcttcatcacccacctgctgcacgtggccaccacccagcccctacctctgcctcggtggctccactccctgctgctgcactgcaccggccaagggagatgctgtcccactgcgccccagaagggaaataagggcccgggtctcacccccacccacctgcccggtgtgaaggagccagaggtatcagcagggcagatgccaggccctggggaggcagagctgacagggggctcagaatggacaagggcccagcgggaacacgaggcccagaagcagcactcggtggagctgtgggtgcagttcagccacgcgatggacgccctgctcttccgcctctacctgctcttcatggcctcctccatcatcaccgtcatatgcctctggaacacctag

SEQ ID NO: 102866 - DNA, 1912 bp, Homo sapiens
  Payload ID: 73
  Gene Symbol: HTR3E
  Gene Name: 5-hydroxytryptamine (serotonin) receptor 3E, ionotropic
  Uniprot ID: A5X5Y0
  ENST ID: ENST00000335304
  CDS Start-End: 195-1610
gaacaagtccggcttctgccttttattggctgtctgactgtaggaagttacttcctcttattgcaccttagttagctcgtttattacatgagggtaaagcagtatctacctgataggggattgggaggattaaatgaggtaatccatttttaaagggcttagaatatacctgacacacagccagtgctcaacaaatgttagctttcattttatcacgggcgaccccacgccctgccttggggcccctctcatatagggagcacagggttgctctccttcatctcacacattcgatgtccactacaggaaggggcgttactttcaccatcaattgctcagggtttggccagcacggggcggatcccactgctctgaattcagtgtttaatagaaagcccttccgtccggtcaccaacatcagcgtccccacccaagtcaacatctccttcgcgatgtctgccatcctagatgtgaatgaacagctgcacctcttgtcatcattcctgtggctggaaatggtttgggataacccatttatcagctggaacccagaggaatgtgagggcatcacgaagatgagtatggcagccaagaacctgtggctcccagacattttcatcattgaactcatggatgtggataagaccccaaaaggcctcacagcatatgtaagtaatgaaggtcgcatcaggtataagaaacccatgaaggtggacagtatctgtaacctggacatcttctacttccccttcgaccagcagaactgcacactcaccttcagctcattcctctacacagtggacagcatgttgctggacatggagaaagaagtgtgggaaataacagacgcatcccggaacatccttcagacccatggagaatgggagctcctgggcctcagcaaggccaccgcaaagttgtccaggggaggcaacctgtatgatcagatcgtgttctatgtggccatcaggcgcaggcccagtctctatgtcataaaccttctcgtgcccagtggctttctggttgccatcgatgccctcagcttctacctgccagtgaaaagtgggaatcgtgtcccattcaagataacgctcctgctgggctacaacgtcttcctgctcatgatgagtgacttgctccccaccagtggcacccccctcatcggtgtctacttcgccctgtgcctgtccctgatggtgggcagcctgctggagaccatcttcatcacccacctgctgcacgtggccaccacccagcccccacccctgcctcggtggctccactccctgctgctccactgcaacagcccggggagatgctgtcccactgcgccccagaaggaaaataagggcccgggtctcacccccacccacctgcccggtgtgaaggagccagaggtatcagcagggcagatgccgggccctgcggaggcagagctgacagggggctcagaatggacaagggcccagcgggaacacgaggcccagaagcagcactcagtggagctgtggttgcagttcagccacgcgatggacgccatgctcttccgcctctacctgctcttcatggcctcctctatcatcaccgtcatatgcctctggaacacctaggcaggtgctcacctgccaacttcagtctggagcttctcttgcctccagggactggccaggtctcccccctttcctgagtaccaactatcatatccccaaagatgactgagtctctgctgtattccatgtatcccaatccggtcctgctgatcaattccaatcccagacatttctccctgttcctgcattttgttggcttccttcagtcctaccatatggttctaggtccctcttacgtcatctgcatagcagactatacctcttctgtccgctgacttgcccaataaataattctgcagaga

SEQ ID NO: 102867 - DNA, 705 bp, Homo sapiens
  Payload ID: 73
  Gene Symbol: HTR3E
  Gene Name: 5-hydroxytryptamine (serotonin) receptor 3E, ionotropic
  ENST ID: ENST00000431041
  CDS Start-End: 232-705
cctcttattgcaccttagttagctcgtttattacatgagggtaaagcagtatctacctgataggggattgggaggattaaatgaggaaggggcgttactttcaccatcaattgctcagggtttggccagcacggggcggatcccactgctctgaattcagtgtttaatagaaagcccttccgtccggtcaccaacatcagcgtccccacccaagtcaacatctccttcgcgatgtctgccatcctagatgtgaatgaacagctgcacctcttgtcatcattcctgtggctggaaatggtttgggataacccatttatcagctggaacccagaggaatgtgagggcatcacgaagatgagtatggcagccaagaacctgtggctcccagacattttcatcattgaactcatggatgtggataagaccccaaaaggcctcacagcatatgtaagtaatgaaggtcgcatcaggtataagaaacccatgaaggtggacagtatctgtaacctggacatcttctacttccccttcgaccagcagaactgcacactcaccttcagctcattcctctacacagtggacagcatgttgctggacatggagaaagaagtgtgggaaataacagacgcatcccggaacatccttcagacccatggagaatgggagctcctgggcctcagcaaggccaccgcaaagttgtccagg

SEQ ID NO: 102868 - DNA, 1371 bp, Homo sapiens
  Payload ID: 73
  Gene Symbol: HTR3E
  Gene Name: 5-hydroxytryptamine (serotonin) receptor 3E, ionotropic
  Uniprot ID: A5X5Y0
  ENST ID: ENST00000436361
  CDS Start-End: 1-1371
atgttagctttcattttatcacgggcgaccccacgccctgccttggggcccctctcatatagggagcacagggttgctctccttcatctcacacattcgatgtccactacaggaaggggcgttactttcaccatcaattgctcagggtttggccagcacggggcggatcccactgctctgaattcagtgtttaatagaaagcccttccgtccggtcaccaacatcagcgtccccacccaagtcaacatctccttcgcgatgtctgccatcctagatgtggtttgggataacccatttatcagctggaacccagaggaatgtgagggcatcacgaagatgagtatggcagccaagaacctgtggctcccagacattttcatcattgaactcatggatgtggataagaccccaaaaggcctcacagcatatgtaagtaatgaaggtcgcatcaggtataagaaacccatgaaggtggacagtatctgtaacctggacatcttctacttccccttcgaccagcagaactgcacactcaccttcagctcattcctctacacagtggacagcatgttgctggacatggagaaagaagtgtgggaaataacagacgcatcccggaacatccttcagacccatggagaatgggagctcctgggcctcagcaaggccaccgcaaagttgtccaggggaggcaacctgtatgatcagatcgtgttctatgtggccatcaggcgcaggcccagtctctatgtcataaaccttctcgtgcccagtggctttctggttgccatcgatgccctcagcttctacctgccagtgaaaagtgggaatcgtgtcccattcaagataacgctcctgctgggctacaacgtcttcctgctcatgatgagtgacttgctccccaccagtggcacccccctcatcggtgtctacttcgccctgtgcctgtccctgatggtgggcagcctgctggagaccatcttcatcacccacctgctgcacgtggccaccacccagcccccacccctgcctcggtggctccactccctgctgctccactgcaacagcccggggagatgctgtcccactgcgccccagaaggaaaataagggcccgggtctcacccccacccacctgcccggtgtgaaggagccagaggtatcagcagggcagatgccgggccctgcggaggcagagctgacagggggctcagaatggacaagggcccagcgggaacacgaggcccagaagcagcactcagtggagctgtggttgcagttcagccacgcgatggacgccatgctcttccgcctctacctgctcttcatggcctcctctatcatcaccgtcatatgcctctggaacacctag

SEQ ID NO: 102869 - DNA, 2139 bp, Homo sapiens
  Payload ID: 73
  Gene Symbol: HTR3E
  Gene Name: 5-hydroxytryptamine (serotonin) receptor 3E, ionotropic
  Uniprot ID: A5X5Y0
  ENST ID: ENST00000415389
  CDS Start-End: 467-1837
gtaaaataacaaattgtgtttatttaagccactgggtttgtgatttgttacaacagcaataaaaggcatgtaagatagaaggaaaccattcaacacatgtctaataagaaaaatagaggaagtgaaacatttataaatgtctgagaattttccaaaattgaagagatgagtcttcagaccaagggatctcaccaagatctgcaagttgatcacgtatgaactatctataaccatttacgttgcagtgaaatacctaagactaagataaagtcttaaaagcagactgaaccttaagcataggcaagaacaagacaaccagaacactctttgaaggaaggttacaaatgtcagtggtcaaccaatgctattagtattcaaagtcagactctaggtgtggcctgtgctgctttaatctgggcattcctgggtcccagtacatgttcagagaagaacttagacaaagaagatggaaggaagctggttccacaggaaaagattttccttctacctccttctcggttttctgcttcaaggaaggggcgttactttcaccatcaattgctcagggtttggccagcacggggcggatcccactgctctgaattcagtgtttaatagaaagcccttccgtccggtcaccaacatcagcgtccccacccaagtcaacatctccttcgcgatgtctgccatcctagatgtgaatgaacagctgcacctcttgtcatcattcctgtggctggaaatggtttgggataacccatttatcagctggaacccagaggaatgtgagggcatcacgaagatgagtatggcagccaagaacctgtggctcccagacattttcatcattgaactcatggatgtggataagaccccaaaaggcctcacagcatatgtaagtaatgaaggtcgcatcaggtataagaaacccatgaaggtggacagtatctgtaacctggacatcttctacttccccttcgaccagcagaactgcacactcaccttcagctcattcctctacacagtggacagcatgttgctggacatggagaaagaagtgtgggaaataacagacgcatcccggaacatccttcagacccatggagaatgggagctcctgggcctcagcaaggccaccgcaaagttgtccaggggaggcaacctgtatgatcagatcgtgttctatgtggccatcaggcgcaggcccagtctctatgtcataaaccttctcgtgcccagtggctttctggttgccatcgatgccctcagcttctacctgccagtgaaaagtgggaatcgtgtcccattcaagataacgctcctgctgggctacaacgtcttcctgctcatgatgagtgacttgctccccaccagtggcacccccctcatcggtgtctacttcgccctgtgcctgtccctgatggtgggcagcctgctggagaccatcttcatcacccacctgctgcacgtggccaccacccagcccccacccctgcctcggtggctccactccctgctgctccactgcaacagcccggggagatgctgtcccactgcgccccagaaggaaaataagggcccgggtctcacccccacccacctgcccggtgtgaaggagccagaggtatcagcagggcagatgccgggccctgcggaggcagagctgacagggggctcagaatggacaagggcccagcgggaacacgaggcccagaagcagcactcagtggagctgtggttgcagttcagccacgcgatggacgccatgctcttccgcctctacctgctcttcatggcctcctctatcatcaccgtcatatgcctctggaacacctaggcaggtgctcacctgccaacttcagtctggagcttctcttgcctccagggactggccaggtctcccccctttcctgagtaccaactatcatatccccaaagatgactgagtctctgctgtattccatgtatcccaatccggtcctgctgatcaattccaatcccagacatttctccctgttcctgcattttgttggcttccttcagtcctaccatatggttctaggtccctcttacgtcatctgcatagcagactatacctcttctgtccgctgacttgcccaataaataattctgcagaga

SEQ ID NO: 102870 - DNA, 1326 bp, Homo sapiens
  Payload ID: 73
  Gene Symbol: HTR3E
  Gene Name: 5-hydroxytryptamine (serotonin) receptor 3E, ionotropic
  Uniprot ID: A5X5Y0
  ENST ID: ENST00000425359
  CDS Start-End: 1-1326
atggaaggaagctggttccacaggaaaagattttccttctacctccttctcggttttctgcttcaaggaaggggcgttactttcaccatcaattgctcagggtttggccagcacggggcggatcccactgctctgaattcagtgtttaatagaaagcccttccgtccggtcaccaacatcagcgtccccacccaagtcaacatctccttcgcgatgtctgccatcctagatgtggtttgggataacccatttatcagctggaacccagaggaatgtgagggcatcacgaagatgagtatggcagccaagaacctgtggctcccagacattttcatcattgaactcatggatgtggataagaccccaaaaggcctcacagcatatgtaagtaatgaaggtcgcatcaggtataagaaacccatgaaggtggacagtatctgtaacctggacatcttctacttccccttcgaccagcagaactgcacactcaccttcagctcattcctctacacagtggacagcatgttgctggacatggagaaagaagtgtgggaaataacagacgcatcccggaacatccttcagacccatggagaatgggagctcctgggcctcagcaaggccaccgcaaagttgtccaggggaggcaacctgtatgatcagatcgtgttctatgtggccatcaggcgcaggcccagtctctatgtcataaaccttctcgtgcccagtggctttctggttgccatcgatgccctcagcttctacctgccagtgaaaagtgggaatcgtgtcccattcaagataacgctcctgctgggctacaacgtcttcctgctcatgatgagtgacttgctccccaccagtggcacccccctcatcggtgtctacttcgccctgtgcctgtccctgatggtgggcagcctgctggagaccatcttcatcacccacctgctgcacgtggccaccacccagcccccacccctgcctcggtggctccactccctgctgctccactgcaacagcccggggagatgctgtcccactgcgccccagaaggaaaataagggcccgggtctcacccccacccacctgcccggtgtgaaggagccagaggtatcagcagggcagatgccgggccctgcggaggcagagctgacagggggctcagaatggacaagggcccagcgggaacacgaggcccagaagcagcactcagtggagctgtggttgcagttcagccacgcgatggacgccatgctcttccgcctctacctgctcttcatggcctcctctatcatcaccgtcatatgcctctggaacacctag

SEQ ID NO: 102871 - DNA, 1449 bp, Homo sapiens
  Payload ID: 73
  Gene Symbol: HTR3E
  Gene Name: 5-hydroxytryptamine (serotonin) receptor 3E, ionotropic
  Uniprot ID: A5X5Y0
  ENST ID: ENST00000440596
  CDS Start-End: 1-1449
atgttagctttcattttatcacgggcgaccccacgccctgccttggggcccctctcatatagggagcacagggttgctctccttcatctcacacattcgatgtccactacaggaaggggcgttactttcaccatcaattgctcagggtttggccagcacggggcggatcccactgctctgaattcagtgtttaatagaaagcccttccgtccggtcaccaacatcagcgtccccacccaagtcaacatctccttcgcgatgtctgccatcctagatgtggtttgggataacccatttatcagctggaacccagaggaatgtgagggcatcacgaagatgagtatggcagccaagaacctgtggctcccagacattttcatcattgaactgtgcgtatcaagggctggtcagagggaagtcccatctcctggtagccacagagatcacagtttaccattggggccactcatggatgtggataagaccccaaaaggcctcacagcatatgtaagtaatgaaggtcgcatcaggtataagaaacccatgaaggtggacagtatctgtaacctggacatcttctacttccccttcgaccagcagaactgcacactcaccttcagctcattcctctacacagtggacagcatgttgctggacatggagaaagaagtgtgggaaataacagacgcatcccggaacatccttcagacccatggagaatgggagctcctgggcctcagcaaggccaccgcaaagttgtccaggggaggcaacctgtatgatcagatcgtgttctatgtggccatcaggcgcaggcccagtctctatgtcataaaccttctcgtgcccagtggctttctggttgccatcgatgccctcagcttctacctgccagtgaaaagtgggaatcgtgtcccattcaagataacgctcctgctgggctacaacgtcttcctgctcatgatgagtgacttgctccccaccagtggcacccccctcatcggtgtctacttcgccctgtgcctgtccctgatggtgggcagcctgctggagaccatcttcatcacccacctgctgcacgtggccaccacccagcccccacccctgcctcggtggctccactccctgctgctccactgcaacagcccggggagatgctgtcccactgcgccccagaaggaaaataagggcccgggtctcacccccacccacctgcccggtgtgaaggagccagaggtatcagcagggcagatgccgggccctgcggaggcagagctgacagggggctcagaatggacaagggcccagcgggaacacgaggcccagaagcagcactcagtggagctgtggttgcagttcagccacgcgatggacgccatgctcttccgcctctacctgctcttcatggcctcctctatcatcaccgtcatatgcctctggaacacctag

SEQ ID NO: 102872 - DNA, 3082 bp, Homo sapiens
  Payload ID: 74
  Gene Symbol: HTR4
  Gene Name: 5-hydroxytryptamine (serotonin) receptor 4, G protein-coupled
  Uniprot ID: Q13639
  ENST ID: ENST00000360693
  CDS Start-End: 140-1426
gcggcagcggcggcagcagaagctcggctcagcggctgggggtggccgctcgaatctgccagggcacctcgctccctcgcctctggcagcgggaccctgtgggcattgaaatccaactcactcatgcttatttcctgtaatggacaaacttgatgctaatgtgagttctgaggagggtttcgggtcagtggagaaggtggtgctgctcacgtttctctcgacggttatcctgatggccatcttggggaacctgctggtgatggtggctgtgtgctgggacaggcagctcaggaaaataaaaacaaattatttcattgtatctcttgcttttgcggatctgctggtttcggtgctggtgatgccctttggtgccattgagctggttcaagacatctggatttatggggaggtgttttgtcttgttcggacatctctggacgtcctgctcacaacggcatcgatttttcacctgtgctgcatttctctggataggtattacgccatctgctgccagcctttggtctataggaacaagatgacccctctgcgcatcgcattaatgctgggaggctgctgggtcatccccacgtttatttcttttctccctataatgcaaggctggaataacattggcataattgatttgatagaaaagaggaagttcaaccagaactctaactctacgtactgtgtcttcatggtcaacaagccctacgccatcacctgctctgtggtggccttctacatcccatttctcctcatggtgctggcctattaccgcatctatgtcacagctaaggagcatgcccatcagatccagatgttacaacgggcaggagcctcctccgagagcaggcctcagtcggcagaccagcatagcactcatcgcatgaggacagagaccaaagcagccaagaccctgtgcatcatcatgggttgcttctgcctctgctgggcaccattctttgtcaccaatattgtggatcctttcatagactacactgtccctgggcaggtgtggactgctttcctctggctcggctatatcaattccgggttgaacccttttctctacgccttcttgaataagtcttttagacgtgccttcctcatcatcctctgctgtgatgatgagcgctaccgaagaccttccattctgggccagactgtcccttgttcaaccacaaccattaatggatccacacatgtactaaggacagattttctgtttgacagagacattttagcaaggtattggacaaagcctgccagagcgggtccattctcaggcacattgagcattagatgtttgactgcaaggaagcctgtcttgggggatgcagtggagtgtggtggccagtgggagagtcagtgtcacccgccagcaacttctcctttggtggctgctcagcccagtgacacttaggcccctgggacaatgacccagaagacagccatgcctccgaaagagggccaggtcctaagctgctgcttgtgcgcgactgcacccggtattctcttcacctgaggctttccgtccgccagtgcaggaacccggtgctcgctgggcttttcctctgagattccagcaggtggcgctggagggagtcaggggacataatggcctccttgttcactttttatttcccaacactccctcttcccagattctctgcttttgccgcgtggtctctggtgtctctgacatgttcccgtcactcactgtgtctgatctgtctcactcacgttctaagcacgatagcttgctgcgtcctatctcggtcactgatgtctccaaatacgccttctttgctgtgtgggcttccagatatcaacaaaatactccctctctgttcctgtcttagccagaggcgtcgctcctgtcttgcttacttgcttggtcacgtccgtcacagccatgttcaagctatcccctgcctcttcttcgccctgttctgtgccagacgctaacacacttttctccctgtgtctgggtccaaacgtgcatcctcttggttggcccccttgtcagtcccagacgtccacttgctcttccttatgtccaatgtctgtcctcctcttcaggacatgctccatttattttccatggaagacacagggtcagagatctgtcagaggaaaatggtctccacagcaactctggagggaagctgaagacagatagcttcctcctggtgtcctggccgctggcgtgtctgccctgagatgctcgctctcctgctgggctagaacgggacgtcttctaaaaagccttgggcagggctagcaacatcgtaggtgtttattaggcttcaggatctttcccatgaacttgtgatatcattttgaaacccttcaatctggctttgttgctgccaaaggagataactgttggaagttcacactggggaaactcattttcccctgcagctcccccaaggtgcaggagggcaggatccagcagcactggggatgccgaggcaatgctgtacttgaagccagaggacccaaattgccgccctggctgtgctgcaaacaagctgtgagatcttgaatagtgttctttcatctctggaccccactttccacatctgtgcactcaagcttggactagaggacctttaagttttctttctgtttctaagacaacagtatgctgctatagccgtctgctacctcgagaagccatggcctgcctgccttttggctttgtttcaaaggaacgaccctcctcatttgggccttttagacccctgacctttccagctttgtccttcagattaatctggatgtcttttattcaaagctgagtcagtggctcttgcgaatgccccatagcagaagtcccgggaaggtaaatgccaaacccagagccatgtgagattctgactttgatcttggctgtggtttaatagcatctcaggattatttatcatattctctttttttcttattgcttataaggtgtcagttattgtttccattgttgtttactttagttctggaactgaaaccgacaggaagaaactttggaataaggaagagaagattgaccaaaccatccaaatgccaaaaagaaaaa

SEQ ID NO: 102873 - DNA, 2979 bp, Homo sapiens
  Payload ID: 74
  Gene Symbol: HTR4
  Gene Name: 5-hydroxytryptamine (serotonin) receptor 4, G protein-coupled
  Uniprot ID: Q13639
  ENST ID: ENST00000362016
  CDS Start-End: 48-1334
gaccctgtgggcattgaaatccaactcactcatgcttatttcctgtaatggacaaacttgatgctaatgtgagttctgaggagggtttcgggtcagtggagaaggtggtgctgctcacgtttctctcgacggttatcctgatggccatcttggggaacctgctggtgatggtggctgtgtgctgggacaggcagctcaggaaaataaaaacaaattatttcattgtatctcttgcttttgcggatctgctggtttcggtgctggtgatgccctttggtgccattgagctggttcaagacatctggatttatggggaggtgttttgtcttgttcggacatctctggacgtcctgctcacaacggcatcgatttttcacctgtgctgcatttctctggataggtattacgccatctgctgccagcctttggtctataggaacaagatgacccctctgcgcatcgcattaatgctgggaggctgctgggtcatccccacgtttatttcttttctccctataatgcaaggctggaataacattggcataattgatttgatagaaaagaggaagttcaaccagaactctaactctacgtactgtgtcttcatggtcaacaagccctacgccatcacctgctctgtggtggccttctacatcccatttctcctcatggtgctggcctattaccgcatctatgtcacagctaaggagcatgcccatcagatccagatgttacaacgggcaggagcctcctccgagagcaggcctcagtcggcagaccagcatagcactcatcgcatgaggacagagaccaaagcagccaagaccctgtgcatcatcatgggttgcttctgcctctgctgggcaccattctttgtcaccaatattgtggatcctttcatagactacactgtccctgggcaggtgtggactgctttcctctggctcggctatatcaattccgggttgaacccttttctctacgccttcttgaataagtcttttagacgtgccttcctcatcatcctctgctgtgatgatgagcgctaccgaagaccttccattctgggccagactgtcccttgttcaaccacaaccattaatggatccacacatgtactaaggacagattttctgtttgacagagacattttagcaaggtattggacaaagcctgccagagcgggtccattctcaggcacattgagcattagatgtttgactgcaaggaagcctgtcttgggggatgcagtggagtgtggtggccagtgggagagtcagtgtcacccgccagcaacttctcctttggtggctgctcagcccagtgacacttaggcccctgggacaatgacccagaagacagccatgcctccgaaagagggccaggtcctaagctgctgcttgtgcgcgactgcacccggtattctcttcacctgaggctttccgtccgccagtgcaggaacccggtgctcgctgggcttttcctctgagattccagcaggtggcgctggagggagtcaggggacataatggcctccttgttcactttttatttcccaacactccctcttcccagattctctgcttttgccgcgtggtctctggtgtctctgacatgttcccgtcactcactgtgtctgatctgtctcactcacgttctaagcacgatagcttgctgcgtcctatctcggtcactgatgtctccaaatacgccttctttgctgtgtgggcttccagatatcaacaaaatactccctctctgttcctgtcttagccagaggcgtcgctcctgtcttgcttacttgcttggtcacgtccgtcacagccatgttcaagctatcccctgcctcttcttcgccctgttctgtgccagacgctaacacacttttctccctgtgtctgggtccaaacgtgcatcctcttggttggcccccttgtcagtcccagacgtccacttgctcttccttatgtccaatgtctgtcctcctcttcaggacatgctccatttattttccatggaagacacagggtcagagatctgtcagaggaaaatggtctccacagcaactctggagggaagctgaagacagatagcttcctcctggtgtcctggccgctggcgtgtctgccctgagatgctcgctctcctgctgggctagaacgggacgtcttctaaaaagccttgggcagggctagcaacatcgtaggtgtttattaggcttcaggatctttcccatgaacttgtgatatcattttgaaacccttcaatctggctttgttgctgccaaaggagataactgttggaagttcacactggggaaactcattttcccctgcagctcccccaaggtgcaggagggcaggatccagcagcactggggatgccgaggcaatgctgtacttgaagccagaggacccaaattgccgccctggctgtgctgcaaacaagctgtgagatcttgaatagtgttctttcatctctggaccccactttccacatctgtgcactcaagcttggactagaggacctttaagttttctttctgtttctaagacaacagtatgctgctatagccgtctgctacctcgagaagccatggcctgcctgccttttggctttgtttcaaaggaacgaccctcctcatttgggccttttagacccctgacctttccagctttgtccttcagattaatctggatgtcttttattcaaagctgagtcagtggctcttgcgaatgccccatagcagaagtcccgggaaggtaaatgccaaacccagagccatgtgagattctgactttgatcttggctgtggtttaatagcatctcaggattatttatcatattctctttttttcttattgcttataaggtgtcagttattgtttccattgttgtttactttagttctggaactgaaaccgacaggaagaaactttggaataaggaagagaagattgaccaaaccatccaaatgcc

SEQ ID NO: 102874 - DNA, 2962 bp, Homo sapiens
  Payload ID: 74
  Gene Symbol: HTR4
  Gene Name: 5-hydroxytryptamine (serotonin) receptor 4, G protein-coupled
  Uniprot ID: Q13639
  ENST ID: ENST00000377888
  CDS Start-End: 140-1306
gcggcagcggcggcagcagaagctcggctcagcggctgggggtggccgctcgaatctgccagggcacctcgctccctcgcctctggcagcgggaccctgtgggcattgaaatccaactcactcatgcttatttcctgtaatggacaaacttgatgctaatgtgagttctgaggagggtttcgggtcagtggagaaggtggtgctgctcacgtttctctcgacggttatcctgatggccatcttggggaacctgctggtgatggtggctgtgtgctgggacaggcagctcaggaaaataaaaacaaattatttcattgtatctcttgcttttgcggatctgctggtttcggtgctggtgatgccctttggtgccattgagctggttcaagacatctggatttatggggaggtgttttgtcttgttcggacatctctggacgtcctgctcacaacggcatcgatttttcacctgtgctgcatttctctggataggtattacgccatctgctgccagcctttggtctataggaacaagatgacccctctgcgcatcgcattaatgctgggaggctgctgggtcatccccacgtttatttcttttctccctataatgcaaggctggaataacattggcataattgatttgatagaaaagaggaagttcaaccagaactctaactctacgtactgtgtcttcatggtcaacaagccctacgccatcacctgctctgtggtggccttctacatcccatttctcctcatggtgctggcctattaccgcatctatgtcacagctaaggagcatgcccatcagatccagatgttacaacgggcaggagcctcctccgagagcaggcctcagtcggcagaccagcatagcactcatcgcatgaggacagagaccaaagcagccaagaccctgtgcatcatcatgggttgcttctgcctctgctgggcaccattctttgtcaccaatattgtggatcctttcatagactacactgtccctgggcaggtgtggactgctttcctctggctcggctatatcaattccgggttgaacccttttctctacgccttcttgaataagtcttttagacgtgccttcctcatcatcctctgctgtgatgatgagcgctaccgaagaccttccattctgggccagactgtcccttgttcaaccacaaccattaatggatccacacatgtactaagggatgcagtggagtgtggtggccagtgggagagtcagtgtcacccgccagcaacttctcctttggtggctgctcagcccagtgacacttaggcccctgggacaatgacccagaagacagccatgcctccgaaagagggccaggtcctaagctgctgcttgtgcgcgactgcacccggtattctcttcacctgaggctttccgtccgccagtgcaggaacccggtgctcgctgggcttttcctctgagattccagcaggtggcgctggagggagtcaggggacataatggcctccttgttcactttttatttcccaacactccctcttcccagattctctgcttttgccgcgtggtctctggtgtctctgacatgttcccgtcactcactgtgtctgatctgtctcactcacgttctaagcacgatagcttgctgcgtcctatctcggtcactgatgtctccaaatacgccttctttgctgtgtgggcttccagatatcaacaaaatactccctctctgttcctgtcttagccagaggcgtcgctcctgtcttgcttacttgcttggtcacgtccgtcacagccatgttcaagctatcccctgcctcttcttcgccctgttctgtgccagacgctaacacacttttctccctgtgtctgggtccaaacgtgcatcctcttggttggcccccttgtcagtcccagacgtccacttgctcttccttatgtccaatgtctgtcctcctcttcaggacatgctccatttattttccatggaagacacagggtcagagatctgtcagaggaaaatggtctccacagcaactctggagggaagctgaagacagatagcttcctcctggtgtcctggccgctggcgtgtctgccctgagatgctcgctctcctgctgggctagaacgggacgtcttctaaaaagccttgggcagggctagcaacatcgtaggtgtttattaggcttcaggatctttcccatgaacttgtgatatcattttgaaacccttcaatctggctttgttgctgccaaaggagataactgttggaagttcacactggggaaactcattttcccctgcagctcccccaaggtgcaggagggcaggatccagcagcactggggatgccgaggcaatgctgtacttgaagccagaggacccaaattgccgccctggctgtgctgcaaacaagctgtgagatcttgaatagtgttctttcatctctggaccccactttccacatctgtgcactcaagcttggactagaggacctttaagttttctttctgtttctaagacaacagtatgctgctatagccgtctgctacctcgagaagccatggcctgcctgccttttggctttgtttcaaaggaacgaccctcctcatttgggccttttagacccctgacctttccagctttgtccttcagattaatctggatgtcttttattcaaagctgagtcagtggctcttgcgaatgccccatagcagaagtcccgggaaggtaaatgccaaacccagagccatgtgagattctgactttgatcttggctgtggtttaatagcatctcaggattatttatcatattctctttttttcttattgcttataaggtgtcagttattgtttccattgttgtttactttagttctggaactgaaaccgacaggaagaaactttggaataaggaagagaagattgaccaaaccatccaaatgccaaaaagaaaaa

SEQ ID NO: 102875 - DNA, 1236 bp, Homo sapiens
  Payload ID: 74
  Gene Symbol: HTR4
  Gene Name: 5-hydroxytryptamine (serotonin) receptor 4, G protein-coupled
  Uniprot ID: Q13639
  ENST ID: ENST00000520514
  CDS Start-End: 1-1236
atggacaaacttgatgctaatgtgagttctgaggagggtttcgggtcagtggagaaggtggtgctgctcacgtttctctcgacggttatcctgatggccatcttggggaacctgctggtgatggtggctgtgtgctgggacaggcagctcaggaaaataaaaacaaattatttcattgtatctcttgcttttgcggatctgctggtttcggtgctggtgatgccctttggtgccattgagctggttcaagacatctggatttatggggaggtgttttgtcttgttcggacatctctggacgtcctgctcacaacggcatcgatttttcacctgtgctgcatttctctggataggtattacgccatctgctgccagcctttggtctataggaacaagatgacccctctgcgcatcgcattaatgctgggaggctgctgggtcatccccacgtttatttcttttctccctataatgcaaggctggaataacattggcataattgatttgatagaaaagaggaagttcaaccagaactctaactctacgtactgtgtcttcatggtcaacaagccctacgccatcacctgctctgtggtggccttctacatcccatttctcctcatggtgctggcctattaccgcatctatgtcacagctaaggagcatgcccatcagatccagatgttacaacgggcaggagcctcctccgagagcaggcctcagtcggcagaccagcatagcactcatcgcatgaggacagagaccaaagcagccaagaccctgtgcatcatcatgggttgcttctgcctctgctgggcaccattctttgtcaccaatattgtggatcctttcatagactacactgtccctgggcaggtgtggactgctttcctctggctcggctatatcaattccgggttgaacccttttctctacgccttcttgaataagtcttttagacgtgccttcctcatcatcctctgctgtgatgatgagcgctaccgaagaccttccattctgggccagactgtcccttgttcaaccacaaccattaatggatccacacatgtactaagttctggaactgaaaccgacaggaagaaactttggaataaggaagagaagattgaccaaaccatccaaatgccaaaaagaaaaagaaaaaaaaaagcctctctgtcctatgaagacttaattctgttggggagaaagtcatgttttagggaaggaaaatag

SEQ ID NO: 102876 - DNA, 1323 bp, Homo sapiens
  Payload ID: 74
  Gene Symbol: HTR4
  Gene Name: 5-hydroxytryptamine (serotonin) receptor 4, G protein-coupled
  Uniprot ID: Q13639
  ENST ID: ENST00000521530
  CDS Start-End: 7-1170
cctgtaatggacaaacttgatgctaatgtgagttctgaggagggtttcgggtcagtggagaaggtggtgctgctcacgtttctctcgacggttatcctgatggccatcttggggaacctgctggtgatggtggctgtgtgctgggacaggcagctcaggaaaataaaaacaaattatttcattgtatctcttgcttttgcggatctgctggtttcggtgctggtgatgccctttggtgccattgagctggttcaagacatctggatttatggggaggtgttttgtcttgttcggacatctctggacgtcctgctcacaacggcatcgatttttcacctgtgctgcatttctctggataggtattacgccatctgctgccagcctttggtctataggaacaagatgacccctctgcgcatcgcattaatgctgggaggctgctgggtcatccccacgtttatttcttttctccctataatgcaaggctggaataacattggcataattgatttgatagaaaagaggaagttcaaccagaactctaactctacgtactgtgtcttcatggtcaacaagccctacgccatcacctgctctgtggtggccttctacatcccatttctcctcatggtgctggcctattaccgcatctatgtcacagctaaggagcatgcccatcagatccagatgttacaacgggcaggagcctcctccgagagcaggcctcagtcggcagaccagcatagcactcatcgcatgaggacagagaccaaagcagccaagaccctgtgcatcatcatgggttgcttctgcctctgctgggcaccattctttgtcaccaatattgtggatcctttcatagactacactgtccctgggcaggtgtggactgctttcctctggctcggctatatcaattccgggttgaacccttttctctacgccttcttgaataagtcttttagacgtgccttcctcatcatcctctgctgtgatgatgagcgctaccgaagaccttccattctgggccagactgtcccttgttcaaccacaaccattaatggatccacacatgtactaaggtacaccgttctgcacaggggacatcatcaggaactcgagaaactgcccatacacaatgacccagaatccctggaatcatgcttctgattgaggacatggctcacaacttagccattcattcgcattcatgtttgcatgaacaggtcaccctggcatcacttctgaacctcatcaccaccagtgaggcatcaggtagtaggggctgagagcccagaggaggtacatggaggacagtgttgg

SEQ ID NO: 102877 - DNA, 2272 bp, Homo sapiens
  Payload ID: 74
  Gene Symbol: HTR4
  Gene Name: 5-hydroxytryptamine (serotonin) receptor 4, G protein-coupled
  ENST ID: ENST00000520086
  CDS Start-End: 26-289
gtgcagaagggcactagccctgagtatgtgccacctcgtacgcctctcacatgcttctccgttttccctacttcactttcctgggttcattccaagacggagaatggaagaaaccagagctaaacttgtgtgcctgcagtccagctgtcgtgcctggagagacctctcttccatgatcatccagggtgaattagaccaggtcctcctgagaccagcagcgtggatgttgtatatccaaaaggaccctgtgggcattgaaatccaactcactcatgcttatttcctgtaatggacaaacttgatgctaatgtgagcttccatggacttggacacagttctgtttgggaattggagcatctgggttaagatcttgtgtctctttgactcctggtcttgtgctggattccatacagccagctctcctttatatgcaatcattcccttgattggtgacccctgtttacaagaaaatacccctgacttatttctttctgctattgtatttgtcagtgtccaggcaggaaaatggaaactgttgtatatattttaagcaaacggagatttagtgcaggtcacagagctccatggcagagcagggagaaggagatgttaaagaggtcaagaagcctcatgatcctccttgctgttatgggtctgctggaggcacaaccattgccacatttctggaaccatttgctgttgctcttactgcttaaagcacctccaaatagagaagaaatatactcctctttctcacctcatcgcccaaatttccatgttgaatctctcatttggaaaacataacctgaagccagtgggcaagaaagtctgaaaaatatagttttcaggcttctggctctcattgattgatataagtgcataaaaactgtggcaaataacagatacagcttccccactatataagcttggtttcttctggaacttactgctgtggaggctgcttcacccggcttcagaaacctgagggtgcagatgtgacggcattaatataagcatctgagtctcaatctgcttgactgcaggaagctcagtcttttgtgcagtttaccttgtccacctgttttagagaatttggttattactgaaaggggtgctcccaagtgtcctgactttgttttgcttgccaagctgaacctctgcagcctccagctctatcagttccactgaggcatactttgaattacagcctgctaaatgagcagtctgtaggcctcaaagcttccccctggactttagtaaagcagaagctccttgataatgaaaatccacatcatttcacctgtgaagtgagaagagtatgccttccatgtcatgcttgatcaaagtgggccccatactaaaattgcttgagatagaagtatttcagaagcaagcattgtagcatttcaaattctcagacctaatcttgttccctggaacacacagagggtagtgttatgatgaattttagtatcaacagttacatgttctcagaattattattgacctgcatcgttctgggtctgttgctcagtcaaccctggtgtatctggcttcttttcttatgacaccttgttattcctccctgcagtttgcttcttttattaccaatctttatttaaatgtcacattttaatgagattttttacatagtttattaggacttgtgcaaatcagcggatgcaaatagcttggcaagggtagagatattgcctaattaaaaaaaaaattgcaagatctttatgactctcagctcaagcccagtcagaattacctctgtacctaataggattacagcatggtctagatggaagggtcacttggattcctgtaagactgtgtctttttgtctcactttgcaagcacaggctgtgatgagattcaagaaacgtgattgaagctgtgaattatttacaatttcttagaagctcctttctataatttggagccttgcctatgacttgtagcttcttgcagtcctacaaagcacaatttttgtaaataaagaaataaatatctttatttacaaaagaaataaaaagagtttcagaggattaagtgatttttcctcagcctacacagctaataagtgattaacctgagactaaaatccaagtctttgcttccggaatcactgattttttcaaattatctcccaactctccaaagacaaactatctcctaaggtatatataatttagattaaaatgtcactcaaccatgacaatatctatgaaaatggatttcgacaataaaaggaaaatatcaaatc

SEQ ID NO: 102878 - DNA, 2274 bp, Homo sapiens
  Payload ID: 74
  Gene Symbol: HTR4
  Gene Name: 5-hydroxytryptamine (serotonin) receptor 4, G protein-coupled
  ENST ID: ENST00000524063
  CDS Start-End: 514-1629
agatgagcagcgctccggccagggagggcgcgtgctggccagcccggaacgggtgagatcgctccagcccgcctctgtgcccactcccctgtgcgccctgccggcagagcggcacccccgctgtccctggcgcccagtgggggcggcagcgggcagggcagcggggaccaccggggctgggggctgttgagcccgtggagtccggctcggttggggagaaggacgatgcgcggcgagcccaggtgatccggggctggggtcctgcgcccgcagcccctggcccgcgcctcacgctcgccggctccccagcgcgggggctggagcccgcacccgagggggcggcagggagggcgcaggcagcggctgggagcgcagcggcagcggcggcagcagaagctcggctcagcggctgggggtggccgctcgaatctgccagggcacctcgctccctcgcctctggcagcgggaccctgtgggcattgaaatccaactcactcatgcttatttcctgtaatggacaaacttgatgctaatgtgagttctgaggagggtttcgggtcagtggagaaggtggtgctgctcacgtttctctcgacggttatcctgatggccatcttggggaacctgctggtgatggtggctgtgtgctgggacaggcagctcaggaaaataaaaacaaattatttcattgtatctcttgcttttgcggatctgctggtttcggtgctggtgatgccctttggtgccattgagctggttcaagacatctggatttatggggaggtgttttgtcttgttcggacatctctggacgtcctgctcacaacggcatcgatttttcacctgtgctgcatttctctggataggtattacgccatctgctgccagcctttggtctataggaacaagatgacccctctgcgcatcgcattaatgctgggaggctgctgggtcatccccacgtttatttcttttctccctataatgcaaggctggaataacattggcataattgatttgatagaaaagaggaagttcaaccagaactctaactctacgtactgtgtcttcatggtcaacaagccctacgccatcacctgctctgtggtggccttctacatcccatttctcctcatggtgctggcctattaccgcatctatgtcacagctaaggagcatgcccatcagatccagatgttacaacgggcaggagcctcctccgagagcaggcctcagtcggcagaccagcatagcactcatcgcatgaggacagagaccaaagcagccaagaccctgtgcatcatcatgggttgcttctgcctctgctgggcaccattctttgtcaccaatattgtggatcctttcatagactacactgtccctgggcaggtgtggactgctttcctctggctcggctatatcaattccgggttgaacccttttctctacgccttcttgaataagtcttttagacgtgccttcctcatcatcctctgctgtgatgatgagcgctaccgaagaccttccattctgggccagactgtcccttgttcaaccacaaccattaatggatccacacatgtactaagggctgttagaggaaacaggaattcgacttcttctgcataatgtgagggagagaggtaagaaacaaaggattgaggttataagaacatgtatttcagcacaaaatggaatggattgccttactagggagttcctagtaaagttgaaggagacaattggatgaccatcagtcaattaaaagtgttgattgaccgaatatcagtaactggaagaactgaatgttcattagtcaacatttctggggaagagggatgcagtggagtgtggtggccagtgggagagtcagtgtcacccgccagcaacttctcctttggtggctgctcagcccagtgacacttaggcccctgggacaatgacccagaagacagccatgcctccgaaagagggccaggtcctaagctgctgcttgtgcgcgactgcacccggtattctcttcacctgaggctttccgtccgccagtgcaggaacccggtgctcgctgggcttttcctctgagattccagcaggtggcgctggagggagtcaggggacataatggcctccttgttcactttttatttcccaacactccctcttcccagattctctgcttttgccgcgtggtctctggtgtctctgacatgttcccgtcactcactgtgtctgatctgtctcactcacgttctaagcacgatagcttgctgcgtc

SEQ ID NO: 102879 - DNA, 1326 bp, Homo sapiens
  Payload ID: 74
  Gene Symbol: HTR4
  Gene Name: 5-hydroxytryptamine (serotonin) receptor 4, G protein-coupled
  Uniprot ID: Q13639
  ENST ID: ENST00000522588
  CDS Start-End: 1-1137
atggacaaacttgatgctaatgtgagttctgaggagggtttcgggtcagtggagaaggtggtgctgctcacgtttctctcgacggttatcctgatggccatcttggggaacctgctggtgatggtggctgtgtgctgggacaggcagctcaggaaaataaaaacaaattatttcattgtatctcttgcttttgcggatctgctggtttcggtgctggtgatgccctttggtgccattgagctggttcaagacatctggatttatggggaggtgttttgtcttgttcggacatctctggacgtcctgctcacaacggcatcgatttttcacctgtgctgcatttctctggataggtattacgccatctgctgccagcctttggtctataggaacaagatgacccctctgcgcatcgcattaatgctgggaggctgctgggtcatccccacgtttatttcttttctccctataatgcaaggctggaataacattggcataattgatttgatagaaaagaggaagttcaaccagaactctaactctacgtactgtgtcttcatggtcaacaagccctacgccatcacctgctctgtggtggccttctacatcccatttctcctcatggtgctggcctattaccgcatctatgtcacagctaaggagcatgcccatcagatccagatgttacaacgggcaggagcctcctccgagagcaggcctcagtcggcagaccagcatagcactcatcgcatgaggacagagaccaaagcagccaagaccctgtgcatcatcatgggttgcttctgcctctgctgggcaccattctttgtcaccaatattgtggatcctttcatagactacactgtccctgggcaggtgtggactgctttcctctggctcggctatatcaattccgggttgaacccttttctctacgccttcttgaataagtcttttagacgtgccttcctcatcatcctctgctgtgatgatgagcgctaccgaagaccttccattctgggccagactgtcccttgttcaaccacaaccattaatggatccacacatgtactaagtggctgttcccctgtctccagcttcctcctgctcttctgcaatagaccagttcctgtctaactctgaaagtgctctatttctactttaattccactgtggcctgagagcagacattgtgtaatttctattcttttacatttgttaaggtacaccgttctgcacaggggacatcatcaggaactcgagaaactgcccatacacaatgacccagaatccctggaatcatgcttctgattgaggacatggctc

SEQ ID NO: 102880 - DNA, 1242 bp, Homo sapiens
  Payload ID: 74
  Gene Symbol: HTR4
  Gene Name: 5-hydroxytryptamine (serotonin) receptor 4, G protein-coupled
  Uniprot ID: Q13639
  ENST ID: ENST00000521735
  CDS Start-End: 3-1139
taatggacaaacttgatgctaatgtgagttctgaggagggtttcgggtcagtggagaaggtggtgctgctcacgtttctctcgacggttatcctgatggccatcttggggaacctgctggtgatggtggctgtgtgctgggacaggcagctcaggaaaataaaaacaaattatttcattgtatctcttgcttttgcggatctgctggtttcggtgctggtgatgccctttggtgccattgagctggttcaagacatctggatttatggggaggtgttttgtcttgttcggacatctctggacgtcctgctcacaacggcatcgatttttcacctgtgctgcatttctctggataggtattacgccatctgctgccagcctttggtctataggaacaagatgacccctctgcgcatcgcattaatgctgggaggctgctgggtcatccccacgtttatttcttttctccctataatgcaaggctggaataacattggcataattgatttgatagaaaagaggaagttcaaccagaactctaactctacgtactgtgtcttcatggtcaacaagccctacgccatcacctgctctgtggtggccttctacatcccatttctcctcatggtgctggcctattaccgcatctatgtcacagctaaggagcatgcccatcagatccagatgttacaacgggcaggagcctcctccgagagcaggcctcagtcggcagaccagcatagcactcatcgcatgaggacagagaccaaagcagccaagaccctgtgcatcatcatgggttgcttctgcctctgctgggcaccattctttgtcaccaatattgtggatcctttcatagactacactgtccctgggcaggtgtggactgctttcctctggctcggctatatcaattccgggttgaacccttttctctacgccttcttgaataagtcttttagacgtgccttcctcatcatcctctgctgtgatgatgagcgctaccgaagaccttccattctgggccagactgtcccttgttcaaccacaaccattaatggatccacacatgtactaagtggctgttcccctgtctccagcttcctcctgctcttctgcaatagaccagttcctgtctaactctgaaagtgctctgtacaccgttctgcacaggggacatcatcaggaactcgagaaactgcccatacacaatgacccagaatccctggaatcatgcttctga

SEQ ID NO: 102881 - DNA, 1201 bp, Homo sapiens
  Payload ID: 74
  Gene Symbol: HTR4
  Gene Name: 5-hydroxytryptamine (serotonin) receptor 4, G protein-coupled
  Uniprot ID: Q13639
  ENST ID: ENST00000517929
  CDS Start-End: 16-1098
tgcttatttcctgtaatggacaaacttgatgctaatgtgagttctgaggagggtttcgggtcagtggagaaggtggtgctgctcacgtttctctcgacggttatcctgatggccatcttggggaacctgctggtgatggtggctgtgtgctgggacaggcagctcaggaaaataaaaacaaattatttcattgtatctcttgcttttgcggatctgctggtttcggtgctggtgatgccctttggtgccattgagctggttcaagacatctggatttatggggaggtgttttgtcttgttcggacatctctggacgtcctgctcacaacggcatcgatttttcacctgtgctgcatttctctggataggtattacgccatctgctgccagcctttggtctataggaacaagatgacccctctgcgcatcgcattaatgctgggaggctgctgggtcatccccacgtttatttcttttctccctataatgcaaggctggaataacattggcataattgatttgatagaaaagaggaagttcaaccagaactctaactctacgtactgtgtcttcatggtcaacaagccctacgccatcacctgctctgtggtggccttctacatcccatttctcctcatggtgctggcctattaccgcatctatgtcacagctaaggagcatgcccatcagatccagatgttacaacgggcaggagcctcctccgagagcaggcctcagtcggcagaccagcatagcactcatcgcatgaggacagagaccaaagcagccaagaccctgtgcatcatcatgggttgcttctgcctctgctgggcaccattctttgtcaccaatattgtggatcctttcatagactacactgtccctgggcaggtgtggactgctttcctctggctcggctatatcaattccgggttgaacccttttctctacgccttcttgaataagtcttttagacgtgccttcctcatcatcctctgctgtgatgatgagcgctaccgaagaccttccattctgggccagactgtcccttgttcaaccacaaccattaatggatccacacatgtactaagattttgagctccttgaggactgtggccaattcttattgctcatttttttttcttagtgcccaacacaggtttttgtacactgaagttatcaaataaattcattggatgta

SEQ ID NO: 102882 - DNA, 1224 bp, Homo sapiens
  Payload ID: 74
  Gene Symbol: HTR4
  Gene Name: 5-hydroxytryptamine (serotonin) receptor 4, G protein-coupled
  Uniprot ID: Q13639
  ENST ID: ENST00000631296
  CDS Start-End: 20-1186
ctcatgcttatttcctgtaatggacaaacttgatgctaatgtgagttctgaggagggtttcgggtcagtggagaaggtggtgctgctcacgtttctctcgacggttatcctgatggccatcttggggaacctgctggtgatggtggctgtgtgctgggacaggcagctcaggaaaataaaaacaaattatttcattgtatctcttgcttttgcggatctgctggtttcggtgctggtgatgccctttggtgccattgagctggttcaagacatctggatttatggggaggtgttttgtcttgttcggacatctctggacgtcctgctcacaacggcatcgatttttcacctgtgctgcatttctctggataggtattacgccatctgctgccagcctttggtctataggaacaagatgacccctctgcgcatcgcattaatgctgggaggctgctgggtcatccccacgtttatttcttttctccctataatgcaaggctggaataacattggcataattgatttgatagaaaagaggaagttcaaccagaactctaactctacgtactgtgtcttcatggtcaacaagccctacgccatcacctgctctgtggtggccttctacatcccatttctcctcatggtgctggcctattaccgcatctatgtcacagctaaggagcatgcccatcagatccagatgttacaacgggcaggagcctcctccgagagcaggcctcagtcggcagaccagcatagcactcatcgcatgaggacagagaccaaagcagccaagaccctgtgcatcatcatgggttgcttctgcctctgctgggcaccattctttgtcaccaatattgtggatcctttcatagactacactgtccctgggcaggtgtggactgctttcctctggctcggctatatcaattccgggttgaacccttttctctacgccttcttgaataagtcttttagacgtgccttcctcatcatcctctgctgtgatgatgagcgctaccgaagaccttccattctgggccagactgtcccttgttcaaccacaaccattaatggatccacacatgtactaagggatgcagtggagtgtggtggccagtgggagagtcagtgtcacccgccagcaacttctcctttggtggctgctcagcccagtgacacttaggcccctgggacaatgacccagaagacagccatgcctcc

SEQ ID NO: 102883 - DNA, 2912 bp, Homo sapiens
  Payload ID: 75
  Gene Symbol: HTR5A
  Gene Name: 5-hydroxytryptamine (serotonin) receptor 5A, G protein-coupled
  Uniprot ID: P47898
  ENST ID: ENST00000287907
  CDS Start-End: 577-1650
agcattcgctctccggagctgcagcctccgaaggggtggcgggggcaacagggacagaaggcaggtcccagaaagcaggttcccccaaaactggcttccctagcacggagttaaggctgcagccggctgcctagagagaagggtgggcagggagacaacgcggtgagagcgactgctctgacgcaccagcccctctcctgcacccacacgctgctggccgcccagcttctccccgatctgggagatgctcggctctgggcggccaaacagcctttccaccaaggcgaggagccctgggctcctgacagcttaggcgggccctggctgcgacacgcagcccctcgcctctgcttccttagcctctgagggcttcagacctgccgcgcttgcagccacaccatctccaacggatgctcactagcaggaaattggggccaaattcacaggcactttccagaaactcccccactggccagaggttgcaaacatccggattggctctgggcacagtggccgccttaagtcctcctgaacaccccttctgcaagtaccccagggcggtctcctgacccagagatggatttacctgtgaacctaacctccttttccctctccaccccctcccctttggagaccaaccacagcctcggcaaagacgacctgcgccccagctcgcccctgctctcggtcttcggagtgcttattctcaccttgctgggctttctggtggcggcgacgttcgcctggaacctgctggtgctggcgaccatcctccgtgtacgcaccttccaccgcgtgccccacaacctggtggcatccatggccgtctcggatgtcctggtggccgcgctggtcatgccgctgagcctggtgcacgagctgtccgggcgccgctggcagctaggtcggaggctgtgccagctttggatcgcgtgcgacgtgctttgctgcacggccagcatctggaacgtgacggccatagccctggaccgctactggtccatcacgcgccacatggaatacacgctccgcacccgcaagtgcgtctccaacgtcatgatcgcgctcacctgggcactctccgctgtcatctctctggccccgctgctttttggctggggagagacgtactctgagggcagcgaggagtgccaggtaagccgcgagccttcctacgccgtgttctccaccgtaggcgccttctacctgccgctctgtgtggtgctcttcgtgtactggaagatctacaaggctgccaagttccgcgtgggctccaggaagaccaatagcgtctcacccatatccgaagctgtggaggtgaaggactctgccaaacagccccagatggtgttcacggtccgccacgccaccgtcaccttccagccagaaggggacacgtggcgggagcagaaggagcagcgggccgccctcatggtgggcatcctcattggcgtgttcgtgctctgctggatccccttctttctcaccgagctcatcagtcccctctgctcctgtgacatccccgccatctggaaaagcatcttcctgtggcttggctactccaactccttctttaaccccctgatctatacggctttcaacaagaactacaacagcgccttcaagaacttcttttctaggcaacactgagggagaggaccaggattgaaaaaagtttcttcccataattcagtggaattcccagttcatccatttcccatccccacccaacagccatgtggacgggatgaatcctcaccattctccagggtcatcttcagaactgcactggcctcttttccacctcctcagtaggaatatgactcctcatagagttacggtgacatgatgtatctaacttatctactatccctttctctgtgctgacagtcatggtctttgcccgcaaagtgtcctttcctccccaaattcactctggcatggtgatcgacattgtcttaaagaagtcaaggcaaataagaaggaggaggtaaaacaatatgggcaggttgagattgaatagaaaagaatgaacaagtcatgatgtagacctctgagggtaggagaccatagttccaggctttctggcacagtccccatttcaaatattctctgtggtcctagtacatatatcctaatactgatggggtatgacccaagagttgaccacaaaacactgtctccaaatatattaaagtatatagtcctatccatgagagcagggaatcttagctttaaggttttgtttgtggcaaccacacacgaacatacacacacacacacacacaactatgaaagaggcaggtgttctagctagctagtttactccaaaatgcaatccgttgacatgaaacaggcactgagggtaactacttcctttcattttgaagcaacagtttataaacaggaaagtctactggtttcatagaatctgtcagatttgtttatttgctactggtttcacgcgcgtggactatattccagtgtttctagtcaaagacctttatcctcaaatcatgagattagagtaaaacaactgctgtaaggttgagcatttcatgaccaatgactatgaaggcacattcaccaaacacaggcactttaagggcatccttgattaatttgctaattgctattttttgttggtatgtgaattcctgctaggaggccgaggctagtaggcaatgaaaaagacagaacaatggtaaaatgcagccccagtcctctacaaattgacagtataatttatgaggtgaggcagttaagtgatgatgcagcatttggatgatcatgtaaaaccagtgtcattacacaaaacttaaaaaaaaatcctaggcaataaaactgcctgtggtctgctatgtctctgactcttcaaatgcatgaattaaagaatgatataataatctctg

SEQ ID NO: 102884 - DNA, 1984 bp, Homo sapiens
  Payload ID: 76
  Gene Symbol: HTR6
  Gene Name: 5-hydroxytryptamine (serotonin) receptor 6, G protein-coupled
  Uniprot ID: P50406
  ENST ID: ENST00000289753
  CDS Start-End: 468-1790
cccgagagcgcccattcacccccctcacccacctccccgcgttcccacttccccgcactctgacccggccggacgcccctcccctatcttgccgcccgccccctccagggggctctgctcccaccccagggagcccatccgacctctgcttgacttcccgccgcttccttcaggggcctcggctcatcgggtgcccctccccaaacttccaacccgtttgctccaggagttcctgccccatccccgagggcgcccaaatagccacactgtgtcctcctgtagtcgctgccccctgacctagcgcgacccagcgcccccgcccatgtccccccactcacctcccccggggggcgtggtgagtcgcggtctgttctcacggacggtccccgtccagcctgcgcttcgccggggccctcatctgctttcccgccaccctatcactcccttgccgtccaccctcggtcctcatggtcccagagccgggcccaaccgccaatagcaccccggcctggggggcagggccgccgtcggccccggggggcagcggctgggtggcggccgcgctgtgcgtggtcatcgcgctgacggcggcggccaactcgctgctgatcgcgctcatctgcactcagcccgcgctgcgcaacacgtccaacttcttcctggtgtcgctcttcacgtctgacctgatggtggggctggtggtgatgccgccggccatgctgaacgcgctgtacgggcgctgggtgctggcgcgcggcctctgcctgctctggaccgccttcgacgtgatgtgctgcagcgcctccatcctcaacctctgcctcatcagcctggaccgctacctgctcatcctctcgccgctgcgctacaagctgcgcatgacgcccctgcgtgccctggccctagtcctgggcgcctggagcctcgccgctctcgcctccttcctgcccctgctgctgggctggcacgagctgggccacgcacggccacccgtccctggccagtgccgcctgctggccagcctgccttttgtccttgtggcgtcgggcctcaccttcttcctgccctcgggtgccatatgcttcacctactgcaggatcctgctagctgcccgcaagcaggccgtgcaggtggcctccctcaccaccggcatggccagtcaggcctcggagacgctgcaggtgcccaggaccccacgcccaggggtggagtctgctgacagcaggcgtctagccacgaagcacagcaggaaggccctgaaggccagcctgacgctgggcatcctgctgggcatgttctttgtgacctggttgcccttctttgtggccaacatagtccaggccgtgtgcgactgcatctccccaggcctcttcgatgtcctcacatggctgggttactgtaacagcaccatgaaccccatcatctacccactcttcatgcgggacttcaagcgggcgctgggcaggttcctgccatgtccacgctgtccccgggagcgccaggccagcctggcctcgccatcactgcgcacctctcacagcggcccccggcccggccttagcctacagcaggtgctgccgctgcccctgccgccggactcagattcggactcagacgcaggctcaggcggctcctcgggcctgcggctcacggcccagctgctgcttcctggcgaggccacccaggaccccccgctgcccaccagggccgctgccgccgtcaatttcttcaacatcgaccccgcggagcccgagctgcggccgcatccacttggcatccccacgaactgacccgggcttggggctggccaatggggagctggattgagcagaacccagaccctgagtccttgggccagctcttggctaagaccaggaggctgcaagtctcctagaagccctctgagctccagaggggtgcgcagagctgaccccctgctgccatctccaggccccttacctgcagggatcatagctgactcaga

SEQ ID NO: 102885 - DNA, 3028 bp, Homo sapiens
  Payload ID: 77
  Gene Symbol: HTR7
  Gene Name: 5-hydroxytryptamine (serotonin) receptor 7, adenylate cyclase-coupled
  Uniprot ID: P34969
  ENST ID: ENST00000277874
  CDS Start-End: 28-1365
ccatgggcagcggcacacggcggcgcgatgatggacgttaacagcagcggccgcccggacctctacgggcacctccgctctttccttctgccagaagtggggcgcgggctgcccgacttgagccccgacggtggcgccgacccggtcgcgggctcctgggcgccgcacctgctgagcgaggtgacagccagcccggcgcccacctgggacgcgcccccggacaatgcctccggctgtggggaacagatcaactacggcagagtcgagaaagttgtgatcggctccatcctgacgctcatcacgctgctgacgatcgcgggcaactgcctggtggtgatctccgtgtgcttcgtcaagaagctccgccagccctccaactacctgatcgtgtccctggcgctggccgacctctcggtggctgtggcggtcatgcccttcgtcagcgtcaccgacctcatcgggggcaagtggatctttggacactttttctgtaatgtcttcatcgccatggacgtcatgtgctgcacggcctcgatcatgaccctgtgcgtgatcagcattgacaggtaccttgggatcacaaggcccctcacataccctgtgaggcagaatgggaaatgcatggcgaagatgattctctccgtctggcttctctccgcctccatcaccttacctccactctttggatgggctcagaatgtaaatgatgataaggtgtgcttgatcagccaggactttggctatacgatttactctaccgcagtggcattttatatccccatgtccgtcatgcttttcatgtactaccagatttacaaggctgccaggaagagtgctgccaaacacaagtttcctggcttccctcgagtggagccagacagcgtcatcgccctgaatggcatagtgaagctccagaaggaggtggaagagtgtgcaaacctttcgagactcctcaagcatgaaaggaaaaacatctccatctttaagcgagaacagaaagcagccaccaccctggggatcatcgtcggggcctttaccgtgtgctggctgccatttttcctcctctcgacagccagacccttcatctgtggcacttcctgcagctgcatcccactgtgggtggagaggacatttctgtggctaggctatgcaaactctctcattaacccttttatatatgccttcttcaaccgggacctgaggaccacctatcgcagcctgctccagtgccagtaccggaatatcaaccggaagctctcagctgcaggcatgcatgaagccctgaagcttgctgagaggccagagagacctgagtttgtgctacaaaatgctgactactgtagaaaaaaaggtcatgattcatgattgaaagcagaacaatggagatgaaataaacaaggcaaaatagaggtggaaacagaaggaagtcatttgctgagtctgcagaatggaatgcagcttctgtcctttcttgggatgtctaaaacatgacaaacagggtgatctgttgtacacactatcttatgagggagatggtgacttctccttttttctgtggatcagtgctattgtgtgttctcagtttaagatagcagatcatctcagcagtaagcacaccaacagaactgagttccagaaaggaagcagtttctggtgctttgcatatgtccaaatccatgcaagtgggagaaagttccagtgcacacttcccatgcttctgagtctaggcgttgtggtgaatatgcaggaatcattcatgagacagaatgtattttgttgtatgacagaaggcttttccaagcaaactgcggtgagcgtagtgttgaatatgttgcatgtccatgttagaaaacagaatccagtcatcagctaatacaaatgatttcccagagcagtgtttgtttcaagcttctgtcaaatagtttggcttttctgcagggtctctgtgatttccccacctatgtacttttctgtgttaactcacttattatggtataactcaggaacaggtctcaggatggagagaagcatacaacatgagcaaagctttttctcgtgctctgaagggtcttgagaggggagtgggatgccttctgtgaggatttttatcgcagtgaagctcaagtggtacccaactgcgttgtaattaacatgattattggcatgtttttgactctcattttctacaaggctgcagtgggcccacccatgggctggcccataactgtatgttatgtggaagaagtgtgggaatgatgggttttccatgaaatgtgatgcttctggagatggggcataaacatgttcattcttgttgagctgcattgtgttaaaccaaattgtgtgaagcgaggtcacctggaccactcttgggaaatgcttcagaacaccagtctgttccttctagagaatttgtttttgtgttctatgtatcttaaatcaaatgtgtgcctaagcaattctgtcctctgattcccacccctacccaccaaaaaatggtagacatgaaaggcaggtgaggaaacagaaaaggtctctttgcagatatatattttttaaatggcactatgtagtaattaagagctaaggagacagaaagacagtagatgagaatagaagagtacctgtacctacaaggggaaaaatgaatgcaattctttatttgataagagtgaactgaaagagaatattattttcctacaataaagcaagctgtcctctcacaggataaagtggaattctgacatggattatggacttcttctaactcccattgacattgcttcttaccagacatggggaaaagctacctttcctgaaaggggaggagggcactgtcctttcagacaaagcttgtacaaattcctgaaccgcaaatttgctgaagtgaccgtatatattatattcataatttaaatgattatttatggtcagatacatattgttaaacttgaaaatgttttattacattacatcaaataaagtttatttgtagctgaaataaagcaacgtaagtaacaatttttaa

SEQ ID NO: 102886 - DNA, 3126 bp, Homo sapiens
  Payload ID: 77
  Gene Symbol: HTR7
  Gene Name: 5-hydroxytryptamine (serotonin) receptor 7, adenylate cyclase-coupled
  Uniprot ID: P34969
  ENST ID: ENST00000336152
  CDS Start-End: 28-1467
ccatgggcagcggcacacggcggcgcgatgatggacgttaacagcagcggccgcccggacctctacgggcacctccgctctttccttctgccagaagtggggcgcgggctgcccgacttgagccccgacggtggcgccgacccggtcgcgggctcctgggcgccgcacctgctgagcgaggtgacagccagcccggcgcccacctgggacgcgcccccggacaatgcctccggctgtggggaacagatcaactacggcagagtcgagaaagttgtgatcggctccatcctgacgctcatcacgctgctgacgatcgcgggcaactgcctggtggtgatctccgtgtgcttcgtcaagaagctccgccagccctccaactacctgatcgtgtccctggcgctggccgacctctcggtggctgtggcggtcatgcccttcgtcagcgtcaccgacctcatcgggggcaagtggatctttggacactttttctgtaatgtcttcatcgccatggacgtcatgtgctgcacggcctcgatcatgaccctgtgcgtgatcagcattgacaggtaccttgggatcacaaggcccctcacataccctgtgaggcagaatgggaaatgcatggcgaagatgattctctccgtctggcttctctccgcctccatcaccttacctccactctttggatgggctcagaatgtaaatgatgataaggtgtgcttgatcagccaggactttggctatacgatttactctaccgcagtggcattttatatccccatgtccgtcatgcttttcatgtactaccagatttacaaggctgccaggaagagtgctgccaaacacaagtttcctggcttccctcgagtggagccagacagcgtcatcgccctgaatggcatagtgaagctccagaaggaggtggaagagtgtgcaaacctttcgagactcctcaagcatgaaaggaaaaacatctccatctttaagcgagaacagaaagcagccaccaccctggggatcatcgtcggggcctttaccgtgtgctggctgccatttttcctcctctcgacagccagacccttcatctgtggcacttcctgcagctgcatcccactgtgggtggagaggacatttctgtggctaggctatgcaaactctctcattaacccttttatatatgccttcttcaaccgggacctgaggaccacctatcgcagcctgctccagtgccagtaccggaatatcaaccggaagctctcagctgcaggcatgcatgaagccctgaagcttgctgagaggccagagagacctgagtttgtgctgagggcctgcacaaggagggtgctgttgagaccagaaaagaggccaccggtatctgtgtgggtgctacaatctccagaccatcacaattggttagcagacaaaatgctgactactgtagaaaaaaaggtcatgattcatgattgaaagcagaacaatggagatgaaataaacaaggcaaaatagaggtggaaacagaaggaagtcatttgctgagtctgcagaatggaatgcagcttctgtcctttcttgggatgtctaaaacatgacaaacagggtgatctgttgtacacactatcttatgagggagatggtgacttctccttttttctgtggatcagtgctattgtgtgttctcagtttaagatagcagatcatctcagcagtaagcacaccaacagaactgagttccagaaaggaagcagtttctggtgctttgcatatgtccaaatccatgcaagtgggagaaagttccagtgcacacttcccatgcttctgagtctaggcgttgtggtgaatatgcaggaatcattcatgagacagaatgtattttgttgtatgacagaaggcttttccaagcaaactgcggtgagcgtagtgttgaatatgttgcatgtccatgttagaaaacagaatccagtcatcagctaatacaaatgatttcccagagcagtgtttgtttcaagcttctgtcaaatagtttggcttttctgcagggtctctgtgatttccccacctatgtacttttctgtgttaactcacttattatggtataactcaggaacaggtctcaggatggagagaagcatacaacatgagcaaagctttttctcgtgctctgaagggtcttgagaggggagtgggatgccttctgtgaggatttttatcgcagtgaagctcaagtggtacccaactgcgttgtaattaacatgattattggcatgtttttgactctcattttctacaaggctgcagtgggcccacccatgggctggcccataactgtatgttatgtggaagaagtgtgggaatgatgggttttccatgaaatgtgatgcttctggagatggggcataaacatgttcattcttgttgagctgcattgtgttaaaccaaattgtgtgaagcgaggtcacctggaccactcttgggaaatgcttcagaacaccagtctgttccttctagagaatttgtttttgtgttctatgtatcttaaatcaaatgtgtgcctaagcaattctgtcctctgattcccacccctacccaccaaaaaatggtagacatgaaaggcaggtgaggaaacagaaaaggtctctttgcagatatatattttttaaatggcactatgtagtaattaagagctaaggagacagaaagacagtagatgagaatagaagagtacctgtacctacaaggggaaaaatgaatgcaattctttatttgataagagtgaactgaaagagaatattattttcctacaataaagcaagctgtcctctcacaggataaagtggaattctgacatggattatggacttcttctaactcccattgacattgcttcttaccagacatggggaaaagctacctttcctgaaaggggaggagggcactgtcctttcagacaaagcttgtacaaattcctgaaccgcaaatttgctgaagtgaccgtatatattatattcataatttaaatgattatttatggtcagatacatattgttaaacttgaaaatgttttattacattacatcaaataaagtttatttgtagctgaaataaagcaacgtaagtaacaatttttaa

SEQ ID NO: 102887 - DNA, 3033 bp, Homo sapiens
  Payload ID: 77
  Gene Symbol: HTR7
  Gene Name: 5-hydroxytryptamine (serotonin) receptor 7, adenylate cyclase-coupled
  Uniprot ID: P34969
  ENST ID: ENST00000371719
  CDS Start-End: 28-1326
ccatgggcagcggcacacggcggcgcgatgatggacgttaacagcagcggccgcccggacctctacgggcacctccgctctttccttctgccagaagtggggcgcgggctgcccgacttgagccccgacggtggcgccgacccggtcgcgggctcctgggcgccgcacctgctgagcgaggtgacagccagcccggcgcccacctgggacgcgcccccggacaatgcctccggctgtggggaacagatcaactacggcagagtcgagaaagttgtgatcggctccatcctgacgctcatcacgctgctgacgatcgcgggcaactgcctggtggtgatctccgtgtgcttcgtcaagaagctccgccagccctccaactacctgatcgtgtccctggcgctggccgacctctcggtggctgtggcggtcatgcccttcgtcagcgtcaccgacctcatcgggggcaagtggatctttggacactttttctgtaatgtcttcatcgccatggacgtcatgtgctgcacggcctcgatcatgaccctgtgcgtgatcagcattgacaggtaccttgggatcacaaggcccctcacataccctgtgaggcagaatgggaaatgcatggcgaagatgattctctccgtctggcttctctccgcctccatcaccttacctccactctttggatgggctcagaatgtaaatgatgataaggtgtgcttgatcagccaggactttggctatacgatttactctaccgcagtggcattttatatccccatgtccgtcatgcttttcatgtactaccagatttacaaggctgccaggaagagtgctgccaaacacaagtttcctggcttccctcgagtggagccagacagcgtcatcgccctgaatggcatagtgaagctccagaaggaggtggaagagtgtgcaaacctttcgagactcctcaagcatgaaaggaaaaacatctccatctttaagcgagaacagaaagcagccaccaccctggggatcatcgtcggggcctttaccgtgtgctggctgccatttttcctcctctcgacagccagacccttcatctgtggcacttcctgcagctgcatcccactgtgggtggagaggacatttctgtggctaggctatgcaaactctctcattaacccttttatatatgccttcttcaaccgggacctgaggaccacctatcgcagcctgctccagtgccagtaccggaatatcaaccggaagctctcagctgcaggcatgcatgaagccctgaagcttgctgagaggccagagagacctgagtttgtgctgtaagacaaaatgctgactactgtagaaaaaaaggtcatgattcatgattgaaagcagaacaatggagatgaaataaacaaggcaaaatagaggtggaaacagaaggaagtcatttgctgagtctgcagaatggaatgcagcttctgtcctttcttgggatgtctaaaacatgacaaacagggtgatctgttgtacacactatcttatgagggagatggtgacttctccttttttctgtggatcagtgctattgtgtgttctcagtttaagatagcagatcatctcagcagtaagcacaccaacagaactgagttccagaaaggaagcagtttctggtgctttgcatatgtccaaatccatgcaagtgggagaaagttccagtgcacacttcccatgcttctgagtctaggcgttgtggtgaatatgcaggaatcattcatgagacagaatgtattttgttgtatgacagaaggcttttccaagcaaactgcggtgagcgtagtgttgaatatgttgcatgtccatgttagaaaacagaatccagtcatcagctaatacaaatgatttcccagagcagtgtttgtttcaagcttctgtcaaatagtttggcttttctgcagggtctctgtgatttccccacctatgtacttttctgtgttaactcacttattatggtataactcaggaacaggtctcaggatggagagaagcatacaacatgagcaaagctttttctcgtgctctgaagggtcttgagaggggagtgggatgccttctgtgaggatttttatcgcagtgaagctcaagtggtacccaactgcgttgtaattaacatgattattggcatgtttttgactctcattttctacaaggctgcagtgggcccacccatgggctggcccataactgtatgttatgtggaagaagtgtgggaatgatgggttttccatgaaatgtgatgcttctggagatggggcataaacatgttcattcttgttgagctgcattgtgttaaaccaaattgtgtgaagcgaggtcacctggaccactcttgggaaatgcttcagaacaccagtctgttccttctagagaatttgtttttgtgttctatgtatcttaaatcaaatgtgtgcctaagcaattctgtcctctgattcccacccctacccaccaaaaaatggtagacatgaaaggcaggtgaggaaacagaaaaggtctctttgcagatatatattttttaaatggcactatgtagtaattaagagctaaggagacagaaagacagtagatgagaatagaagagtacctgtacctacaaggggaaaaatgaatgcaattctttatttgataagagtgaactgaaagagaatattattttcctacaataaagcaagctgtcctctcacaggataaagtggaattctgacatggattatggacttcttctaactcccattgacattgcttcttaccagacatggggaaaagctacctttcctgaaaggggaggagggcactgtcctttcagacaaagcttgtacaaattcctgaaccgcaaatttgctgaagtgaccgtatatattatattcataatttaaatgattatttatggtcagatacatattgttaaacttgaaaatgttttattacattacatcaaataaagtttatttgtagctgaaataaagcaacgtaagtaacaatttttaa

SEQ ID NO: 102888 - DNA, 5234 bp, Homo sapiens
  Payload ID: 78
  Gene Symbol: MTR
  Gene Name: 5-methyltetrahydrofolate-homocysteine methyltransferase
  ENST ID: ENST00000366576
  CDS Start-End: 1-2460
ggcatgctagatggtccaagtgcaatgaccagattttgcaacttaattgcttccgagccagacatcgcaaaggtacctttgtgcatcgactcctccaattttgctgtgattgaagctgggttaaagtgctgccaagggaagtgcattgtcaatagcattagtctgaaggaaggagaggcaacagaaacagacacaaaaatcagagtgtgcacccgggcctaccatctgcttgtgaaaaaactgggctttaatccaaatgacattatttttgaccctaatatcctaaccattgggactggaatggaggaacacaacttgtatgccattaattttatccatgcaacaaaagtcattaaagaaacattacctggagccagaataagtggaggtctttccaacttgtccttctccttccgaggaatggaagccattcgagaagcaatgcatggggttttcctttaccatgcaatcaagtctggcatggacatggggatagtgaatgctggaaacctccctgtgtatgatgatatccataaggaacttctgcagctctgtgaagatctcatctggaataaagaccctgaggccactgagaagctcttacgttatgcccagactcaaggcacaggagggaagaaagtcattcagactgatgagtggagaaatggccctgtcgaagaacgccttgagtatgcccttgtgaagggcattgaaaaacatattattgaggatactgaggaagccaggttaaaccaaaaaaaatatccccgacctctcaatataattgaaggacccctgatgaatggaatgaaaattgttggtgatctttttggagctggaaaaatgtttctacctcaggttataaagtcagcccgggttatgaagaaggctgttggccaccttatccctttcatggaaaaagaaagagaagaaaccagagtgcttaacggcacagtagaagaagaggacccttaccagggcaccatcgtgctggccactgttaaaggcgacgtgcacgacataggcaagaacatagttggagtagtccttggctgcaataatttccgagttattgatttaggagtcatgactccatgtgataagatactgaaagctgctcttgaccacaaagcagatataattggcctgtcaggactcatcactccttccctggatgaaatgatttttgttgccaaggaaatggagagattagctataaggattccattgttgattggaggagcaaccacttcaaaaacccacacagcagttaaaatagctccgagatacagtgcacctgtaatccatgtcctggacgcgtccaagagtgtggtggtgtgttcccagctgttagatgaaaatctaaaggatgaatactttgaggaaatcatggaagaatatgaagatattagacaggaccattatgagtctctcaaggagaggagatacttacccttaagtcaagccagaaaaagtggtttccaaatggattggctgtctgaacctcacccagtgaagcccacgtttattgggacccaggtctttgaagactatgacctgcagaagctggtggactacattgactggaagcctttctttgatgtctggcagctccggggcaagtacccgaatcgaggctttcccaagatatttaacgacaaaacagtaggtggagaggccaggaaggtctacgatgatgcccacaatatgctgaacacactgattagtcaaaagaaactccgggcccggggtgtggttgggttctggccagcacagagtatccaagacgacattcacctgtacgcagaggctgctgtgccccaggctgcagagcccatagccaccttctatgggttaaggcaacaggctgagaaggactctgccagcacggagccatactactgcctctcagacttcatcgctcccttgcattctggcatccgtgactacctgggcctgtttgccgttgcctgctttggggtagaagagctgagcaaggcctatgaggatgatggtgacgactacagcagcatcatggtcaaggcgctgggggaccggctggcagaggcctttgcagaagagctccatgaaagagttcgccgagaactgtgggcctactgtggcagtgagcagctggacgtcgcagacctgcgcaggctgcggtacaagggcatccgcccggctcctggctaccccagccagcccgaccacaccgagaagctcaccatgtggagactcgcagacatcgagcagtctacaggcattaggttaacagaatcattagcaatggcacctgcttcagcagtctcaggcctctacttctccaatttgaagtccaaatattttgctgtggggaagatttccaaggatcaggttgaggattatgcattgaggaagaacatatctgtggctgaggttgagaaatggcttggacccattttgggatatgatacagactaactttttttttttttttgccttttttattcttgatgatcctcaaggaaatacaacctagggtgccttaaaaataacaacaacaaaaaacctgtgtgcatctggctgacacttacctgcttctggttttcgaagactatttagtggaaccttgtagaggagcagggtcttcctgcagtgcctggaaaacaggcgctgtttttttgggaccttgcgtgaagagcagtgagcagggttcctgtggtttccctggtccctctgagatggggacagactgaagacagaggtcgtttgatttcaaagcaagtcaacctgcttttttctgtttttacagtggaatctaggaggccacttagtcgtctttttttcctcttagaagaaaagcctgaaactgagttgaatagagaagtgtgaccctgtgacaaaatgatactgtgagaaatggggcattttaatctaagtggttataacagtggattctgacggggaaggtgtagctctgttctcttcggaagacctcgttttctaaaggctggactaaatggctgcagaactccctttggcaaaaggcatgcgctcactgcttgcttgtcagaaacactgaagccatttgccccagtgtggtcaagcagccatgctttctgggcattttcgtcctcccataatttcatatttccgtacccctgaggaaacaaaaaggaaatgaggagagaaagttactgttaagggtggttaacattttttttgttttgttttgttttggtttttttttttttgagacagagtctggctctgtcgcccaggctggagtgcaggggcgcaatctcggctcatagcaagctccgcctcctgggttcatgccattctcctgcctcagcctccagagtagctgggactacaggtgcccgccaccacacccggctaattttttgtgtttttacaaaatacaaaaaagtagagacaggatttcactgtgttagccaggatggtcttgatctcccgacctcgtgatctgcccacctcagcctcccaaaatgctgggattacaggcgtgagccaccgagcctggccggttaacatcttttaattgtttccaggattgagcaggttctcagctgggctctgatatcccgtgcggagttggacaagtgggcagcataaagtcactcatttcttaccattttattcccctcaattctcaatatattcagtaatgaagaatggtgccaccactcaagcaacaagcctcaaactcaaccatgtcatctttttcttggatgattgcagttatttcaaaaatttgcatgcaaaatatacactcatcctacttcaagatggtggtggcaatagtcaggagaaggtaacattggagtcctggtttgattcgaaggatgaagacgaagaagcaagggaggaacaaatgaagaaccatctttgttcatgaataggaatattcaagattataaaggtatcaggtctcctaaaattgatctatggatttaataccattttcaatggaaattccaacagattttattgaatgaaacaagcaggtgtttatatggagtagcaaaggacttaaaattaccaaatgcttctaaatatgaaggagaggttggggacacgcaccctatgtgataccaagttttattgtcaagacagtgtcatggtgcagaggtaggcattctgagcaggggaacaaaataagggcctagaaactcacccgtgcatatgttgacctttgcaaaatgacctggtgacatggcaagtcagtggggacaggaaggaccactccctaagtaatcccagaacaatggctattcatgtgggaaaaaaagaaattttactttctctcaccttacctggtgataagttccaaatatgttaagggctttaatacaaaaagcaaaaattgtcagtgtttggatgaaaaaagccttagggcaggaaagaatctcttgagacataaagtagtaatcataaaggacaagatggttaagtcaattctgttaaaactcaaggcttatattaagcaaacacttgaagtgagaagatgatccacaacttgagaagacatttataatacaaataactgatgaaggattcataatcacaaatatagagaattcctatttaaaaaaatagaaaaatagtgaagactacacaagaggaaatagggcttttaaataaatagatgttctgtagcattggtcagggaaatatgaattaggaccacaatgagattccattttatatccataagatttgcaaaggttgggtctgacagtaccagttgttagatctgtagggacttgtacaacattgtggatgtgtaaacaggcaccactgctttaaaaaacaattatcccttacagacttgaacatttgcagacgttatgatcttgcttccaactcccacctgtatgtccagcaaactcttgcatgtggccactaggaggaatgtgtaagaatgttcatagttacatatttataatagttaataactggaaaaagtgaaatgtatgtctgtctacaggaaaataggtgaataattagatatatatattcattctacgggatattattcagtagtggaaatgagtgaactacagctatacctcacaataagaatgaatctcagaaaatattaaggaaaaaagcaagtttgaagagaccacatggggcgtactatttttattgagcccaaaaacaagcaaaaccaaagaatatgtagtctaagcatacgtatacaataaaactatgctattaaaaaaaaa

SEQ ID NO: 102889 - DNA, 10529 bp, Homo sapiens
  Payload ID: 78
  Gene Symbol: MTR
  Gene Name: 5-methyltetrahydrofolate-homocysteine methyltransferase
  Uniprot ID: Q99707
  ENST ID: ENST00000366577
  CDS Start-End: 395-4192
aaaggttctaaatgtctgcggggctcagagccggatgtcacgtcgtcctcctctgccggttttctcttgggtccttttccgtgccgtcccgcgactccgcctctggccgcgcgtgtctggctgctaggccgacaccaaggactggccgggtacccgggaagaaagcacgtgctccagcagttgccgcgcccagccccgagagaggccctagggcgctgcgggctttcggggtccgcagtccccccgcgacgcgagccaacgggaggcgtcaaaagacccgggccttgtgtggcaggctcgcctggcgctggctggcgtggcccttggccgtcgtcacctgtggagagcacgtcttctctgccgcgccctctgcgcaaggaggagactcgacaacatgtcacccgcgctccaagacctgtcgcaacccgaaggtctgaagaaaaccctgcgggatgagatcaatgccattctgcagaagaggattatggtgctggatggagggatggggaccatgatccagcgggagaagctaaacgaagaacacttccgaggtcaggaatttaaagatcatgccaggccgctgaaaggcaacaatgacattttaagtataactcagcctgatgtcatttaccaaatccataaggaatacttgctggctggggcagatatcattgaaacaaatacttttagcagcactagtattgcccaagctgactatggccttgaacacttggcctaccggatgaacatgtgctctgcaggagtggccagaaaagctgccgaggaggtaactctccagacaggaattaagaggtttgtggcaggggctctgggtccgactaataagacactctctgtgtccccatctgtggaaaggccggattataggaacatcacatttgatgagcttgttgaagcataccaagagcaggccaaaggacttctggatggcggggttgatatcttactcattgaaactatttttgatactgccaatgccaaggcagccttgtttgcactccaaaatctttttgaggagaaatatgctccccggcctatctttatttcagggacgatcgttgataaaagtgggcggactctttccggacagacaggagagggatttgtcatcagcgtgtctcatggagaaccactctgcattggattaaattgtgctttgggtgcagctgaaatgagaccttttattgaaataattggaaaatgtacaacagcctatgtcctctgttatcccaatgcaggtcttcccaacacctttggtgactatgatgaaacgccttctatgatggccaagcacctaaaggattttgctatggatggcttggtcaatatagttggaggatgctgtgggtcaacaccagatcatatcagggaaattgctgaagctgtgaaaaattgtaagcctagagttccacctgccactgcttttgaaggacatatgttactgtctggtctagagcccttcaggattggaccgtacaccaactttgttaacattggagagcgctgtaatgttgcaggatcaaggaagtttgctaaactcatcatggcaggaaactatgaagaagccttgtgtgttgccaaagtgcaggtggaaatgggagcccaggtgttggatgtcaacatggatgatggcatgctagatggtccaagtgcaatgaccagattttgcaacttaattgcttccgagccagacatcgcaaaggtacctttgtgcatcgactcctccaattttgctgtgattgaagctgggttaaagtgctgccaagggaagtgcattgtcaatagcattagtctgaaggaaggagaggacgacttcttggagaaggccaggaagattaaaaagtatggagctgctatggtggtcatggcttttgatgaagaaggacaggcaacagaaacagacacaaaaatcagagtgtgcacccgggcctaccatctgcttgtgaaaaaactgggctttaatccaaatgacattatttttgaccctaatatcctaaccattgggactggaatggaggaacacaacttgtatgccattaattttatccatgcaacaaaagtcattaaagaaacattacctggagccagaataagtggaggtctttccaacttgtccttctccttccgaggaatggaagccattcgagaagcaatgcatggggttttcctttaccatgcaatcaagtctggcatggacatggggatagtgaatgctggaaacctccctgtgtatgatgatatccataaggaacttctgcagctctgtgaagatctcatctggaataaagaccctgaggccactgagaagctcttacgttatgcccagactcaaggcacaggagggaagaaagtcattcagactgatgagtggagaaatggccctgtcgaagaacgccttgagtatgcccttgtgaagggcattgaaaaacatattattgaggatactgaggaagccaggttaaaccaaaaaaaatatccccgacctctcaatataattgaaggacccctgatgaatggaatgaaaattgttggtgatctttttggagctggaaaaatgtttctacctcaggttataaagtcagcccgggttatgaagaaggctgttggccaccttatccctttcatggaaaaagaaagagaagaaaccagagtgcttaacggcacagtagaagaagaggacccttaccagggcaccatcgtgctggccactgttaaaggcgacgtgcacgacataggcaagaacatagttggagtagtccttggctgcaataatttccgagttattgatttaggagtcatgactccatgtgataagatactgaaagctgctcttgaccacaaagcagatataattggcctgtcaggactcatcactccttccctggatgaaatgatttttgttgccaaggaaatggagagattagctataaggattccattgttgattggaggagcaaccacttcaaaaacccacacagcagttaaaatagctccgagatacagtgcacctgtaatccatgtcctggacgcgtccaagagtgtggtggtgtgttcccagctgttagatgaaaatctaaaggatgaatactttgaggaaatcatggaagaatatgaagatattagacaggaccattatgagtctctcaaggagaggagatacttacccttaagtcaagccagaaaaagtggtttccaaatggattggctgtctgaacctcacccagtgaagcccacgtttattgggacccaggtctttgaagactatgacctgcagaagctggtggactacattgactggaagcctttctttgatgtctggcagctccggggcaagtacccgaatcgaggctttcccaagatatttaacgacaaaacagtaggtggagaggccaggaaggtctacgatgatgcccacaatatgctgaacacactgattagtcaaaagaaactccgggcccggggtgtggttgggttctggccagcacagagtatccaagacgacattcacctgtacgcagaggctgctgtgccccaggctgcagagcccatagccaccttctatgggttaaggcaacaggctgagaaggactctgccagcacggagccatactactgcctctcagacttcatcgctcccttgcattctggcatccgtgactacctgggcctgtttgccgttgcctgctttggggtagaagagctgagcaaggcctatgaggatgatggtgacgactacagcagcatcatggtcaaggcgctgggggaccggctggcagaggcctttgcagaagagctccatgaaagagttcgccgagaactgtgggcctactgtggcagtgagcagctggacgtcgcagacctgcgcaggctgcggtacaagggcatccgcccggctcctggctaccccagccagcccgaccacaccgagaagctcaccatgtggagactcgcagacatcgagcagtctacaggcattaggttaacagaatcattagcaatggcacctgcttcagcagtctcaggcctctacttctccaatttgaagtccaaatattttgctgtggggaagatttccaaggatcaggttgaggattatgcattgaggaagaacatatctgtggctgaggttgagaaatggcttggacccattttgggatatgatacagactaactttttttttttttttgccttttttattcttgatgatcctcaaggaaatacaacctagggtgccttaaaaataacaacaacaaaaaacctgtgtgcatctggctgacacttacctgcttctggttttcgaagactatttagtggaaccttgtagaggagcagggtcttcctgcagtgcctggaaaacaggcgctgtttttttgggaccttgcgtgaagagcagtgagcagggttcctgtggtttccctggtccctctgagatggggacagactgaagacagaggtcgtttgatttcaaagcaagtcaacctgcttttttctgtttttacagtggaatctaggaggccacttagtcgtctttttttcctcttagaagaaaagcctgaaactgagttgaatagagaagtgtgaccctgtgacaaaatgatactgtgagaaatggggcattttaatctaagtggttataacagtggattctgacggggaaggtgtagctctgttctcttcggaagacctcgttttctaaaggctggactaaatggctgcagaactccctttggcaaaaggcatgcgctcactgcttgcttgtcagaaacactgaagccatttgccccagtgtggtcaagcagccatgctttctgggcattttcgtcctcccataatttcatatttccgtacccctgaggaaacaaaaaggaaatgaggagagaaagttactgttaagggtggttaacattttttttgttttgttttgttttggtttttttttttttgagacagagtctggctctgtcgcccaggctggagtgcaggggcgcaatctcggctcatagcaagctccgcctcctgggttcatgccattctcctgcctcagcctccagagtagctgggactacaggtgcccgccaccacacccggctaattttttgtgtttttacaaaatacaaaaaagtagagacaggatttcactgtgttagccaggatggtcttgatctcccgacctcgtgatctgcccacctcagcctcccaaaatgctgggattacaggcgtgagccaccgagcctggccggttaacatcttttaattgtttccaggattgagcaggttctcagctgggctctgatatcccgtgcggagttggacaagtgggcagcataaagtcactcatttcttaccattttattcccctcaattctcaatatattcagtaatgaagaatggtgccaccactcaagcaacaagcctcaaactcaaccatgtcatctttttcttggatgattgcagttatttcaaaaatttgcatgcaaaatatacactcatcctacttcaagatggtggtggcaatagtcaggagaaggtaacattggagtcctggtttgattcgaaggatgaagacgaagaagcaagggaggaacaaatgaagaaccatctttgttcatgaataggaatattcaagattataaaggtatcaggtctcctaaaattgatctatggatttaataccattttcaatggaaattccaacagattttattgaatgaaacaagcaggtgtttatatggagtagcaaaggacttaaaattaccaaatgcttctaaatatgaaggagaggttggggacacgcaccctatgtgataccaagttttattgtcaagacagtgtcatggtgcagaggtaggcattctgagcaggggaacaaaataagggcctagaaactcacccgtgcatatgttgacctttgcaaaatgacctggtgacatggcaagtcagtggggacaggaaggaccactccctaagtaatcccagaacaatggctattcatgtgggaaaaaaagaaattttactttctctcaccttacctggtgataagttccaaatatgttaagggctttaatacaaaaagcaaaaattgtcagtgtttggatgaaaaaagccttagggcaggaaagaatctcttgagacataaagtagtaatcataaaggacaagatggttaagtcaattctgttaaaactcaaggcttatattaagcaaacacttgaagtgagaagatgatccacaacttgagaagacatttataatacaaataactgatgaaggattcataatcacaaatatagagaattcctatttaaaaaaatagaaaaatagtgaagactacacaagaggaaatagggcttttaaataaatagatgttctgtagcattggtcagggaaatatgaattaggaccacaatgagattccattttatatccataagatttgcaaaggttgggtctgacagtaccagttgttagatctgtagggacttgtacaacattgtggatgtgtaaacaggcaccactgctttaaaaaacaattatcccttacagacttgaacatttgcagacgttatgatcttgcttccaactcccacctgtatgtccagcaaactcttgcatgtggccactaggaggaatgtgtaagaatgttcatagttacatatttataatagttaataactggaaaaagtgaaatgtatgtctgtctacaggaaaataggtgaataattagatatatatattcattctacgggatattattcagtagtggaaatgagtgaactacagctatacctcacaataagaatgaatctcagaaaatattaaggaaaaaagcaagtttgaagagaccacatggggcgtactatttttattgagcccaaaaacaagcaaaaccaaagaatatgtagtctaagcatacgtatacaataaaactatgctattaaaaaaaaagaaggtaactgataaaccaaaattgagcatagtaattacccacagaaggaggaagtggaagggacaggagcacataggtagatgccaagttatgcagctgttctggttcctcctggtaggcttacaagtgtttactatatgctattaatacattatactttataactaatagataacagttttttacatattaaatatgttctacttaaatatattataaaaaataaaggcaaagtggaatgataacctaaaatctggtatggtgattttgtaggtaatgtttgtatatgtcaaatacagtttttaaggaaaggaagaacatcttagggtaaacagcagctagaaaggtgaggggcaggagagtggtgcatccttgctgctgccagcagtgcccagataccaggctttggggaatgagtggatggctggaccatttgctaagacagaggccaggggatgggagaaatgatgagttttggaaagattcgatgtgactagactgaatataggcagttggatactagactttggaatttaaaaagaatgtctggagttagaattgagagacttgaacgtggagatggaggtcaggctgcagtgcgatgggatcatctatggagcatatgaggagaagagaatctggaggaggaggagggggagccagcaggggagcagctgtgggttggaggaagccaggagggagagtgcaatgccgagaaagcaatgaagagcgtttcgaagcatgccagcagaacccaatgctgcaaagaggcctgggaatgggattgctgagggcccttctcacagtgagcccctcaagagcagcgtcaggggattgtggggactgttggcacacagctggctttgctaggttgaagacaatgggaggtgtggaagacttgttgactcatttaaagaagattggagggaaaggtaggattgagagtgtttcagacagaaaaaggattatatgctgagggtaaagcacaagtacagagggttgcagatagtgcagaagtctttaaaaacaattattttaacccaacttccagggagactgaatttcttctgccagtcagtaacaccatcaacctgggagttgcccctgacccctccagtcttagctcctgctcctgtaacaaaataccacaaactggttagcttatagagaacagatgtttatttcttacagttcaggagtctggaagtccaagatcatggtgccatcatggccgagttctggtgagggccctcttctgggatgcagcggccagcttctcatgttctcacagtgggtggagggtaagcttgctctctggcctcctcttaaaaaggcactaatcccattcatgagggctccaccttcatgacctaattacctcccaaagatgccatctccaaacaccatcattctggggattccatttcaacatgatttgggggatacatcagaccataacacttttctttttctcaaccttcacatccagttggttctcaagccctggcgattttacgcgctagataggtcttaagttcatctctacgcctgccctggttaaggttctcatcatttctcctctggattcatctgcaacacaggctgccgggttggttcccacctcctagagctggaagagtgggctctctgattctttacacccccgcctcaatcctcctgctgcctgaataaccatctccccgtgacctaggatatatcccagccccttagaggcatgcaaagccttccatgtctgaccctgcctcatgtcttggaagccctagactgctgctgtaccctgaaggaggtacctgctcacattggcccctctgtctggaataaccccaccccggttccacccaagtcaggaaagcttcccaacccctccctcccaccaccccaaagctaagtgaagtgacccctcttcttgcctctgtaacaccgccatgcacatttcatacagcccttgctgaaacttcatctagttctctgttagacttaacattccctaagggcaggtttggaaccttactcatctttatatggcgtctaaaatagtgcttgctttatgataggtgctcagtaaaggttgtcttgaattgagcagatcctctagggacaggagttggatggagagcagactgtaaagcctcatgagggcaggggccctgcctcttcctgagctcaggatacccagagcctagctcagtgcctgccatgaaattgttcactccatcaagccttgttaaatgagttcggggcggggggagcatgatggttttctctctctcagaaagaaagcgctgtatcaaagccctagcaccctctctacacccaccttcagtatttcatattagatgcggcccaagtgatactttctttaccgtcccgtgaagacagcatattggcagccctgcaaaaacaaaacaaaacaaaaccctcagttcatggcatacttgctataaatcagctatgtgtattgtcaaattgtagaactgaaagtatattctgattcggtgtgtgtataaggaaatatacaccagtatatgcattaaaacgtcaagaagagctgggcacagtgtcacatgcctgtaaacccagctattcaggaggctgaggtgggaggatcggttgaggccaggagtttgaggctgcagtgagctatgattgcacagctgcactccagcctgtgctgagacctcatctcttaaaaaataaaaaataaaaagtctaagaggatacacagaaatttttaagtggttacctccacggaatgggattaggggatcagaggtgagggaactcatggtttggctatttctcgttctttctgcactgtttcaaatttttacaagtgtatgttattgtacttttaaaaagattagcttggcaacaagtctagcctgaaatgggtgctattttgactagtctgagtgaaaagtgaggatttaaatgaagtaacccctaaactcagccagtcccatgtttttttaacacttggaatatctaattccatttacactgcattcttcaaatgtaattttcaaagatgccttttgcctcatcccttgcttttaagtattattatagacttttggagactcacgaaacaagcaatccctaaattctcgcccaggaaagtatcttggattaaatggtttttgagaaccttgagagtgtatattctatgaaatggaagaaacaagaactagacagagtcacaaatgctgttgatcacagacaatctctgccatccataaggtaaatgtaatacatctggcgacctgctgagtgtgaacttgcagcaggtgaggaaggaactctgaactctcacaatcttgtttcttcatttcccagagagaaactcggcaaagagaaaaaggacatttccctccaggttatctgaaagaatttcaatgcttacctttaatcatgtgacattgtttatcttggattaaaagaaaagaaaatgtatttattttgtgcatattttcaataaaatatataaaatcgagttggtatatagtgccaaataccattaattaaaaatattttaacctga

SEQ ID NO: 102890 - DNA, 10405 bp, Homo sapiens
  Payload ID: 78
  Gene Symbol: MTR
  Gene Name: 5-methyltetrahydrofolate-homocysteine methyltransferase
  Uniprot ID: Q99707
  ENST ID: ENST00000535889
  CDS Start-End: 424-4068
agattgagcgcagaactaaccgcgctctgaaaggttctaaatgtctgcggggctcagagccggatgtcacgtcgtcctcctctgccggttttctcttgggtccttttccgtgccgtcccgcgactccgcctctggccgcgcgtgtctggctgctaggccgacaccaaggactggccgggtacccgggaagaaagcacgtgctccagcagttgccgcgcccagccccgagagaggccctagggcgctgcgggctttcggggtccgcagtccccccgcgacgcgagccaacgggaggcgtcaaaagacccgggccttgtgtggcaggctcgcctggcgctggctggcgtggcccttggccgtcgtcacctgtggagagcacgtcttctctgccgcgccctctgcgcaaggaggagactcgacaacatgtcacccgcgctccaagacctgtcgcaacccgaaggtctgaagaaaaccctgcgggatgagatcaatgccattctgcagaagaggattatggtgctggatggagggatggggaccatgatccagcgggagaagctaaacgaagaacacttccgaggtcaggaatttaaagatcatgccaggccgctgaaaggcaacaatgacattttaagtataactcagcctgatgtcatttaccaaatccataaggaatacttgctggctggggcagatatcattgaaacaaatacttttagcagcactagtattgcccaagctgactatggccttgaacacttggcctaccggatgaacatgtgctctgcaggagtggccagaaaagctgccgaggaggtaactctccagacaggaattaagaggtttgtggcaggggctctgggtccgactaataagacactctctgtgtccccatctgtggaaaggccggattataggaacatcacatttgatgagcttgttgaagcataccaagagcaggccaaaggacttctggatggcggggttgatatcttactcattgaaactatttttgatactgccaatgccaaggcagccttgtttgcactccaaaatctttttgaggagaaatatgctccccggcctatctttatttcagggacgatcgttgataaaagtgggcggactctttccggacagacaggagagggatttgtcatcagcgtgtctcatggagaaccactctgcattggattaaattgtgctttgggtgcagctgaaatgagaccttttattgaaataattggaaaatgtacaacagcctatgtcctctgttatcccaatgcaggtcttcccaacacctttggtgactatgatgaaacgccttctatgatggccaagcacctaaaggattttgctatggatggcttggtcaatatagttggaggatgctgtgggtcaacaccagatcatatcagggaaattgctgaagctgtgaaaaattgtaagcctagagttccacctgccactgcttttgaaggacatatgttactgtctggtctagagcccttcaggattggaccgtacaccaactttgttaacattggagagcgctgtaatgttgcaggatcaaggaagtttgctaaactcatcatggcaggaaactatgaagaagccttgtgtgttgccaaagtgcaggtggaaatgggagcccaggtgttggatgtcaacatggatgatggcatgctagatggtccaagtgcaatgaccagattttgcaacttaattgcttccgagccagacatcgcaaaggtacctttgtgcatcgactcctccaattttgctgtgattgaagctgggttaaagtgctgccaagggaagtgcattgtcaatagcattagtctgaaggaaggagaggacgacttcttggagaaggccaggaagattaaaaagtatggagctgctatggtggtcatggcttttgatgaagaaggacaggcaacagaaacagacacaaaaatcagagtgtgcacccgggcctaccatctgcttgtgaaaaaactgggctttaatccaaatgacattatttttgaccctaatatcctaaccattgggactggaatggaggaacacaacttgtatgccattaattttatccatgcaacaaaagtcattaaagaaacattacctggagccagaataagtggaggtctttccaacttgtccttctccttccgaggaatggaagccattcgagaagcaatgcatggggttttcctttaccatgcaatcaagtctggcatggacatggggatagtgaatgctggaaacctccctgtgtatgatgatatccataaggaacttctgcagctctgtgaagatctcatctggaataaagaccctgaggccactgagaagctcttacgttatgcccagactcaaggcacaggagggaagaaagtcattcagactgatgagtggagaaatggccctgtcgaagaacgccttgagtatgcccttgtgaaggttataaagtcagcccgggttatgaagaaggctgttggccaccttatccctttcatggaaaaagaaagagaagaaaccagagtgcttaacggcacagtagaagaagaggacccttaccagggcaccatcgtgctggccactgttaaaggcgacgtgcacgacataggcaagaacatagttggagtagtccttggctgcaataatttccgagttattgatttaggagtcatgactccatgtgataagatactgaaagctgctcttgaccacaaagcagatataattggcctgtcaggactcatcactccttccctggatgaaatgatttttgttgccaaggaaatggagagattagctataaggattccattgttgattggaggagcaaccacttcaaaaacccacacagcagttaaaatagctccgagatacagtgcacctgtaatccatgtcctggacgcgtccaagagtgtggtggtgtgttcccagctgttagatgaaaatctaaaggatgaatactttgaggaaatcatggaagaatatgaagatattagacaggaccattatgagtctctcaaggagaggagatacttacccttaagtcaagccagaaaaagtggtttccaaatggattggctgtctgaacctcacccagtgaagcccacgtttattgggacccaggtctttgaagactatgacctgcagaagctggtggactacattgactggaagcctttctttgatgtctggcagctccggggcaagtacccgaatcgaggctttcccaagatatttaacgacaaaacagtaggtggagaggccaggaaggtctacgatgatgcccacaatatgctgaacacactgattagtcaaaagaaactccgggcccggggtgtggttgggttctggccagcacagagtatccaagacgacattcacctgtacgcagaggctgctgtgccccaggctgcagagcccatagccaccttctatgggttaaggcaacaggctgagaaggactctgccagcacggagccatactactgcctctcagacttcatcgctcccttgcattctggcatccgtgactacctgggcctgtttgccgttgcctgctttggggtagaagagctgagcaaggcctatgaggatgatggtgacgactacagcagcatcatggtcaaggcgctgggggaccggctggcagaggcctttgcagaagagctccatgaaagagttcgccgagaactgtgggcctactgtggcagtgagcagctggacgtcgcagacctgcgcaggctgcggtacaagggcatccgcccggctcctggctaccccagccagcccgaccacaccgagaagctcaccatgtggagactcgcagacatcgagcagtctacaggcattaggttaacagaatcattagcaatggcacctgcttcagcagtctcaggcctctacttctccaatttgaagtccaaatattttgctgtggggaagatttccaaggatcaggttgaggattatgcattgaggaagaacatatctgtggctgaggttgagaaatggcttggacccattttgggatatgatacagactaactttttttttttttttgccttttttattcttgatgatcctcaaggaaatacaacctagggtgccttaaaaataacaacaacaaaaaacctgtgtgcatctggctgacacttacctgcttctggttttcgaagactatttagtggaaccttgtagaggagcagggtcttcctgcagtgcctggaaaacaggcgctgtttttttgggaccttgcgtgaagagcagtgagcagggttcctgtggtttccctggtccctctgagatggggacagactgaagacagaggtcgtttgatttcaaagcaagtcaacctgcttttttctgtttttacagtggaatctaggaggccacttagtcgtctttttttcctcttagaagaaaagcctgaaactgagttgaatagagaagtgtgaccctgtgacaaaatgatactgtgagaaatggggcattttaatctaagtggttataacagtggattctgacggggaaggtgtagctctgttctcttcggaagacctcgttttctaaaggctggactaaatggctgcagaactccctttggcaaaaggcatgcgctcactgcttgcttgtcagaaacactgaagccatttgccccagtgtggtcaagcagccatgctttctgggcattttcgtcctcccataatttcatatttccgtacccctgaggaaacaaaaaggaaatgaggagagaaagttactgttaagggtggttaacattttttttgttttgttttgttttggtttttttttttttgagacagagtctggctctgtcgcccaggctggagtgcaggggcgcaatctcggctcatagcaagctccgcctcctgggttcatgccattctcctgcctcagcctccagagtagctgggactacaggtgcccgccaccacacccggctaattttttgtgtttttacaaaatacaaaaaagtagagacaggatttcactgtgttagccaggatggtcttgatctcccgacctcgtgatctgcccacctcagcctcccaaaatgctgggattacaggcgtgagccaccgagcctggccggttaacatcttttaattgtttccaggattgagcaggttctcagctgggctctgatatcccgtgcggagttggacaagtgggcagcataaagtcactcatttcttaccattttattcccctcaattctcaatatattcagtaatgaagaatggtgccaccactcaagcaacaagcctcaaactcaaccatgtcatctttttcttggatgattgcagttatttcaaaaatttgcatgcaaaatatacactcatcctacttcaagatggtggtggcaatagtcaggagaaggtaacattggagtcctggtttgattcgaaggatgaagacgaagaagcaagggaggaacaaatgaagaaccatctttgttcatgaataggaatattcaagattataaaggtatcaggtctcctaaaattgatctatggatttaataccattttcaatggaaattccaacagattttattgaatgaaacaagcaggtgtttatatggagtagcaaaggacttaaaattaccaaatgcttctaaatatgaaggagaggttggggacacgcaccctatgtgataccaagttttattgtcaagacagtgtcatggtgcagaggtaggcattctgagcaggggaacaaaataagggcctagaaactcacccgtgcatatgttgacctttgcaaaatgacctggtgacatggcaagtcagtggggacaggaaggaccactccctaagtaatcccagaacaatggctattcatgtgggaaaaaaagaaattttactttctctcaccttacctggtgataagttccaaatatgttaagggctttaatacaaaaagcaaaaattgtcagtgtttggatgaaaaaagccttagggcaggaaagaatctcttgagacataaagtagtaatcataaaggacaagatggttaagtcaattctgttaaaactcaaggcttatattaagcaaacacttgaagtgagaagatgatccacaacttgagaagacatttataatacaaataactgatgaaggattcataatcacaaatatagagaattcctatttaaaaaaatagaaaaatagtgaagactacacaagaggaaatagggcttttaaataaatagatgttctgtagcattggtcagggaaatatgaattaggaccacaatgagattccattttatatccataagatttgcaaaggttgggtctgacagtaccagttgttagatctgtagggacttgtacaacattgtggatgtgtaaacaggcaccactgctttaaaaaacaattatcccttacagacttgaacatttgcagacgttatgatcttgcttccaactcccacctgtatgtccagcaaactcttgcatgtggccactaggaggaatgtgtaagaatgttcatagttacatatttataatagttaataactggaaaaagtgaaatgtatgtctgtctacaggaaaataggtgaataattagatatatatattcattctacgggatattattcagtagtggaaatgagtgaactacagctatacctcacaataagaatgaatctcagaaaatattaaggaaaaaagcaagtttgaagagaccacatggggcgtactatttttattgagcccaaaaacaagcaaaaccaaagaatatgtagtctaagcatacgtatacaataaaactatgctattaaaaaaaaagaaggtaactgataaaccaaaattgagcatagtaattacccacagaaggaggaagtggaagggacaggagcacataggtagatgccaagttatgcagctgttctggttcctcctggtaggcttacaagtgtttactatatgctattaatacattatactttataactaatagataacagttttttacatattaaatatgttctacttaaatatattataaaaaataaaggcaaagtggaatgataacctaaaatctggtatggtgattttgtaggtaatgtttgtatatgtcaaatacagtttttaaggaaaggaagaacatcttagggtaaacagcagctagaaaggtgaggggcaggagagtggtgcatccttgctgctgccagcagtgcccagataccaggctttggggaatgagtggatggctggaccatttgctaagacagaggccaggggatgggagaaatgatgagttttggaaagattcgatgtgactagactgaatataggcagttggatactagactttggaatttaaaaagaatgtctggagttagaattgagagacttgaacgtggagatggaggtcaggctgcagtgcgatgggatcatctatggagcatatgaggagaagagaatctggaggaggaggagggggagccagcaggggagcagctgtgggttggaggaagccaggagggagagtgcaatgccgagaaagcaatgaagagcgtttcgaagcatgccagcagaacccaatgctgcaaagaggcctgggaatgggattgctgagggcccttctcacagtgagcccctcaagagcagcgtcaggggattgtggggactgttggcacacagctggctttgctaggttgaagacaatgggaggtgtggaagacttgttgactcatttaaagaagattggagggaaaggtaggattgagagtgtttcagacagaaaaaggattatatgctgagggtaaagcacaagtacagagggttgcagatagtgcagaagtctttaaaaacaattattttaacccaacttccagggagactgaatttcttctgccagtcagtaacaccatcaacctgggagttgcccctgacccctccagtcttagctcctgctcctgtaacaaaataccacaaactggttagcttatagagaacagatgtttatttcttacagttcaggagtctggaagtccaagatcatggtgccatcatggccgagttctggtgagggccctcttctgggatgcagcggccagcttctcatgttctcacagtgggtggagggtaagcttgctctctggcctcctcttaaaaaggcactaatcccattcatgagggctccaccttcatgacctaattacctcccaaagatgccatctccaaacaccatcattctggggattccatttcaacatgatttgggggatacatcagaccataacacttttctttttctcaaccttcacatccagttggttctcaagccctggcgattttacgcgctagataggtcttaagttcatctctacgcctgccctggttaaggttctcatcatttctcctctggattcatctgcaacacaggctgccgggttggttcccacctcctagagctggaagagtgggctctctgattctttacacccccgcctcaatcctcctgctgcctgaataaccatctccccgtgacctaggatatatcccagccccttagaggcatgcaaagccttccatgtctgaccctgcctcatgtcttggaagccctagactgctgctgtaccctgaaggaggtacctgctcacattggcccctctgtctggaataaccccaccccggttccacccaagtcaggaaagcttcccaacccctccctcccaccaccccaaagctaagtgaagtgacccctcttcttgcctctgtaacaccgccatgcacatttcatacagcccttgctgaaacttcatctagttctctgttagacttaacattccctaagggcaggtttggaaccttactcatctttatatggcgtctaaaatagtgcttgctttatgataggtgctcagtaaaggttgtcttgaattgagcagatcctctagggacaggagttggatggagagcagactgtaaagcctcatgagggcaggggccctgcctcttcctgagctcaggatacccagagcctagctcagtgcctgccatgaaattgttcactccatcaagccttgttaaatgagttcggggcggggggagcatgatggttttctctctctcagaaagaaagcgctgtatcaaagccctagcaccctctctacacccaccttcagtatttcatattagatgcggcccaagtgatactttctttaccgtcccgtgaagacagcatattggcagccctgcaaaaacaaaacaaaacaaaaccctcagttcatggcatacttgctataaatcagctatgtgtattgtcaaattgtagaactgaaagtatattctgattcggtgtgtgtataaggaaatatacaccagtatatgcattaaaacgtcaagaagagctgggcacagtgtcacatgcctgtaaacccagctattcaggaggctgaggtgggaggatcggttgaggccaggagtttgaggctgcagtgagctatgattgcacagctgcactccagcctgtgctgagacctcatctcttaaaaaataaaaaataaaaagtctaagaggatacacagaaatttttaagtggttacctccacggaatgggattaggggatcagaggtgagggaactcatggtttggctatttctcgttctttctgcactgtttcaaatttttacaagtgtatgttattgtacttttaaaaagattagcttggcaacaagtctagcctgaaatgggtgctattttgactagtctgagtgaaaagtgaggatttaaatgaagtaacccctaaactcagccagtcccatgtttttttaacacttggaatatctaattccatttacactgcattcttcaaatgtaattttcaaagatgccttttgcctcatcccttgcttttaagtattattatagacttttggagactcacgaaacaagcaatccctaaattctcgcccaggaaagtatcttggattaaatggtttttgagaaccttgagagtgtatattctatgaaatggaagaaacaagaactagacagagtcacaaatgctgttgatcacagacaatctctgccatccataaggtaaatgtaatacatctggcgacctgctgagtgtgaacttgcagcaggtgaggaaggaactctgaactctcacaatcttgtttcttcatttcccagagagaaactcggcaaagagaaaaaggacatttccctccaggttatctgaaagaatttcaatgcttacctttaatcatgtgacattgtttatcttggattaaaagaaaagaaaatgtatttattttgtgcatattttcaataaaatatataaaatcgagttggtatatagtgccaaataccattaattaaaaatattttaacctga

SEQ ID NO: 102891 - DNA, 3274 bp, Homo sapiens
  Payload ID: 79
  Gene Symbol: MTRR
  Gene Name: 5-methyltetrahydrofolate-homocysteine methyltransferase  reductase
  Uniprot ID: Q9UBK8
  ENST ID: ENST00000264668
  CDS Start-End: 31-2208
ggagctttctattggtcctgggtaccgagcatgggcgctgcgtcagtgcgcgctggcgcaaggttggtggaagtcgcgttgtgcagtttcactgttacatgccttgaagtgatgaggaggtttctgttactatatgctacacagcagggacaggcaaaggccatcgcagaagaaatatgtgagcaagctgtggtacatggattttctgcagatcttcactgtattagtgaatccgataagtatgacctaaaaaccgaaacagctcctcttgttgttgtggtttctaccacgggcaccggagacccacccgacacagcccgcaagtttgttaaggaaatacagaaccaaacactgccggttgatttctttgctcacctgcggtatgggttactgggtctcggtgattcagaatacacctacttttgcaatggggggaagataattgataaacgacttcaagagcttggagcccggcatttctatgacactggacatgcagatgactgtgtaggtttagaacttgtggttgagccgtggattgctggactctggccagccctcagaaagcattttaggtcaagcagaggacaagaggagataagtggcgcactcccggtggcatcacctgcatcctcgaggacagaccttgtgaagtcagagctgctacacattgaatctcaagtcgagcttctgagattcgatgattcaggaagaaaggattctgaggttttgaagcaaaatgcagtgaacagcaaccaatccaatgttgtaattgaagactttgagtcctcacttacccgttcggtacccccactctcacaagcctctctgaatattcctggtttacccccagaatatttacaggtacatctgcaggagtctcttggccaggaggaaagccaagtatctgtgacttcagcagatccagtttttcaagtgccaatttcaaaggcagttcaacttactacgaatgatgccataaaaaccactctgctggtagaattggacatttcaaatacagacttttcctatcagcctggagatgccttcagcgtgatctgccctaacagtgattctgaggtacaaagcctactccaaagactgcagcttgaagataaaagagagcactgcgtccttttgaaaataaaggcagacacaaagaagaaaggagctaccttaccccagcatatacctgcgggatgttctctccagttcatttttacctggtgtcttgaaatccgagcaattcctaaaaaggcatttttgcgagcccttgtggactataccagtgacagtgctgaaaagcgcaggctacaggagctgtgcagtaaacaaggggcagccgattatagccgctttgtacgagatgcctgtgcctgcttgttggatctcctcctcgctttcccttcttgccagccaccactcagtctcctgctcgaacatcttcctaaacttcaacccagaccatattcgtgtgcaagctcaagtttatttcacccaggaaagctccattttgtcttcaacattgtggaatttctgtctactgccacaacagaggttctgcggaagggagtatgtacaggctggctggccttgttggttgcttcagttcttcagccaaacatacatgcatcccatgaagacagcgggaaagccctggctcctaagatatccatctctcctcgaacaacaaattctttccacttaccagatgacccctcaatccccatcataatggtgggtccaggaaccggcatagccccgtttattgggttcctacaacatagagagaaactccaagaacaacacccagatggaaattttggagcaatgtggttgttttttggctgcaggcataaggatagggattatctattcagaaaagagctcagacatttccttaagcatgggatcttaactcatctaaaggtttccttctcaagagatgctcctgttggggaggaggaagccccagcaaagtatgtgcaagacaacatccagcttcatggccagcaggtggcgagaatcctcctccaggagaacggccatatttatgtgtgtggagatgcaaagaatatggccaaggatgtacatgatgcccttgtgcaaataataagcaaagaggttggagttgaaaaactagaagcaatgaaaaccctggccactttaaaagaagaaaaacgctaccttcaggatatttggtcataaaaccagaaattaaagaaagaggattaagcttttttgactgaaagtactaaaagtcagctttactagtgccaaacctttaaattttcaaaagaaaattttctttcaacatttcttgaaggacatggagtggagattggatcatttaacaatataacaaaacttcctgatttgattttacgtatcttctatctacgcccttcctgtgcctgtgactctccccaaattgccctgttgccttgagctcttctgagctaaggcagccttcagtccctatcagcgcctcctttacttcccagagaacttcacagagactctgtccttccatgcaaaggcttcctgaaatagggagactgactgagtagctcattcttgtgacttacagtgccaacatttaaaaaagtatgaaaatgatttatttttatatgatgtatacccataaagaatgctcatattaatgtacttaaattacacatgtagagcatatctgttatatgtttatgtaactatcaaatggttatttgttactaaagctatatttctgataaaaaatattttaggataattgcctacagagggatttatttttatgatgctggaaatatgaaatgtattttaaaatttcactctggcatatgatttatctatcaccattacttttttttaagtcacaatttcagaattttgggacatttgcattcaatttacaggtaccagtacgtacatattttaatagaaagatacaacctttttattttcactccttttatttctgctgcttggcacatttttgagttttcccacattatttgtctccatgataccactcaagcagtgtgctggacctaaaatactgactttagttagtatccttggatttttagattcccagtgtctaattccctgttataatttgcacaaacaaaacaaaatgttatgataatctttctccactgttctaatatatattgtatttttatttgatagcttgggatttaaaacatctctgttgaaggcttttgatccttttgagaaataaagatctgaaagaaatggcataatcttaaaa

SEQ ID NO: 102892 - DNA, 3215 bp, Homo sapiens
  Payload ID: 79
  Gene Symbol: MTRR
  Gene Name: 5-methyltetrahydrofolate-homocysteine methyltransferase  reductase
  Uniprot ID: Q9UBK8
  ENST ID: ENST00000440940
  CDS Start-End: 53-2149
ggttcgtgcccggctggcgcggcgtggtttcactgttacatgccttgaagtgatgaggaggtttctgttactatatgctacacagcagggacaggcaaaggccatcgcagaagaaatatgtgagcaagctgtggtacatggattttctgcagatcttcactgtattagtgaatccgataagtatgacctaaaaaccgaaacagctcctcttgttgttgtggtttctaccacgggcaccggagacccacccgacacagcccgcaagtttgttaaggaaatacagaaccaaacactgccggttgatttctttgctcacctgcggtatgggttactgggtctcggtgattcagaatacacctacttttgcaatggggggaagataattgataaacgacttcaagagcttggagcccggcatttctatgacactggacatgcagatgactgtgtaggtttagaacttgtggttgagccgtggattgctggactctggccagccctcagaaagcattttaggtcaagcagaggacaagaggagataagtggcgcactcccggtggcatcacctgcatcctcgaggacagaccttgtgaagtcagagctgctacacattgaatctcaagtcgagcttctgagattcgatgattcaggaagaaaggattctgaggttttgaagcaaaatgcagtgaacagcaaccaatccaatgttgtaattgaagactttgagtcctcacttacccgttcggtacccccactctcacaagcctctctgaatattcctggtttacccccagaatatttacaggtacatctgcaggagtctcttggccaggaggaaagccaagtatctgtgacttcagcagatccagtttttcaagtgccaatttcaaaggcagttcaacttactacgaatgatgccataaaaaccactctgctggtagaattggacatttcaaatacagacttttcctatcagcctggagatgccttcagcgtgatctgccctaacagtgattctgaggtacaaagcctactccaaagactgcagcttgaagataaaagagagcactgcgtccttttgaaaataaaggcagacacaaagaagaaaggagctaccttaccccagcatatacctgcgggatgttctctccagttcatttttacctggtgtcttgaaatccgagcaattcctaaaaaggcatttttgcgagcccttgtggactataccagtgacagtgctgaaaagcgcaggctacaggagctgtgcagtaaacaaggggcagccgattatagccgctttgtacgagatgcctgtgcctgcttgttggatctcctcctcgctttcccttcttgccagccaccactcagtctcctgctcgaacatcttcctaaacttcaacccagaccatattcgtgtgcaagctcaagtttatttcacccaggaaagctccattttgtcttcaacattgtggaatttctgtctactgccacaacagaggttctgcggaagggagtatgtacaggctggctggccttgttggttgcttcagttcttcagccaaacatacatgcatcccatgaagacagcgggaaagccctggctcctaagatatccatctctcctcgaacaacaaattctttccacttaccagatgacccctcaatccccatcataatggtgggtccaggaaccggcatagccccgtttattgggttcctacaacatagagagaaactccaagaacaacacccagatggaaattttggagcaatgtggttgttttttggctgcaggcataaggatagggattatctattcagaaaagagctcagacatttccttaagcatgggatcttaactcatctaaaggtttccttctcaagagatgctcctgttggggaggaggaagccccagcaaagtatgtgcaagacaacatccagcttcatggccagcaggtggcgagaatcctcctccaggagaacggccatatttatgtgtgtggagatgcaaagaatatggccaaggatgtacatgatgcccttgtgcaaataataagcaaagaggttggagttgaaaaactagaagcaatgaaaaccctggccactttaaaagaagaaaaacgctaccttcaggatatttggtcataaaaccagaaattaaagaaagaggattaagcttttttgactgaaagtactaaaagtcagctttactagtgccaaacctttaaattttcaaaagaaaattttctttcaacatttcttgaaggacatggagtggagattggatcatttaacaatataacaaaacttcctgatttgattttacgtatcttctatctacgcccttcctgtgcctgtgactctccccaaattgccctgttgccttgagctcttctgagctaaggcagccttcagtccctatcagcgcctcctttacttcccagagaacttcacagagactctgtccttccatgcaaaggcttcctgaaatagggagactgactgagtagctcattcttgtgacttacagtgccaacatttaaaaaagtatgaaaatgatttatttttatatgatgtatacccataaagaatgctcatattaatgtacttaaattacacatgtagagcatatctgttatatgtttatgtaactatcaaatggttatttgttactaaagctatatttctgataaaaaatattttaggataattgcctacagagggatttatttttatgatgctggaaatatgaaatgtattttaaaatttcactctggcatatgatttatctatcaccattacttttttttaagtcacaatttcagaattttgggacatttgcattcaatttacaggtaccagtacgtacatattttaatagaaagatacaacctttttattttcactccttttatttctgctgcttggcacatttttgagttttcccacattatttgtctccatgataccactcaagcagtgtgctggacctaaaatactgactttagttagtatccttggatttttagattcccagtgtctaattccctgttataatttgcacaaacaaaacaaaatgttatgataatctttctccactgttctaatatatattgtatttttatttgatagcttgggatttaaaacatctctgttgaaggcttttgatccttttgagaaataaagatctgaaagaaatggcataatcttaaaa

SEQ ID NO: 102893 - DNA, 520 bp, Homo sapiens
  Payload ID: 79
  Gene Symbol: MTRR
  Gene Name: 5-methyltetrahydrofolate-homocysteine methyltransferase  reductase
  ENST ID: ENST00000512217
  CDS Start-End: 185-520
taggatcaaataagaaccaagaatcctatcattttaatatagtttttacttttatctttttttaaaaagaggaaaccaaaagctatttaagactgttgtgaatgatactgtggctcaagttttgttcaggttcttggcttgtgccacatcgtttttcagtttcactgttacatgccttgaagtgatgaggaggtttctgttactatatgctacacagcagggacaggcaaaggccatcgcagaagaaatatgtgagcaagctgtggtacatggattttctgcagatcttcactgtattagtgaatccgataagtatgacctaaaaaccgaaacagctcctcttgttgttgtggtttctaccacgggcaccggagacccacccgacacagcccgcaagtttgttaaggaaatacagaaccaaacactgccggttgatttctttgctcacctgcggtatgggttactgggtctcggtgattcagaatacacctacttttgcaatggggggaagataattgat

SEQ ID NO: 102894 - DNA, 3091 bp, Homo sapiens
  Payload ID: 79
  Gene Symbol: MTRR
  Gene Name: 5-methyltetrahydrofolate-homocysteine methyltransferase  reductase
  ENST ID: ENST00000510525
  CDS Start-End: 1-1117
tttcactgttacatgccttgaagtgatgaggaggtttctgttactatatgctacacagcagggacaggcaaaggccatcgcagaagaaatatgtgagcaagctgtggtacatggattttctgcagatcttcactgtattagtgaatccgataagtatgacctaaaaaccgaaacagctcctcttgttgttgtggtttctaccacgggcaccggagacccacccgacacagcccgcaagtttgttaaggaaatacagaaccaaacactgccggttgatttctttgctcacctgcggtatgggttactgggtctcggtgattcagaatacacctacttttgcaatggggggaagataattgataaacgacttcaagagcttggagcccggcatttctatgacactggacatgcagatgactgtgtaggtttagaacttgtggttgagccgtggattgctggactctggccagccctcagaaagcattttaggtcaagcagaggacaagaggagataagtggcgcactcccggtggcatcacctgcatcctcgaggacagaccttgtgaagtcagagctgctacacattgaatctcaagtcgagcttctgagattcgatgattcaggaagaaaggattctgaggttttgaagcaaaatgcagtgaacagcaaccaatccaatgttgtaattgaagactttgagtcctcacttacccgttcggtacccccactctcacaagcctctctgaatattcctggtttacccccagaatatttacaggtacatctgcaggagtctcttggccaggaggaaagccaagtatctgtgacttcagcagatccagtttttcaagtgccaatttcaaaggcagttcaacttactacgaatgatgccataaaaaccactctgctggtagaattggacatttcaaatacagacttttcctatcagcctggagatgccttcagcgtgatctgccctaacagtgattctgaggtacaaagcctactccaaagactgcagcttgaagataaaagagagcactgcgtccttttgaaaataaaggcagacacaaagaagaaaggcatttttgcgagcccttgtggactataccagtgacagtgctgaaaagcgcaggctacaggagctgtgcagtaaacaaggggcagccgattatagccgctttgtacgagatgcctgtgcctgcttgttggatctcctcctcgctttcccttcttgccagccaccactcagtctcctgctcgaacatcttcctaaacttcaacccagaccatattcgtgtgcaagctcaagtttatttcacccaggaaagctccattttgtcttcaacattgtggaatttctgtctactgccacaacagaggttctgcggaagggagtatgtacaggctggctggccttgttggttgcttcagttcttcagccaaacatacatgcatcccatgaagacagcgggaaagccctggctcctaagatatccatctctcctcgaacaacaaattctttccacttaccagatgacccctcaatccccatcataatggtgggtccaggaaccggcatagccccgtttattgggttcctacaacatagagagaaactccaagaacaacacccagatggaaattttggagcaatgtggttgttttttggctgcaggcataaggatagggattatctattcagaaaagagctcagacatttccttaagcatgggatcttaactcatctaaaggtttccttctcaagagatgctcctgttggggaggaggaagccccagcaaagtatgtgcaagacaacatccagcttcatggccagcaggtggcgagaatcctcctccaggagaacggccatatttatgtgtgtggagatgcaaagaatatggccaaggatgtacatgatgcccttgtgcaaataataagcaaagaggttggagttgaaaaactagaagcaatgaaaaccctggccactttaaaagaagaaaaacgctaccttcaggatatttggtcataaaaccagaaattaaagaaagaggattaagcttttttgactgaaagtactaaaagtcagctttactagtgccaaacctttaaattttcaaaagaaaattttctttcaacatttcttgaaggacatggagtggagattggatcatttaacaatataacaaaacttcctgatttgattttacgtatcttctatctacgcccttcctgtgcctgtgactctccccaaattgccctgttgccttgagctcttctgagctaaggcagccttcagtccctatcagcgcctcctttacttcccagagaacttcacagagactctgtccttccatgcaaaggcttcctgaaatagggagactgactgagtagctcattcttgtgacttacagtgccaacatttaaaaaagtatgaaaatgatttatttttatatgatgtatacccataaagaatgctcatattaatgtacttaaattacacatgtagagcatatctgttatatgtttatgtaactatcaaatggttatttgttactaaagctatatttctgataaaaaatattttaggataattgcctacagagggatttatttttatgatgctggaaatatgaaatgtattttaaaatttcactctggcatatgatttatctatcaccattacttttttttaagtcacaatttcagaattttgggacatttgcattcaatttacaggtaccagtacgtacatattttaatagaaagatacaacctttttattttcactccttttatttctgctgcttggcacatttttgagttttcccacattatttgtctccatgataccactcaagcagtgtgctggacctaaaatactgactttagttagtatccttggatttttagattcccagtgtctaattccctgttataatttgcacaaacaaaacaaaatgttatgataatctttctccactgttctaatatatattgtatttttatttgatagcttgggatttaaaacatctctgttgaaggcttttgatccttttgagaaataaagatctgaaagaaatggcataa

SEQ ID NO: 102895 - DNA, 535 bp, Homo sapiens
  Payload ID: 79
  Gene Symbol: MTRR
  Gene Name: 5-methyltetrahydrofolate-homocysteine methyltransferase  reductase
  ENST ID: ENST00000508047
  CDS Start-End: 1-346
agtgcgcgctggcgcaaggttggtggaagtcgcgttgtgcagtttcactgttacatgccttgaagtgatgaggaggtttctgttactatatgctacacagcagggacaggcaaaggccatcgcagaagaaatatgtgagcaagctgtggtacatggattttctgcagatcttcactgtattagtgaatccgataagtatgacctaaaaaccgaaacagctcctcttgttgttgtggtttctaccacgggcaccggagacccacccgacacagcccgcaagtttgttaaggaaatacagaaccaaacactgccggttgatttctttgctcacctgcggtctcggtgattcagaatacacctacttttgcaatggggggaagataattgataaacgacttcaagagcttggagcccggcatttctatgacactggacatgcagatgactgtgtaggtttagaacttgtggttgagccgtggattgctggactctggccagccctcagaaagcattttaggtcaagcagaggacaaga

SEQ ID NO: 102896 - DNA, 478 bp, Homo sapiens
  Payload ID: 79
  Gene Symbol: MTRR
  Gene Name: 5-methyltetrahydrofolate-homocysteine methyltransferase  reductase
  ENST ID: ENST00000514220
  CDS Start-End: 1-478
agtgcgcgctggcgcaaggttggtggaagtcgcgttgtgcaggttcgtgcccggctggcgcggcgtgggtctcggtgattcagaatacacctacttttgcaatggggggaagataattgataaacgacttcaagagcttggagcccggcatttctatgacactggacatgcagatgactgtgtaggtttagaacttgtggttgagccgtggattgctggactctggccagccctcagaaagcattttaggtcaagcagaggacaagaggagataagtggcgcactcccggtggcatcacctgcatcctcgaggacagaccttgtgaagtcagagctgctacacattgaatctcaagtcgagcttctgagattcgatgattcaggaagaaaggattctgaggttttgaagcaaaatgcagtgaacagcaaccaatccaatgttgtaattgaagactttgagtcctcacttacccgttcg

SEQ ID NO: 102897 - DNA, 567 bp, Homo sapiens
  Payload ID: 79
  Gene Symbol: MTRR
  Gene Name: 5-methyltetrahydrofolate-homocysteine methyltransferase  reductase
  ENST ID: ENST00000502550
  CDS Start-End: 98-567
gtcggctacggttcccggattccggccgctcgccctgcactaatctcctgggagaggcggcccggggcggggtttcactgttacatgccttgaagtgatgaggaggtttctgttactatatgctacacagcagggacaggcaaaggccatcgcagaagaaatatgtgagcaagctgtggtacatggattttctgcagatcttcactgtattagtgaatccgataagtatgacctaaaaaccgaaacagctcctcttgttgttgtggtttctaccacgggcaccggagacccacccgacacagcccgcaagtttgttaaggaaatacagaaccaaacactgccggttgatttctttgctcacctgcggtatgggttactgggtctcggtgattcagaatacacctacttttgcaatggggggaagataattgataaacgacttcaagagcttggagcccggcatttctatgacactggacatgcagatgactgtgtaggtttagaacttgtggttgagccgtggattgctggactctggccagccctcagaaagcattttaggtcaag

SEQ ID NO: 102898 - DNA, 556 bp, Homo sapiens
  Payload ID: 79
  Gene Symbol: MTRR
  Gene Name: 5-methyltetrahydrofolate-homocysteine methyltransferase  reductase
  ENST ID: ENST00000503550
  CDS Start-End: 58-198
gtgcaggttcgtgcccggctggcgcggcgtggtttcactgttacatgccttgaagtgatgaggaggtttctgttactatatgctacacagcagggacaggcaaaggccatcgcagaagaaatatgtgagcaagctgtggtacatggattttctgcagatcttcactgtattagtgaatccgataagtgtgaaaaataaggtgaattatttggagccaaattcgatggtgttcatgggcagtaaagcttgtggagtcttacaatatgacctaaaaaccgaaacagctcctcttgttgttgtggtttctaccacgggcaccggagacccacccgacacagcccgcaagtttgttaaggaaatacagaaccaaacactgccggttgatttctttgctcacctgcggtatgggttactgggtctcggtgattcagaatacacctacttttgcaatggggggaagataattgataaacgacttcaagagcttggagcccggcatttctatgacactggacatgcagatgactgtgtaggtttagaacttgtggttgagccg

SEQ ID NO: 102899 - DNA, 3076 bp, Homo sapiens
  Payload ID: 79
  Gene Symbol: MTRR
  Gene Name: 5-methyltetrahydrofolate-homocysteine methyltransferase  reductase
  ENST ID: ENST00000511461
  CDS Start-End: 1-244
agtgcgcgctggcgcaaggttggtggaagtcgcgttgtgcagtttcactgttacatgccttgaagtgatgaggaggtttctgttactatatgctacacagcagggacaggcaaaggccatcgcagaagaaatatgtgagcaagctgtggtacatggattttctgcagatcttcactgtattagtgaatccgataaggtctcggtgattcagaatacacctacttttgcaatggggggaagataattgataaacgacttcaagagcttggagcccggcatttctatgacactggacatgcagatgactgtgtaggtttagaacttgtggttgagccgtggattgctggactctggccagccctcagaaagcattttaggtcaagcagaggacaagaggagataagtggcgcactcccggtggcatcacctgcatcctcgaggacagaccttgtgaagtcagagctgctacacattgaatctcaagtcgagcttctgagattcgatgattcaggaagaaaggattctgaggttttgaagcaaaatgcagtgaacagcaaccaatccaatgttgtaattgaagactttgagtcctcacttacccgttcggtacccccactctcacaagcctctctgaatattcctggtttacccccagaatatttacaggtacatctgcaggagtctcttggccaggaggaaagccaagtatctgtgacttcagcagatccagtttttcaagtgccaatttcaaaggcagttcaacttactacgaatgatgccataaaaaccactctgctggtagaattggacatttcaaatacagacttttcctatcagcctggagatgccttcagcgtgatctgccctaacagtgattctgaggtacaaagcctactccaaagactgcagcttgaagataaaagagagcactgcgtccttttgaaaataaaggcagacacaaagaagaaaggagctaccttaccccagcatatacctgcgggatgttctctccagttcatttttacctggtgtcttgaaatccgagcaattcctaaaaaggcatttttgcgagcccttgtggactataccagtgacagtgctgaaaagcgcaggctacaggagctgtgcagtaaacaaggggcagccgattatagccgctttgtacgagatgcctgtgcctgcttgttggatctcctcctcgctttcccttcttgccagccaccactcagtctcctgctcgaacatcttcctaaacttcaacccagaccatattcgtgtgcaagctcaagtttatttcacccaggaaagctccattttgtcttcaacattgtggaatttctgtctactgccacaacagaggttctgcggaagggagtatgtacaggctggctggccttgttggttgcttcagttcttcagccaaacatacatgcatcccatgaagacagcgggaaagccctggctcctaagatatccatctctcctcgaacaacaaattctttccacttaccagatgacccctcaatccccatcataatggtgggtccaggaaccggcatagccccgtttattgggttcctacaacatagagagaaactccaagaacaacacccagatggaaattttggagcaatgtggttgttttttggctgcaggcataaggatagggattatctattcagaaaagagctcagacatttccttaagcatgggatcttaactcatctaaaggtttccttctcaagagatgctcctgttggggaggaggaagccccagcaaagtatgtgcaagacaacatccagcttcatggccagcaggtggcgagaatcctcctccaggagaacggccatatttatgtgtgtggagatgcaaagaatatggccaaggatgtacatgatgcccttgtgcaaataataagcaaagaggttggagttgaaaaactagaagcaatgaaaaccctggccactttaaaagaagaaaaacgctaccttcaggatatttggtcataaaaccagaaattaaagaaagaggattaagcttttttgactgaaagtactaaaagtcagctttactagtgccaaacctttaaattttcaaaagaaaattttctttcaacatttcttgaaggacatggagtggagattggatcatttaacaatataacaaaacttcctgatttgattttacgtatcttctatctacgcccttcctgtgcctgtgactctccccaaattgccctgttgccttgagctcttctgagctaaggcagccttcagtccctatcagcgcctcctttacttcccagagaacttcacagagactctgtccttccatgcaaaggcttcctgaaatagggagactgactgagtagctcattcttgtgacttacagtgccaacatttaaaaaagtatgaaaatgatttatttttatatgatgtatacccataaagaatgctcatattaatgtacttaaattacacatgtagagcatatctgttatatgtttatgtaactatcaaatggttatttgttactaaagctatatttctgataaaaaatattttaggataattgcctacagagggatttatttttatgatgctggaaatatgaaatgtattttaaaatttcactctggcatatgatttatctatcaccattacttttttttaagtcacaatttcagaattttgggacatttgcattcaatttacaggtaccagtacgtacatattttaatagaaagatacaacctttttattttcactccttttatttctgctgcttggcacatttttgagttttcccacattatttgtctccatgataccactcaagcagtgtgctggacctaaaatactgactttagttagtatccttggatttttagattcccagtgtctaattccctgttataatttgcacaaacaaaacaaaatgttatgataatctttctccactgttctaatatatattgtatttttatttgatagcttgggatttaaaacatctctgttgaaggcttttgatccttttgagaaataaagatctgaaagaaatggcataatcttaaaa

SEQ ID NO: 102900 - DNA, 779 bp, Homo sapiens
  Payload ID: 79
  Gene Symbol: MTRR
  Gene Name: 5-methyltetrahydrofolate-homocysteine methyltransferase  reductase
  Uniprot ID: Q9UBK8
  ENST ID: ENST00000514369
  CDS Start-End: 48-224
gtgcccggctggcgcggcgtggtttcactgttacatgccttgaagtgatgaggaggtttctgttactatatgctacacagcagggacaggcaaaggccatcgcagaagaaatatgtgagcaagctgtggtacatggattttctgcagatcttcactgtattagtgaatccgataaggtctcggtgattcagaatacacctacttttgcaatggggggaagataattgataaacgacttcaagagcttggagcccggcatttctatgacactggacatgcagatgactgtgtaggaacttgtggttgagccgtggattgctggactctggccagccctcagaaagcattttaggtcaagcagaggacaagaggagataagtggcgcactcccggtggcatcacctgcatcctcgaggacagaccttgtgaagtcagagctgctacacattgaatctcaagtcgagcttctgagattcgatgattcaggaagaaaggattctgaggttttgaagcaaaatgcagtgaacagcaaccaatccaatgttgtaattgaagactttgagtcctcacttacccgttcggtacccccactctcacaagcctctctgaatattcctggtttacccccagaatatttacaggtacatctgcaggagtctcttggccaggaggaaagccaagtatctgtgacttcagcagatccagtttttcaagtgccaatttcaaaggcagttcaacttactacgaatgatgccataaaaaccactctgctggtagaa

SEQ ID NO: 102901 - DNA, 2441 bp, Homo sapiens
  Payload ID: 79
  Gene Symbol: MTRR
  Gene Name: 5-methyltetrahydrofolate-homocysteine methyltransferase  reductase
  ENST ID: ENST00000513439
  CDS Start-End: 138-416
ggagctttctattggtcctgggtaccgagcatgggcgctgcgtcagtgcgcgctggcgcaaggttggtggaagtcgcgttgtgcaggttcgtgcccggctggcgcggcgtggtttcactgttacatgccttgaagtgatgaggaggtttctgttactatatgctacacagcagggacaggcaaaggccatcgcagaagaaatatgtgagcaagctgtggtacatggattttctgcagatcttcactgtattagtgaatccgataagtatgacctaaaaaccgaaacagctcctcttgttgttgtggtttctaccacgggcaccggagacccacccgacacagcccgcaagtttgttaaggaaatacagaaccaaacactgccggttgatttctttgctcacctgcggtctcggtgattcagaatacacctacttttgcaatggggggaagataattgataaacgacttcaagagcttggagcccggcatttctatgacactggacatgcagatgactgtgtaggtttagaacttgtggttgagccgtggattgctggactctggccagccctcagaaagcattttaggtcaagcagaggacaagaggagataagtggcgcactcccggtggcatcacctgcatcctcgaggacagaccttgtgaagtcagagctgctacacattgaatctcaagtcgagcttctgagattcgatgattcaggaagaaaggattctgaggttttgaagcaaaatgcagtgaacagcaaccaatccaatgttgtaattgaagactttgagtcctcacttacccgttcggtacccccactctcacaagcctctctgaatattcctggtttacccccagaatatttacaggtacatctgcaggagtctcttggccaggaggaaagccaagtatctgtgacttcagcagatccagtttttcaagtgccaatttcaaaggcagttcaacttactacgaatgatgccataaaaaccactctgctggtagaattggacatttcaaatacagacttttcctatcagcctggagatgccttcagcgtgatctgccctaacagtgattctgaggtacaaagcctactccaaagactgcagcttgaagataaaagagagcactgcgtccttttgaaaataaaggcagacacaaagaagaaaggagctaccttaccccagcatatacctgcgggatgttctctccagttcatttttacctggtgtcttgaaatccgagcaattcctaaaaaggcatttttgcgagcccttgtggactataccagtgacagtgctgaaaagcgcaggctacaggagctgtgcagtaaacaaggggcagccgattatagccgctttgtacgagatgcctgtgcctgcttgttggatctcctcctcgctttcccttcttgccagccaccactcagtctcctgctcgaacatcttcctaaacttcaacccagaccatattcgtgtgcaagctcaagtttatttcacccaggaaagctccattttgtcttcaacattgtggaatttctgtctactgccacaacagaggttctgcggaagggagtatgtacaggctggctggccttgttggttgcttcagttcttcagccaaacatacatgcatcccatgaagacagcgggaaagccctggctcctaagatatccatctctcctcgaacaacaaattctttccacttaccagatgacccctcaatccccatcataatggtgggtccaggaaccggcatagccccgtttattgggttcctacaacatagagagaaactccaagaacaacacccagatggaaattttggagcaatgtggttgttttttggctgcaggcataaggatagggattatctattcagaaaagagctcagacatttccttaagcatgggatcttaactcatctaaaggtttccttctcaagagatgctcctgttggggaggaggaagccccagcaaagtatgtgcaagacaacatccagcttcatggccagcaggtggcgagaatcctcctccaggagaacggccatatttatgtgtgtggagatgcaaagaatatggccaaggatgtacatgatgcccttgtgcaaataataagcaaagaggttggagttgaaaaactagaagcaatgaaaaccctggccactttaaaagaagaaaaacgctaccttcaggatatttggtcataaaaccagaaattaaagaaagaggattaagcttttttgactgaaagtactaaaagtcagctttactagtgccaaacctttaaattttcaaaagaaaattttctttcaacatttcttgaaggacatggagtggagattggatcatttaacaatataacaaaacttcctgatttgattttacgtatcttctatctacgcccttcctgtgcctgtgactctcccca

SEQ ID NO: 102902 - DNA, 546 bp, Homo sapiens
  Payload ID: 79
  Gene Symbol: MTRR
  Gene Name: 5-methyltetrahydrofolate-homocysteine methyltransferase  reductase
  Uniprot ID: Q9UBK8
  ENST ID: ENST00000510279
  CDS Start-End: 94-270
agtgcgcgctggcgcaaggttggtggaagtcgcgttgtgcaggttcgtgcccggctggcgcggcgtggtttcactgttacatgccttgaagtgatgaggaggtttctgttactatatgctacacagcagggacaggcaaaggccatcgcagaagaaatatgtgagcaagctgtggtacatggattttctgcagatcttcactgtattagtgaatccgataaggtctcggtgattcagaatacacctacttttgcaatggggggaagataattgataaacgacttcaagagcttggagcccggcatttctatgacactggacatgcagatgactgtgtaggtttagaacttgtggttgagccgtggattgctggactctggccagccctcagaaagcattttaggtcaagcagaggacaagaggagataagtggcgcactcccggtggcatcacctgcatcctcgaggacagaccttgtgaagtcagagctgctacacattgaatctcaagtcgagcttctgagattcgatgattcaggaagaaagg

SEQ ID NO: 102903 - DNA, 628 bp, Homo sapiens
  Payload ID: 79
  Gene Symbol: MTRR
  Gene Name: 5-methyltetrahydrofolate-homocysteine methyltransferase  reductase
  ENST ID: ENST00000506877
  CDS Start-End: 506-628
tcccggattccggccgctcgccctgcactaatctcctgggagaggcggcccggggcgggggtgggcagccggcttgcgcccgtggttcccacgcccttcggcctccgggggtcgccgcgggcgcgggctggggctcggacttggcctttggcctttggctttggtgtccccgggagcgtgtccttgggctcggcgtcggcctctgccgcgggaggcccctgggcggcgtggggtctctcctcatgttctgcctttggttctaggcgctttccaggcctagggaaaccgcactcggggacgcggggaactggggaacatgccgggttggggcggcgcgctccggggaacccgggacgttccgagcgcccacccggcgggacgcggccgtgagttctgcccgcggccgtgagctctgcccaccgcctccgcgccgcttccggggctgctggggcccgggcctccgctgagagtcgtgggaagtttcactgttacatgccttgaagtgatgaggaggtttctgttactatatgctacacagcagggacaggcaaaggccatcgcagaagaaatatgtgagcaagctgtggtacatggattttctgcagatcttcactgtattagtgaatcc

SEQ ID NO: 102904 - DNA, 6923 bp, Homo sapiens
  Payload ID: 80
  Gene Symbol: NT5DC1
  Gene Name: 5'-nucleotidase domain containing 1
  Uniprot ID: Q5TFE4
  ENST ID: ENST00000319550
  CDS Start-End: 83-1450
cggtcctgtcccgcagcgtcccgccagccagctccttgcacccttcgcggccgaggcgctccctggtgctccccgcgcagccatggctcagcacttctccctggccgcctgcgacgtggtcggattcgacctggaccacactctgtgtcgctacaacctgcccgagagcgccccgctcatttataatagctttgcccagttcctagttaaggagaaagggtacgataaggaattgctcaatgtgaccccagaggattgggatttctgttgcaaaggtttggcattggatctagaagatgggaacttccttaaacttgcaaataatggcactgttctcagggcaagccatggcaccaagatgatgactccagaggtgctggcagaggcatatggcaagaaagagtggaagcacttcttgtcggacactggaatggcttgccgctcaggaaagtattacttttacgacaactactttgacctgccaggagctcttctgtgtgccagggtggtggactatttaacaaaactgaacaatggtcaaaaaacatttgatttttggaaggatatagttgctgctatacaacacaattataaaatgtcagcttttaaggaaaactgtggaatatattttccagaaataaaaagagatccaggcagatatttacatagttgtcctgaatctgtgaaaaaatggcttcgacagctaaagaatgctgggaaaattcttctgttaattaccagttctcacagtgattactgtagacttctctgcgaatatattcttgggaatgattttacagacctttttgacattgtgattacaaatgcattgaagcctggtttcttctcccacttaccaagtcagagacctttccggacactcgagaatgatgaggagcaggaggcactgccatctctggataaacctggctggtactcccaagggaacgctgtccacctctatgaacttctgaagaaaatgactggcaaacctgaacccaaggttgtttattttggtgacagcatgcattcagatattttcccagctcgtcactatagtaattgggagacagtcctcatcctggaagaactcagaggggatgaaggcacgaggagtcagaggcctgaggagtcagagcctctagagaagaaaggaaaatatgagggaccaaaagcaaaacctttaaatacttcatctaaaaaatggggctctttttttattgattcagttttgggactggaaaatacagaagactccttggtttatacatggtcttgtaagagaatcagtacttacagcactattgcaattccaagtattgaagcaatcgcagaattacctctggactacaaatttacaagattctcttcaagcaattcaaaaacagctggctactatccaaatcctccactggtcttatcaagtgatgagacactgatatccaaataagttgtctttactgaaaaatgaagtgaagacccatatatgcagttaaaaaaaagttaattttcaaaaaatactgtaaaagactttaaggaacaagttttattgaccaataagttgatatttgtccataggtctcctttctataaatcatcttgatgtttaacaactcttattatattaaaatctcagtatcctaaaacttagaaccttattgatattttctatacagtagttttgtgattagaattcacctggggacacacactcacacgcacagtcactcttacacatatgcctagtccagtggttctcaaagtgtgatccatagactaatagcatagcattacctgagaacttgataatgcatatttgcaggccccacgcaaaacctgctgaatcagaagctctgagagtaaggcctaccaatctggtttaacaagcccgtcaggtgattctgatttacagtacagtttgagacccactggctagaacatatcctccagagacttggcttaattggtctgggtaaatatggctgagcgttgttatcttttgttatcttttatatgccctaggaaagtacaaccagaattgaaaaccaactgatctataccagttctttcaattaatagtcaagaacattgagtccagtgagattaagtgatttttgcaggctatgaggttttatgctattcctgtgttctccaaaacaagaaaataaaaagacatgacttattctctgttcatacagcaagtatggaaaaaagatgatctagaagtcaactatctcaacctccattgttacccactaggtttttttctaataatgttaaaggctatttaatttatttaatcaactttaagcattacattctcaattggggacaaaaattggttcttggggtgaaaaaatattagatatggcttgtggacttccaatatcatcctatccaacaaaatcttattccttagtattaatttatctcattgggaagaaatttgtagttaaaactatttaatgtaatttgaatttaatttctgtaattgggaaggagggtaataatgaacaaaaagtttgagaaaaaaatgctttaatgggttttacaggcatgctacaatccaggactgtggtgttctatgtgccgtgtatggtcatattagtagctatttgttgcaagatacttgaagccaaatgtttgcagtataggttcctggctactgtttatgctgtgatttcactctgtctatcatgggcagtattagaaaacacactggttttcactatctggtttacaaacactatcattattttacctggattgaagtgcagaatttggcatatcgatgcatgcaatggaaagaaaaaaaatttgttaaaatttgtaaatgttcagctaaatctcagatatactgtgggatgagtatctcagggtaagtaacaaaaaaacaaacaaaaaaaatcactgaaatttttccctcacagtcagtagctttgtttgatatttaacaataagtatatggtgatatacttgaaatttatgtccagaatgtcactggaatattacaatgagcataaataatcaagcttaggactaaatgaaagatactatctcatgtatgctttaaatagagaatttatttcttttaaaaataaagctatctttccttatccatgtttactctgtaaatggcaaataatacatctttaaatgcttatgaactactgttaatatgaaaaatgagaagtccaaaataagaaataactgcactttttgggccacttgagtagtggcgggggttcaggaggcagaattcagttgtcagaagttctagtattccctttatcattccacctaaagaccctgaacaagttaccaccaaatttggcttcagttttttccatcttatgaaaggaaaagtttagtttatttctaaatttccttcctttctagcagtcagtatttcttctaatgaatgttttttttctgtaattagaaagactataattaggctttttaaatttgtattttcattctttgtaaagagtgccaatggatatgaagattaaaaataatccaaatccataaaaattaaaaagaaaatattaaagaagttatatgaagcaaaaaaattgtataaatggacagaagacatgtaatattcgcatacaggcaaacattcataatctaaaggacacctaaaaatagatgtaagcgagcggaggttttctttgctggccactgtttatcgcatcagcagaggaaagatctgaatgactcagtgaccaaatgttttgtcagaatctggtatttggaatactgaggtagtaaaaactttatctgaaccatgaattacaatctaaaatcaacttctgagtttgttaaactctaaactgaaatcaagtattatttccccaccaatattcatatccaaaaataactttaaatacacacacacacacacacacacacacttttagtgaactggtttgaatgaaaataaatttatataattattttatataacaaatcagcataaaatggaaaatcaaactgcctctctagatataataaccttcactgactgttggaaatacatggatagctttttaaaatcttcagtgttggagtaacagtcccttacatcttttcagcctcttgagtacaagaagactatcataagagttagttccagattggtgcaagactggaatacacttgactgcttttattaaagccatgagggcataccaagtaattcacccagtatggtcttattgccacccttgaaaatccctgggcatggtccagtccacatagaatgaattcagaaaggtgtctcttgttggtctctagaactatcctcagaaataatagtaaaacagtggtcatgagtagcctcactaggctacttcatgtacattatcttgtttactctctatagcaaccatatgagatgtatataattattaaattgtacagatgggaaaattgaaattcagagagattaaatacaatgcttgctctgtgttacactgttagtaagagagcaatacatgaacccaagtttgatcctcaaaatcacacttttaattacttgatacataatgtcttccaatattgaatctagactagggcaaattctcagcccaaaaccacacttcaatttagcaataatgtcgtgctaggacatgagagggattaacattgaagacacagcctctatctttaagtaattcataatttagccaaatatattaaatatctgtaatataaaacttacctaggaaagtaaaatagagatccaagaatcaggagtcctaaagcatataatgagtctgttcctcttggaagccacacatgtcaaggtcatcagtaagcaggcctactctttcttcatattctgggttaatgttcaccttgactgcttggtaaatttccctcactggtgctgaagtaaccaaaatggggaaggagtgatgaaaactcatctttgagtaagcttagtgggaaatagtatatctgggcctatagagaagttgggtcattacttagaatgacaactggaaaagtacatagactgcttgccaatcagtttgttgtaccatgtacctgttcacagactcttttcaaaaaacaagtttattttactttttttggtactttggtcatgttgtttccttggtaaagatcaaagttgaataaagcttaacaaagtttaataaagaaaaggaataaattactatctaaatgtgttaaaagcaatcaccaagtttaatcacttaaaaaataaatattctcttaacagaaatgtcagcggttacttacaatgcttagcagctaaattccatgagtataacgtttaatgtctttttggtacattaaatattcagtgcctttgatgaagggaacaaactgataatttcattcatgtgcagcaaacatcaaggttacataagtaaattcaaatgtgtcaatctgtaactgtatggagtcctgtattaaatcaagtgataaaatgtacccttctcaaaggctattcatgaataagcataaccttcaactgaggcctgaatagtcatgtgtcagtagggtttttgttaacatttgtatgccaaatttattacgatagctgtgatagagtagaagttatgctagcttgaaatcagaaaactcaacagtgagacttgcatcttaggcagttctactttctggacctctgttttctcaactatttaaatggaaataataaaacttgtgttacaaggattatcaaagtaatatgtgcacttcgaagtgcctgacatatctcagatcttttgaggagattgtgaagccagggaataagtaactgaaacaagatcaaatatccatgtcttaaattgtgattctctaggacagggactcagtaattaaaaatataggcaagggtttgttttggtttttgtttgttaatgatgaaaacatttaaggacgttgagttaactggagataaagcagcagcacgaggagtaatggggagaagggcctgatgagaaggtcagagaagccttttataagtgtctggcttgcactgaatgcccagaaatggaagcgcaaggaaagtgttgtgtgaggaccagggtaattatgcagtgtcaccactactcacagggattatggcctgagaaactaaaatgatacttcttaggtgaccagaggatgggagaacttcttaactggtttggaggtccacataaagaataattggggtctagaattaaggaaggaaaagcaatacaaagaaatggagcagggctatagcagtgaaccaattggttggtaagtgaaacctgtaagatgcctaattgagtaatttaatgactaattttattaggctaaacagaacagaaaccatgctaatctgtaacaaataagtggcgccagcctattacagtgaatgctattggttagactaaagcagataataaaccaagtgtaggaaaaatgacattttctgattacatccagaacaggcatagaaaaggtataataaagcttgaaacaggtggctgacaatgcagaaatcaatcactgaactgaaaaggtaaaatgaacattgttagaggaatttaggattaagatggatgtagagcttgcaaaagaaaacctagctctctaatacttaaagttctctagccctagaaaaaaatacctcagcaagaaattgcaagtaataattgcaccaagagtcagcatctattttaactgtatgtttaattaagtttctaactcaaatgagaaattttgggccatttttgtcaaatttttgcttagatggctacaaatacttagcaattcattttcatagattttgtagcatccacaaagccctccttactgcagagaatgcagaggtatttatccaataaactttcatgtaattgctgctatacagcaaaactatcattaccggtaattaaagttgtgatacctga

SEQ ID NO: 102905 - DNA, 667 bp, Homo sapiens
  Payload ID: 80
  Gene Symbol: NT5DC1
  Gene Name: 5'-nucleotidase domain containing 1
  ENST ID: ENST00000419791
  CDS Start-End: 81-667
gtcctgtcccgcagcgtcccgccagccagctccttgcacccttcgcggccgaggcgctccctggtgctccccgcgcagccatggctcagcacttctccctggccgcctgcgacgtggtcggattcgacctggaccacactctgtgtcgctacaacctgcccgagagcgccccgctcatttataatagctttgcccagttcctagttaaggagaaagggtacgataaggaattgctcaatgtgaccccagaggattgggatttctgttgcaaaggtttggcattggatctagaagatgggaacttccttaaacttgcaaataatggcactgttctcagggcaagccatggcaccaagatgatgactccagaggtgctggcagaggcatatggcaagaaagagtggaagcacttcttgtcggacactggaatggcttgccgctcaggaaagtattacttttacgacaactactttgacctgccaggagctcttctgtgtgccagggtggtggactatttaacaaaactgaacaatggtcaaaaaacatttgatttttggaaggatatagttgctgctatacaacacaattataaaatgtcagcttttaaggtaagaagattggccacatccttgcttcaggatatatctacaagtttcatacttattta

SEQ ID NO: 102906 - DNA, 907 bp, Homo sapiens
  Payload ID: 80
  Gene Symbol: NT5DC1
  Gene Name: 5'-nucleotidase domain containing 1
  ENST ID: ENST00000460749
  CDS Start-End: 1-425
acaattataaaatgtcagcttttaaggaaataaaaagagatccaggcagatatttacatagttgtcctgaatctgtgaaaaaatggcttcgacagctaaagaatgctgggaaaattcttctgttaattaccagttctcacagtgattactgtagacttctctgcgaatatattcttgggaatgattttacagacctttttgacattgtgattacaaatgcattgaagcctggtttcttctcccacttaccaagtcagagacctttccggacactcgagaatgatgaggagcaggaggcactgccatctctggataaacctggctggtactcccaagggaacgctgtccacctctatgaacttctgaagaaaatgactggcaaacctgaacccaagaaaatatttaccagaatttctgtgagctgagagatcgtggggtaacagagccctgctccattggctgtcaccatgccacagtctcctggggactcctgagggttaatggatggagcagtctgacttgcagatgctgattctcatatcccttaactctgttttcacatctgaaaattgagaggttgtttattttggtgacagcatgcattcagatattttcccagctcgtcactatagtaattgggagacagtcctcatcctggaagaactcagaggggatgaaggcacgaggagtcagaggcctgaggagtcagagcctctagagaagaaaggaaaatatgagggaccaaaagcaaaacctttaaatacttcatctaaaaaatggggctctttttttattgattcagttttgggactggaaaatacagaagactccttggtttatacatggtcttgtaagagaatcagtacttacagcactattgcaattccaagtattgaagcaatcgcag

SEQ ID NO: 102907 - DNA, 2047 bp, Homo sapiens
  Payload ID: 81
  Gene Symbol: NT5DC2
  Gene Name: 5'-nucleotidase domain containing 2
  Uniprot ID: Q9H857
  ENST ID: ENST00000307076
  CDS Start-End: 402-1964
acacaggcttgatgctcgctcccgtttctacaggaggttttgacggctggatgctgcagggcatcccctcgcctggaggaggttcacttgtggccaggttcccagcacacccacttgctcactggggccctggggacaccgccacactcgagcccatcctacggcctcaatccttaccagtccccaggccatggactgccacactgtaggtcttcaatcaaggttcagtggagtttcgaatgtacacacaccctgaaagacagcgcggccacctcagaaaacaacgcgcgcccagctggctcccctccgacagggcccacggctactgggtcggcctcctccggaccctgagcacagcctggtatgcgtgcgggctcggaatacggatctgagcagaagaaatgcgagtggagagcggttctgcgcaggaaagaggaattttgttggaaagcctgtcgacgttgctagaaaagaccacagcatctcacgaggggcgtgcgccgggaaaccgggagttgacggacctcctgccccccgaggtctgcagtctcctgaacccagcagccatctacgccaacaacgagatcagcctgcgtgacgttgaggtctacggctttgactacgactacaccctggcccagtatgcagacgcactgcaccccgagatcttcagtaccgcccgtgacatcctgatcgagcactacaagtacccagaagggattcggaagtatgactacaaccccagctttgccatccgtggcctccactatgacattcagaagagccttctgatgaagattgacgccttccactacgtgcagctggggacagcctacaggggcctccagcctgtgccagacgaggaggtgattgagctgtatgggggtacccagcacatcccactataccagatgagtggcttctatggcaagggtccctccattaagcagttcatggacatcttctcgctaccggagatggctctgctgtcctgtgtggtggactactttctgggccacagcctggagtttgaccaagcacatctctacaaggacgtgacggacgccatccgagacgtgcatgtgaagggcctcatgtaccagtggatcgagcaggacatggagaagtacatcctgagaggggatgagacgtttgctgtcctgagccgcctggtggcccatgggaaacagctgttcctcatcaccaacagtcctttcagcttcgtagacaaggggatgcggcacatggtgggtcccgattggcgccagctcttcgatgtggtcattgtccaggcagacaagcccagcttcttcactgaccggcgcaagcctttcagaaaactcgatgagaagggctcacttcagtgggaccggatcacccgcttggaaaagggcaagatctatcggcagggaaacctgtttgacttcttacgcttgacggaatggcgtggcccccgcgtgctctacttcggggaccacctctatagtgatctggcggatctcatgctgcggcacggctggcgcacaggcgccatcatccccgagctggagcgtgagatccgcatcatcaacacggagcagtacatgcactcgctgacgtggcagcaggcgctcacggggctgctggagcgcatgcagacctatcaggacgcggagtcgaggcaggtgctggctgcctggatgaaagagcggcaggagctgaggtgcatcaccaaggccctgttcaatgcgcagttcggcagcatcttccgcaccttccacaaccccacctacttctcaaggcgcctcgtgcgcttctctgacctctacatggcctccctcagctgcctgctcaactaccgcgtggacttcaccttctacccacgccgtacgccgctgcagcacgaggcacccctctggatggaccagctctgcaccggctgcatgaagacccccttccttggtgacatggcccacatccgctgagggcacctttattgtctgggacaggccctcagcccctcctgccccatccacccagacaagcaataaaagtggtctcctccctg

SEQ ID NO: 102908 - DNA, 1795 bp, Homo sapiens
  Payload ID: 81
  Gene Symbol: NT5DC2
  Gene Name: 5'-nucleotidase domain containing 2
  Uniprot ID: Q9H857
  ENST ID: ENST00000422318
  CDS Start-End: 41-1714
ggccgagggcagcgcgggcggcgggcggcgcgcggtgggcatggcgggtgcggggctgcgggcggccgctcggcgctggctgctgtgcggaggccacggcgggccgcgagccgcctcgtcctcgccctcctgccctgggtgcggccccccgggtcccggcgcccactgccccggcgtcccgcgctccgcgcccgcccaggcacccaccagcggcgccgacctcagcgcgcacctatgggctcgctaccaggacatgcggagactggtgcacgacctcctgccccccgaggtctgcagtctcctgaacccagcagccatctacgccaacaacgagatcagcctgcgtgacgttgaggtctacggctttgactacgactacaccctggcccagtatgcagacgcactgcaccccgagatcttcagtaccgcccgtgacatcctgatcgagcactacaagtacccagaagggattcggaagtatgactacaaccccagctttgccatccgtggcctccactatgacattcagaagagccttctgatgaagattgacgccttccactacgtgcagctggggacagcctacaggggcctccagcctgtgccagacgaggaggtgattgagctgtatgggggtacccagcacatcccactataccagatgagtggcttctatggcaagggtccctccattaagcagttcatggacatcttctcgctaccggagatggctctgctgtcctgtgtggtggactactttctgggccacagcctggagtttgaccaagcacatctctacaaggacgtgacggacgccatccgagacgtgcatgtgaagggcctcatgtaccagtggatcgagcaggacatggagaagtacatcctgagaggggatgagacgtttgctgtcctgagccgcctggtggcccatgggaaacagctgttcctcatcaccaacagtcctttcagcttcgtagacaaggggatgcggcacatggtgggtcccgattggcgccagctcttcgatgtggtcattgtccaggcagacaagcccagcttcttcactgaccggcgcaagcctttcagaaaactcgatgagaagggctcacttcagtgggaccggatcacccgcttggaaaagggcaagatctatcggcagggaaacctgtttgacttcttacgcttgacggaatggcgtggcccccgcgtgctctacttcggggaccacctctatagtgatctggcggatctcatgctgcggcacggctggcgcacaggcgccatcatccccgagctggagcgtgagatccgcatcatcaacacggagcagtacatgcactcgctgacgtggcagcaggcgctcacggggctgctggagcgcatgcagacctatcaggacgcggagtcgaggcaggtgctggctgcctggatgaaagagcggcaggagctgaggtgcatcaccaaggccctgttcaatgcgcagttcggcagcatcttccgcaccttccacaaccccacctacttctcaaggcgcctcgtgcgcttctctgacctctacatggcctccctcagctgcctgctcaactaccgcgtggacttcaccttctacccacgccgtacgccgctgcagcacgaggcacccctctggatggaccagctctgcaccggctgcatgaagacccccttccttggtgacatggcccacatccgctgagggcacctttattgtctgggacaggccctcagcccctcctgccccatccacccagacaagcaataaaagtggtctcctccc

SEQ ID NO: 102909 - DNA, 772 bp, Homo sapiens
  Payload ID: 81
  Gene Symbol: NT5DC2
  Gene Name: 5'-nucleotidase domain containing 2
  ENST ID: ENST00000489316
  CDS Start-End: 1-772
ccaggacatgcggagactggtgcacgacctcctgccccccgaggtctgcagtctcctgaacccagcagccatctacgccaacaacgagatcagcctgcgtgacgttgaggtctacggctttgactacgactacaccctggcccagtatgcagacgcactgcaccccgagatcttcagtaccgcccgtgacatcctgatcgagcactacaagagccttctgatgaagattgacgccttccactacgtgcagctggggacagcctacaggggcctccagcctgtgccagacgaggagggtccctccattaagcagttcatggacatcttctcgctaccggagatggctctgctgtcctgtgtggtggactactttctgggccacagcctggagtttgaccaagcacatctctacaaggacgtgacggacgccatccgagacgtgcatgtgaagggcctcatgtaccagtggatcgagcaggacatggagaagtacatcctgagaggggatgagacgtttgctgtcctgagccgcctggtggcccatgggaaacagctgttcctcatcaccaacagtcctttcagcttcgtagacaaggggatgcggcacatggtgggtcccgattggcgccagctcttcgatgtggtcattgtccaggcagacaagcccagcttcttcactgaccggcgcaagcctttcagaaaactcgatgagaagggctcacttcagtgggaccggatcacccgcttggaaaagggcaagatctatcggcag

SEQ ID NO: 102910 - DNA, 582 bp, Homo sapiens
  Payload ID: 81
  Gene Symbol: NT5DC2
  Gene Name: 5'-nucleotidase domain containing 2
  ENST ID: ENST00000471522
  CDS Start-End: 326-582
ctagtctggccatacagagccagcccctctgggttggagtcctcagtgcccacatgacctcctgccccccgaggtctgcagtctcctgaacccagcagccatctacgccaacaacgagatcagcctgcgtgacgttgaggtctacggctttgactacgactacaccctggcccagtatgcagacgcactgcaccccgagatcttcagtaccgcccgtgacatcctgatcgagcactacaagtacccagaagggattcggaagtatgactacaaccccagctttgccatccgtggcctccactatgacattcagaagagccttctgatgaagattgacgccttccactacgtgcagctggggacagcctacaggggcctccagcctgtgccagacgaggagggtccctccattaagcagttcatggacatcttctcgctaccggagatggctctgctgtcctgtgtggtggactactttctgggccacagcctggagtttgaccaagcacatctctacaaggacgtgacggacgccatccgagacgtgcatgtgaagggcctcatgtaccagtggatcgagca

SEQ ID NO: 102911 - DNA, 670 bp, Homo sapiens
  Payload ID: 81
  Gene Symbol: NT5DC2
  Gene Name: 5'-nucleotidase domain containing 2
  ENST ID: ENST00000463947
  CDS Start-End: 1-585
tggcgccagctcttcgatgtggtcattgtccaggcagacaagcccagcttcttcactgaccggcgcaagcctttcagaaaactcgatgagaagggctcacttcagtgggaccggatcacccgcttggaaaagggcaagatctatcggcagggaaacctgtttgacttcttacgcttgacggaatggcgtggcccccgcgtgctctacttcggggaccacctctatagtgatctggcggatctcatgctgcggcacggctggcgcacaggcgccatcatccccgagctggagcgtgagatccgcatcatcaacacggagcagtacatgcactcgctgacgtggcagcaggcgctcacggggctgctggagcgcatgcagacctatcaggacgcggagtcgaggcaggtgctggctgcctggatgaaagagcggcaggagctgagctgcctgctcaactaccgcgtggacttcaccttctacccacgccgtacgccgctgcagcacgaggcacccctctggatggaccagctctgcaccggctgcatgaagacccccttccttggtgacatggcccacatccgctgagggcacctttattgtctgggacaggccctcagcccctcctgccccatccacccagacaagcaataaaagtggtctcctccctgtg

SEQ ID NO: 102912 - DNA, 1639 bp, Homo sapiens
  Payload ID: 81
  Gene Symbol: NT5DC2
  Gene Name: 5'-nucleotidase domain containing 2
  Uniprot ID: Q9H857
  ENST ID: ENST00000459839
  CDS Start-End: 41-1639
ggccgagggcagcgcgggcggcgggcggcgcgcggtgggcatggcgggtgcggggctgcgggcggccgctcggcgctggctgctgtgcggaggccacggcgggccgcgagccgcctcgtcctcgccctcctgccctgggtgcggccccccgggtcccggcgcccactgccccggcgtcccgcgctccgcgcccgcccaggcacccaccagcggcgccgacctcagcgcgcacctatgggctcgctaccaggacatgcggagactggtgcacgacctcctgccccccgaggtctgcagtctcctgaacccagcagccatctacgccaacaacgagatcagcctgcgtgacgttgaggtctacggctttgactacgactacaccctggcccagtatgcagacgcactgcaccccgagatcttcagtaccgcccgtgacatcctgatcgagcactacaagagccttctgatgaagattgacgccttccactacgtgcagctggggacagcctacaggggcctccagcctgtgccagacgaggaggtgattgagctgtatgggggtacccagcacatcccactataccagatgagtggcttctatggcaagggtccctccattaagcagttcatggacatcttctcgctaccggagatggctctgctgtcctgtgtggtggactactttctgggccacagcctggagtttgaccaagcacatctctacaaggacgtgacggacgccatccgagacgtgcatgtgaagggcctcatgtaccagtggatcgagcaggacatggagaagtacatcctgagaggggatgagacgtttgctgtcctgagccgcctggtggcccatgggaaacagctgttcctcatcaccaacagtcctttcagcttcgtagacaaggggatgcggcacatggtgggtcccgattggcgccagctcttcgatgtggtcattgtccaggcagacaagcccagcttcttcactgaccggcgcaagcctttcagaaaactcgatgagaagggctcacttcagtgggaccggatcacccgcttggaaaagggcaagatctatcggcagggaaacctgtttgacttcttacgcttgacggaatggcgtggcccccgcgtgctctacttcggggaccacctctatagtgatctggcggatctcatgctgcggcacggctggcgcacaggcgccatcatccccgagctggagcgtgagatccgcatcatcaacacggagcagtacatgcactcgctgacgtggcagcaggcgctcacggggctgctggagcgcatgcagacctatcaggacgcggagtcgaggcaggtgctggctgcctggatgaaagagcggcaggagctgaggtgcatcaccaaggccctgttcaatgcgcagttcggcagcatcttccgcaccttccacaaccccacctacttctcaaggcgcctcgtgcgcttctctgacctctacatggcctccctcagctgcctgctcaactaccgcgtggacttcaccttctacccacgccgtacgccgctgcagcacgaggcacccctctggatggaccagctctgcaccggctgcatgaagacccccttccttggtgacatggcccacatccgctga

SEQ ID NO: 102913 - DNA, 2004 bp, Homo sapiens
  Payload ID: 81
  Gene Symbol: NT5DC2
  Gene Name: 5'-nucleotidase domain containing 2
  ENST ID: ENST00000492555
  CDS Start-End: 354-689
ggatgctgcagggcatcccctcgcctggaggaggttcacttgtggccaggttcccagcacacccacttgctcactggggccctggggacaccgccacactcgagcccatcctacggcctcaatccttaccagtccccaggccatggactgccacactgtaggtcttcaatcaaggttcagtggagtttcgaatgtacacacaccctgaaagacagcgcggccacctcagaaaacaacgcgcgcccagctggctcccctccgacagggcccacggctactgggtcggcctcctccggaccctgagcacagcctggtatgcgtgcgggctcggaatacggatctgagcagaagaaatgcgagtggagagcggttctgcgcaggaaagaggaattttgttggaaagcctgtcgacgttgctagaaaagaccacagcatctcacgaggggcgtgcgccgggaaaccgggagttgacgggtcagtgcggccagttgccgaggtccgaaccaagcgggcgcagtgaccgtggcccacaaccctgcagcgcacggcccagtcacctggttagcggacgtcggctgccctgcaggcccctcggcctcccccagcgtgggcctggcaccgggaagcgcgggaagggctctttatttgttagaccaacctcctgccccccgaggtctgcagtctcctgaacccagcagccatctacgccaacaacgagatcagcctgcgtgacgttgaggtctacggctttgactacgactacaccctggcccagtatgcagacgcactgcaccccgagatcttcagtaccgcccgtgacatcctgatcgagcactacaagtacccagaagggattcggaagtatgactacaaccccagctttgccatccgtggcctccactatgacattcagaagagccttctgatgaagattgacgccttccactacgtgcagctggggacagcctacagggtccctccattaagcagttcatggacatcttctcgctaccggagatggctctgctgtcctgtgtggtggactactttctgggccacagcctggagtttgaccaagcacatctctacaaggacgtgacggacgccatccgagacgtgcatgtgaagggcctcatgtaccagtggatcgagcaggacatggagaagtacatcctgagaggggatgagacgtttgctgtcctgagccgcctggtggcccatgggaaacagctgttcctcatcaccaacagtcctttcagcttcgtagacaaggggatgcggcacatggtgggtcccgattggcgccagctcttcgatgtggtcattgtccaggcagacaagcccagcttcttcactgaccggcgcaagcctttcagaaaactcgatgagaagggctcacttcagtgggaccggatcacccgcttggaaaagggcaagatctatcggcagggaaacctgtttgacttcttacgcttgacggaatggcgtggcccccgcgtgctctacttcggggaccacctctatagtgatctggcggatctcatgctgcggcacggctggcgcacaggcgccatcatccccgagctggagcgtgagatccgcatcatcaacacggagcagtacatgcactcgctgacgtggcagcaggcgctcacggggctgctggagcgcatgcagacctatcaggacgcggagtcgaggcaggtgctggctgcctggatgaaagagcggcaggagctgaggtgcatcaccaaggccctgttcaatgcgcagttcggcagcatcttccgcaccttccacaaccccacctacttctcaaggcgcctcgtgcgcttctctgacctctacatggcctccctcagctgcctgctcaactaccgcgtggacttcaccttctacccacgccgtacgccgctgcagcacgaggcacccctctggatggaccagctctgcaccggctgcatgaagacccccttccttggtgacatggcccacatccgctga

SEQ ID NO: 102914 - DNA, 7207 bp, Homo sapiens
  Payload ID: 82
  Gene Symbol: NT5DC3
  Gene Name: 5'-nucleotidase domain containing 3
  Uniprot ID: Q86UY8
  ENST ID: ENST00000392876
  CDS Start-End: 42-1688
gcagagcggcgcggcggcggtggcggcagcaggcagcaggcatgaccatggcagcggcggcggtggtggcacgcggggccggggcgagggcagcgacagcggcggctttgcggggtggctgcgggaccgcggctcgggggcggccgtgtgcgggccccgcccggcccttgtgcactgcacccgggaccgccccggacatgaagcgctacctgtgggagcgctaccgggaggcgaagagaagcacagaagaattggttccttccattatgagcaacttgttgaatccagatgccattttctcaaacaatgaaatgagcctgtcagacattgaaatctatggcttcgattatgattacaccttggtgttttattcaaagcacctccacacgctgatatttaatgctgcacgggaccttctcatcaatgaacaccggtatccagcagaaatcaggaagtatgagtatgacccaaattttgcaattcgtggacttcattatgatgtacagcgggcagtattaatgaagatcgatgcttttcattatatccagctgggaactgtctacagaggcctcagtgttgtccctgatgaagaagtcattgaaatgtacgaggggtcccacgtgcccttggagcagatgagtgacttttacggaaagagctctcatggaaacacgatgaagcagttcatggacatcttctccctgcccgagatgaccctcctgtcctgcgtgaatgaatacttcctcaagaacaacatcgactatgagcctgtgcatctgtacaaagatgtcaaggattcaattcgagacgtccacatcaaaggaataatgtacagagcaattgaagcagacattgaaaagtacatctgctatgctgagcagacccgcgcagtgttggccaaactggctgatcatggcaagaagatgtttctcatcaccaatagccccagtagctttgtggacaaagggatgagttatatcgttgggaaagactggagggacctgttcgatgtggtcattgttcaggctgagaagccaaacttctttaatgataagcggaggcctttccgaaagatgaatgagaaaggtgtcttactctgggataaaatccataagttgcagaaaggccagatatacaagcagggtaatttatatgaatttttgaagcttactggatggagaggatccagagtgttgtattttggtgaccatatatacagtgacctggcggatttgaccctaaagcatggctggaggactggtgcaatcatcccagagttgagatctgagctcaaaatcatgaacacggagcaatacattcaaaccatgacctggctgcagaccttgactggcttattggaacagatgcaggttcacagagatgctgagtcacagctggttttgcaggagtggaaaaaggaaaggaaggagatgcgagaaatgaccaagagtttcttcaatgcccagtttggaagcctgttccgcacagaccagaacccaacctacttcctaaggcgcctgtcgcgcttcgctgacatctacatggcgtctctgagctgcctcctgaactatgacgtcagccacactttctacccccggaggactccactgcagcacgaactgcccgcctggtcagaaaggccccccaccttcggaacccctctcctgcaggaggcccaggccaagtagccaagggcaaaaactagaaactgtaactgcccctgattgggcaggcatgatggggttgacttcatgtgggtctgagtgttgcttttggaaaagatacagataagccttttgatatttattttgtaccttacggagaataattctcccaatggttaagacaggagctagcagcccacccctccagcctttccccccatgcagggctgaaaggcaagcttcacattggaactctgattttgcctttttgtttactgaggtcctggaacatcaggtttcctgggataggtgagaccacttgatgccatgtctgtattctagcaggtcaagcttgaaacggttcttgactcctccatggaacatttcctgaacatttacgggctatgcattgggaactgcaggggcacagtgatgggcaaagattagctgcttccagaaggctgatttcgtgggctccacaatggtaaaacgctgctgtgagtggcagagaggttccccaggtgatggccagttcccaaatcatttggtactaaggctttgacattctggcacatcacatcaaatagaacacagcctccctggaaggacttaagtgagaaagaacaagagaagctgcaactcctggacccttttgtcctcagtgtgtggttcctgcgtccttccccagcatggaggagggcaggagagaggagatgagagctctggtcaaaacctgccagctagtggaacagccttctgtagagccttctgcaagaaacgagtgggtttgaagaaccaaaacatttgtggtaggtctcccaggagcttgttaaacctggaaacaccacctgagttggtttcatctgctcattggaagaaagaaaatgaaccaggaaaaagcatctttgtcatgaaatgctatgccatgccacccacccagttgaattggaatcctgttaaaacatgagatttaccagaaacagtcctttgtctagatggaaacaaacaagatcctggcttctctctaatgagttaccaactgagaggtgcttggattggccaggggaggaggaagatggccaccacaacttagccatgtccagccttctcttagatttcactcctgtgatgtttgtgcgactatttgggagtttgtgtagtttgttttttttttttttgttttgttttgtttttttttagatgtctaagatgggaaagggcgaaggacattgaagctaaggaatagatatgacctagctaaccaagcttttctcatttccttctgttttgttttgttgagatggagttttgctcttattgcccaggctggagtgcagtggcacaatctcagctcactgcaacctctgcctcccgggttcaagcgattctcctgcctcagcctcccaagtagctgggattacaggcatgcactaccacacccagctaattttgtatttctagtagagatggggtttctccatgttggtcaggctggtctcgaactcccgacctcagataatctgcccgccttggcctcccaaattgctgggattacaggtgtgagccaccgcacctggcctgcttttttcatttctttctaggggcaatgcaagtggcatgtattccttttgttggagggaagaatccttaattgcacctgcatttgtagtatccttcaatgtaaagtgcatatttactgcactctctgagtgctatgggaatgtctgctgttattagttatggggctgctaatactgttttaattgcatatgctatatcaatacttctgttcagattagcctaatctagtattgctaaaactcattttaagcttttgcggtaacttgtatatattcttaaatctaaaggatggcaggaacatgaggggagcttgtggagagtgcttgcttattcaacatttttattgtgataaatgtatgtaaccatctattgatgaaatccaagtctggcattccatgggctccttgccagatggcagaaacttaatgagttatatagcatcctttgtaatgctgcttgttatagttggaatgtacttgtgatatttggctgtatttaactataatggtgaaggtgaccctttagatccaataaggcttctccccatcttctacattttgttatgaacacagtaaggcacagtagtatgttctttttttggaacagggtaggcattttgtttattgtttgcttgcttctaggtgttttcgccatcagggtgtattggaggctgacacttaatgggtgtgtgttgcgcccagaactgctcggtgtcggggttctaaaagaatgcgctggtgttcttggcttcaagtttctgctttggagaagcagattcaggaagtaggtgttgcttaaaaataattcttggtttttatctaatcagatattcattgattacctaccaggtgccagttatagggtgttttgtttactcaagaatgaagtagaactatttttaaaacctgtttccatgagtgttcacgttaggtgacctaagctttgaaggagaaaaacatttttgggtatgaataatgagttttgtaatcaattcccagttagaagaatttcagtctctgggccattgagcttggcagtgttgagatctcccatgtgacagaagcctgacatctgggccaccaaggctcactgactgtgtaccttgcagactgtagacccatgtcgtggcggtaacggggccgaacacagtcattcccatgtgaacgatggaggcacatcccactttattattaatccttgtatatactcagtcaggacagattttaacttgtcgctgtcatgactttttttttttttttttgaggcaaggtctcgctctgttgcccattctggagtgcagtggtgtgatctcggctcactgcaacctcttgcctcccaggttcaagcaattttcgtgcctcagcctcccgagtagctgggactactggtacatgccaccaggcctggccaagttttgtagttttaatagagatggggtttcaccatgttggccaggctggtctcaaactcctagcctcaagtgttctgcccacctcagccttccaaagtgctgggattctgggtgtgagccactgtcatgcctggcctcgtcatgactcttttctctttttttttttttttttttttgagatttagttttgctctttttgcccaggccggagtgcaatggcacgatcttggctcactccaacctccgcctcctgggttcaagtgattctcctgcctcagcctcccgagtagctgggattacaggtgcccaccaccacatccagctaatttttttgtatttttagtagagacggggtttcaccatgttggccaggctggtctcgaactcctgaccttgggtaatccacctgccttggcctcccaaggtgctgggattacaggcatgagccaccgtgcccagcctatcatgactcaactgggatctggcacactgcactgggtgttttgttctctgatgtgcacattgatgaatgcatattggtacaagggaaatgaatctgttttcagccatttaaaaaattgtgttgtaaagcaaacaaaaatagcttgaacatttaaaaattactgtttaatattgtttgactgattttctaagaattatgtgaacaatgatgagtccagggcagcagccatcacaaatatgacagtccagcaaggcccatggaggtccctttggaagggacttgcacagctgattttctttttccagtgttgtttttacgggtgaaacgtggcttttgaaatactttagttgtttggcttagagctcccactttccccctaacatagtgcctgtctgttttttaaaacattttacccttcggcactattttctgctattcccattaatattatgtaacataaaccacttgctactgatttgggcatattacagactacaattactagttgctttgaatgcattggcactcttaattattgcaaaggagaattgaaaagtagtcttgtggtcctagttaatttagctttgggcaaactaagtggcttttcttctgtcctcttctcaaaaggccttttaagcagcagagactgggctaaatactggaactgaattccacttttctgcctgctcatttgctgccaaagaccacttggggctccttgtctagaatgctctaagacgaaatttggccagacacagggttccttgattgttctgttcaactaatagagaacctacattttgccttcttaatatcgactttcttttgtaccaggtttttctttctttcttttttgccttaggagcttagctcaaagttcagctaacctttgacactactagtgtcatttagtaacagtaatctttgacactactagtgtcatttaggagcttagctcaaagttcagctaacctttgacactgctagtgcgttcaagaaagggtagggaatgaagtacccttaatgcagggtcagcaaacttttcctgtaaaaggccagataggaagtatttttggctttttgggctgtttgcttttgctactactactgtgggaatgaccatggtcatggctgtgttccagcacaacttgatttaccaagacaagctgtgggctgtatttggtcctcaggctgtggcttgctagcccctgctctaatggattgtgttggcggcaatggcaagattcccttgctgagaacatgcagatgaataaccttatagctgggatgcagagaggagaaagttctgtaggtaataagtgcactgtattccctctgagctacttcctgggcatagttacatgtatggccagtgtgtgtacttgagccatcaggctcagacacttgttgaatatacctctcattgcattagtttgtaattgtgctagtgctgggtgctgagctcagctgcccggatgacctttccagactgaaggacatactcccctaacagctgggagtgctgctggctggccatttacttccagcccttatgaggagtttcccctgctgaagagccctgcctgccccagatcatacccccttcctgcctgtaacccttaccggctccatatggggtacaaagggctggcctcctcaccccaacttgggaaaccctctggggccatcccagctccagagccccttgtggggtcagtgagacctcattgtggccacattacagcccagtgcctctccctgacaagcctgtacccagccggctcagcccacagcactgtcctatgaaccttcctgcacgccattctccacctcagtatctgctttcggggaacccaacctgcgacagtgcttctgtgtgttttcagtcctgcaggtttgaactctgactttggagacttttccagttatctcgtggaatgacagattgtgcctgtatgatatcaggcacaattaatgcaaattaggcagacctatttattctagatgtgaatttgctatttattttaaatgttgattttatgtgttatgtgactctgaacttattgccaaataaaagtttgaattgta

SEQ ID NO: 102915 - DNA, 799 bp, Homo sapiens
  Payload ID: 82
  Gene Symbol: NT5DC3
  Gene Name: 5'-nucleotidase domain containing 3
  ENST ID: ENST00000415849
  CDS Start-End: 1-406
ggccaaactggctgatcatggcaagaagatgtttctcatcaccaatagccccagtagctttgtggacaaagggatgagttatatcgttgggaaagactggagggacctgttcgatgtggtcattgttcaggctgagaagccaaacttctttaatgataagcggaggcctttccgaaagatgaatgagaaaggtgtcttactctgggataaaatccataagttgcagaaaggccagatatacaagcagggtaatttatatgaatttttgaagcttactggatggagaggatccagagtgttgtattttggtgaccatatatacagtgacctggcgaccatggttaatgattccagacctagtgtttctgcaggggttgtgactcacggcaattatttccagaactgaaactttcttggaatgaaatgatcaaaggctggggccaaataggttttaattaaatgtaattcattgaattcagcttggtgaataactaaccattaccatcaaaaagatttgaccctaaagcatggctggaggactggtgcaatcatcccagagttgagatctgagctcaaaatcatgaacacggagcaatacattcaaaccatgacctggctgcagaccttgactggcttattggaacagatgcaggttcacagagatgctgagtcacagctggttttgcaggagtggaaaaaggaaaggaaggagatgcgagaaatgaccaagagtttcttcaatgcccagtttggaagcctgttccgcacagaccagaacccaacctacttcctaaggcgc

SEQ ID NO: 102916 - DNA, 2172 bp, Homo sapiens
  Payload ID: 82
  Gene Symbol: NT5DC3
  Gene Name: 5'-nucleotidase domain containing 3
  ENST ID: ENST00000447799
  CDS Start-End: 1-368
aaaccatgacctggctgcagaccttgactggcttattggaacagatgcaggttcacagagatgctgagtcacagctggttttgcaggagtggaaaaaggaaaggaaggagatgcgagaaatgaccaagagtttcttcaatgcccagtttggaagcctgttccgcacagaccagaacccaacctacttcctaaggcgcctgtcgcgcttcgctgacatctacatggcgtctctgagctgcctcctgaactatgacgtcagccacactttctacccccggaggactccactgcagcacgaactgcccgcctggtcagaaaggccccccaccttcggaacccctctcctgcaggaggcccaggccaagtagccaagggcaaaaactagaaactgtaactgcccctgattgggcaggcatgatggggttgacttcatgtgggtctgagtgttgcttttggaaaagatacagataagccttttgatatttattttgtaccttacggagaataattctcccaatggttaagacaggagctagcagcccacccctccagcctttccccccatgcagggctgaaaggcaagcttcacattggaactctgattttgcctttttgtttactgaggtcctggaacatcaggtttcctgggataggtgagaccacttgatgccatgtctgtattctagcaggtcaagcttgaaacggttcttgactcctccatggaacatttcctgaacatttacgggctatgcattgggaactgcaggggcacagtgatgggcaaagattagctgcttccagaaggctgatttcgtgggctccacaatggtaaaacgctgctgtgagtggcagagaggttccccaggtgatggccagttcccaaatcatttggtactaaggctttgacattctggcacatcacatcaaatagaacacagcctccctggaaggacttaagtgagaaagaacaagagaagctgcaactcctggacccttttgtcctcagtgtgtggttcctgcgtccttccccagcatggaggagggcaggagagaggagatgagagctctggtcaaaacctgccagctagtggaacagccttctgtagagccttctgcaagaaacgagtgggtttgaagaaccaaaacatttgtggtgttttcgccatcagggtgtattggaggctgacacttaatgggtgtgtgttgcgcccagaactgctcggtgtcggggttctaaaagaatgcgctggtgttcttggcttcaagtttctgctttggagaagcagattcaggaagaatgcagctatatgtaaaccaaaggaagattttgacttcatcttattcagagctttataaggaattgttcgtcatttcagaagagcacatcctccacaggaggccactcctggtatttgagtcgtgaatcacacccgtgtcagtctgcatttctactggtcatttccatgaagattatatagacacacgtatgtaagactgtacttactgtctgagtccattcatgctgctataacaaaataccatatgctgatttagcttataaacaacagaaatttacttctcactgcccaggaggctggcaagtccaagatcaaggtgccggcagatttggtgtctggtgaggcctgtttcctggttcacagatggtgacttctacatggtagataggttgagggagctctctgaggcctctattataagggcactaatccctttcaggatgcccctcccccttaatcacctcccaaaggcttacaggctcacttaccaccctcctagtgttatcaccttgggggtaaagatttcaacacaggaattttgggggtcacaaacattcagaccatagcacttaacctttattttaaaatgtcagccaggtgcagtggctcatgcttgtaatcctagcacttagggaggccaaggtgggaggattgcttgagctcaggaatttgagaccagcctgggtaacatagtgaaaccccatctctacaaaaaataaaccacattagttgggtttggtgatgggtgcctatagcagcagctacttgggaggctgaggctggaggatcacttgagcccagaaggttgaggcttcagtgagccatgattgagctactgcaatccagtctgggtgacagagtgagaccctgtctc

SEQ ID NO: 102917 - DNA, 1767 bp, Homo sapiens
  Payload ID: 83
  Gene Symbol: NT5DC4
  Gene Name: 5'-nucleotidase domain containing 4
  Uniprot ID: Q86YG4
  ENST ID: ENST00000327581
  CDS Start-End: 52-1338
cctcacaccaacaactgcacctactttcttacagggttggatgcctataacatgcctgcatggatttttgtcaaccgcagcctggcgctggggaagattcgttgctttggcttcgacatggactacactctggctgcctacaagtccccagcttatgaggccctgaccttcgagctgctgctggagcgcctggtgtgcattgggtacccgcatgagatcctgcgctacacctacgaccccaccttccccaccaggcggctggtgttcgatgaactctatgggaacctgctgaaggtggacgcccacgggaatgtgctgctgggtgcctatggcttcaccttcctctcggaggcagagatctggagcttctaccccagcaagttcattcagagggacgacctgcagtgtttctacatactcaacatgctcttcaacctgcctgaaacctacctctatgcctgcttggtggacttcttctctggctgctcccgttacactaattgtgacaccggctatcagcatgggaacctcttcatgtccttccgaagcctcttccaggatgtgactgatgccatgaataacatccaccagtcgggctgtctcaagaagaccctggaggacttggagaaatatgtgaagaaggatccacgcctccccatcctgctggggaagatgaaggaggttgggaaagtgtttctggccaccaacagcagctacaactacaccaatgccatcatgacctacctgttcagcatcagtgaggctgaagcctcgggcaggccctggaggtcctactttgacctgatcgtggtggacacgcagaagccccacttctttgcagaggggttggtcctgaggcaggtcaacacggactcaggaaagctccacgtgggcacctacacagggccccaccagcactgtgctgtctactctggaggctcttcggacatggtgtgcgagctgcttggggttcgggggatggacatcctgtacattggggaccacatttttggggacattctcaagtccaagaagcgtcagggctggcggacttgcctggtggttcctgagctgtcctgggagctggacatctgggcccaggagaaggagcggttggaggagctgaagagactggacacgcacctggcagacatataccagcacatggatgggagcagttgtgagctgcaagtcatcaacttcaccaagagagagatccagatgccacatgagtcagttgtggagcaagaacaggccaatctagaccctgcctcctgcctcctctcctgcaaccagaggtctcttccagcaaagagctgtttgtcttctgccatctaggattccaaggaagtgggacactccagtctaggctgttttggtggaaacaacctttgttcagtattgagtagtgcatttacttgtaataatacaaataagtcagctgatgacaatggctgaaagggccaggtcatggaaaccaagaagtgagaagcatttcaggggatgattcttttcttctttttcctatatgtcctggatgatttttactggtacagctagagaagatgaatttaaattcaaaaataatagtaccttctgtggttctgtttgagtcttgcaagatattaagaacaactttccgcaactcttgtattggctggaaggaaggaagaaaacatacaaaatcttaaaaacattcatgcaaaaaatttgctaaggaactttaacttcaaatacatgttttataataaaagtttccttttaaaa

SEQ ID NO: 102918 - DNA, 1107 bp, Homo sapiens
  Payload ID: 84
  Gene Symbol: NT5C1A
  Gene Name: 5'-nucleotidase, cytosolic IA
  Uniprot ID: Q9BXI3
  ENST ID: ENST00000235628
  CDS Start-End: 1-1107
atggaacctgggcagccccgggagccccaggagccccgcgagcccgggccaggagcggagaccgctgcggccccggtctgggaggaagccaagattttctacgacaacctcgcgcccaagaagaaacccaaatcgcccaagcctcagaatgcagtcaccatcgctgtgtcctcccgagccttgtttcgcatggacgaggagcagcagatctacacggagcagggcgtggaggagtacgtgcgctaccagctggaacatgagaacgaacccttcagtcccgggccagccttcccttttgtgaaggctctggaggccgtgaacaggcggctgcgggagctgtaccctgatagtgaggacgtcttcgacatcgtcctcatgactaacaaccatgctcaagtgggtgtccgcctcatcaacagtatcaaccactatgacctgttcatcgagaggttctgcatgacaggtgggaacagcccgatctgctacctcaaggcctatcacaccaacctctacttgtcagccgatgcggaaaaagtgcgagaagccattgatgaggggatcgcagctgccaccatcttcagccccagcagggatgtggttgtgtcccagagtcagctgcgcgtggccttcgatggggacgccgtgctcttctcggacgagtcggagcgcatcgtcaaggcccacgggctggaccgattcttcgagcatgagaaggcccacgagaacaaacctctggctcagggccccttaaagggctttctggaggcactgggtaggttgcagaagaagttctactccaaaggcctgcggctggagtgcccaattcgtacctacttggtgacagcacgcagtgcagccagttccggggcccgggctctcaagaccctgcgcagctggggcctggagacagatgaagccttgttccttgctggagcgcccaagggccctctccttgagaagatccgcccacacatcttctttgatgaccagatgttccatgtggctggggctcaggagatgggcactgtggccgcccatgtgccttatggtgtggcacagacaccccggcggactgcacctgcaaagcaggccccatctgcacagtag

SEQ ID NO: 102919 - DNA, 2678 bp, Homo sapiens
  Payload ID: 85
  Gene Symbol: NT5C1B
  Gene Name: 5'-nucleotidase, cytosolic IB
  Uniprot ID: Q96P26
  ENST ID: ENST00000304081
  CDS Start-End: 102-1754
attctaaatgcaaagctagactgagcaagggaagtgacaggaaatggagctggggagacaaaaatgtggataacaacaaaagaatttcaacaggtaaaaaaatgagtcaaacatctctcaaacagaaaaagaatgagcctggaatgaggtcctcaaaagagagtctagaagcagaaaaaagaaaggaatctgacaaaacaggagttcgtctgagcaatcagggatcacaagaatcatcactgcggaagacagactctcgagggtaccttgtgcgcagtcaatggtctagaatatcccggagcccatccaccaaggctccatccatagatgagcctagaagcaggaacaccagtgctaagctccccagcagctccacgagctcccggactccatccacctccccaagcctgcatgactcctcaccgccgccgctgtccgggcagccctcgctccagccacccgcgtcgccccagctgccccggtcgctggactcgcggcctcccacgcccccagagcccgatcctggctcccggcgcagcaccaaaatgcaagagaatccggaggcctgggcccaaggcatcgtgcgggaaatccgccagacccgggactcgcagccgctggaatattcgcgcacgtcccccaccgagtggaagtcctccagccagcgcagggggatctaccccgcctccacccagctggaccgcaactctctgtccgagcagcagcagcagcagcgggaggacgaggacgactacgaggctgcctactgggcatccatgaggtcgttctacgagaagaacccgagctgctcgcgcccctggccgcccaaacccaagaacgccatcaccattgctctctcatcctgcgcgctcttcaacatggtggacggcaggaaaatctacgagcaagagggtctggaaaagtacatggagtatcagctcaccaatgagaacgtcatcctgaccccgggcccggcgttccgcttcgtcaaggcactacagtatgtcaatgctagactccgtgatctatatcctgatgaacaggacttatttgatattgtactgatgactaataaccatgcccaagtgggagtgcggcttataaacagcgtcaatcactacggcttactgattgaccgcttctgtctgaccgggggaaaagaccccattggctatttgaaggcatatcttaccaacttgtatattgctgcagattctgaaaaagtgcaagaggcaatacaagaaggtattgcctctgcgacaatgtttgatggagccaaagacatggcttactgtgacactcagctccgtgtagcctttgatggggatgctgtcctcttctctgatgagtctgaacattttaccaaggagcatgggctcgacaaattcttccagtatgatacattatgtgaaagtaagcctcttgctcagggtcccctaaaaggctttctggaagatttaggcagactgcaaaagaagttctatgccaaaaatgaacggttactttgtcctatcaggacctacctggttacagctaggagtgcagccagttcaggcgcccgtgtgctgaagacccttcgacgctggggtctagagatagacgaagctcttttccttgctggagcccccaaaagtcccatcttggtgaagatccggccccacatcttctttgatgaccacatgttccacattgaaggggcacagaggttaggttccatcgcagcttatggctttaataaaaaattcagtagttaggggcagggaggagaaataaagtggtgatagtctggtgttacagaagccacttcttttggctctctaggataattagataggtatttcagaaaattggaccttaaaactttgcttctttggaaaggttttctcctgattttttggaaaaccttttgaaccctcaagttaccatcaaactacttctctttgaactaccaatactgttgaatgccattacacctatctctgtgtaagtcataatgatgactctttaggataagtttagaacttgaatatttgcatgcttaaggcactgttttagaagcttacttagttttataaacactgctcatttttggatgtttgtagataacaatgaattgttacccatcagcattgtagaatagtgtcttcaaaggtagaaggagtatggttaagcacactcttgaaaactggagctttgtattctgtgactgctatggctagctttgtaaccaaagcaaaatgagaatttcactctacctgcatgagtataacaattttgatactgctcatttagaaataaatcatctggttgttcctccagggtactttctaagataagccttaaacagaaacccctaagaaaggttctctgaaaattatttggtgggttaaatgcctctgatccacagagtttcatatttgaagtctccggctttgggcctggcaggctggcacatccatatttgtatggaaaaaaaaaaaaaagaccctacgctaccacttcaaaaagtgacatgaagtgtagtatcctggcccttcattgtcattctctcatgatttttgttttgttttcaacaaaaattggttggtcattaaatatatcatatgttaggcacagtgacctggttattttcacatgttacttcattttcttatcaaattaaatgtttgtgacatagt

SEQ ID NO: 102920 - DNA, 2475 bp, Homo sapiens
  Payload ID: 85
  Gene Symbol: NT5C1B
  Gene Name: 5'-nucleotidase, cytosolic IB
  Uniprot ID: Q96P26
  ENST ID: ENST00000359846
  CDS Start-End: 79-1911
agcaagggaagtgacaggaaatggagctggggagacaaaaatgtggataacaacaaaagaatttcaacaggtaaaaaaatgagtcaaacatctctcaaacagaaaaagaatgagcctggaatgaggtcctcaaaagagagtctagaagcagaaaaaagaaaggaatctgacaaaacaggagttcgtctgagcaatcagatgaggcgtgcagtcaatccgaatcactcgctgagatgttgccccttccagggtcactcgtcgtgtagacgctgcctttgtgcagctgagggaacagcccttggcccctgccacacaatacgtatttatattcacatgtgcctgttgtgggagcagggccagcagatcaccatgatgaggggatcacaagaatcatcactgcggaagacagactctcgagggtaccttgtgcgcagtcaatggtctagaatatcccggagcccatccaccaaggctccatccatagatgagcctagaagcaggaacaccagtgctaagctccccagcagctccacgagctcccggactccatccacctccccaagcctgcatgactcctcaccgccgccgctgtccgggcagccctcgctccagccacccgcgtcgccccagctgccccggtcgctggactcgcggcctcccacgcccccagagcccgatcctggctcccggcgcagcaccaaaatgcaagagaatccggaggcctgggcccaaggcatcgtgcgggaaatccgccagacccgggactcgcagccgctggaatattcgcgcacgtcccccaccgagtggaagtcctccagccagcgcagggggatctaccccgcctccacccagctggaccgcaactctctgtccgagcagcagcagcagcagcgggaggacgaggacgactacgaggctgcctactgggcatccatgaggtcgttctacgagaagaacccgagctgctcgcgcccctggccgcccaaacccaagaacgccatcaccattgctctctcatcctgcgcgctcttcaacatggtggacggcaggaaaatctacgagcaagagggtctggaaaagtacatggagtatcagctcaccaatgagaacgtcatcctgaccccgggcccggcgttccgcttcgtcaaggcactacagtatgtcaatgctagactccgtgatctatatcctgatgaacaggacttatttgatattgtactgatgactaataaccatgcccaagtgggagtgcggcttataaacagcgtcaatcactacggcttactgattgaccgcttctgtctgaccgggggaaaagaccccattggctatttgaaggcatatcttaccaacttgtatattgctgcagattctgaaaaagtgcaagaggcaatacaagaaggtattgcctctgcgacaatgtttgatggagccaaagacatggcttactgtgacactcagctccgtgtagcctttgatggggatgctgtcctcttctctgatgagtctgaacattttaccaaggagcatgggctcgacaaattcttccagtatgatacattatgtgaaagtaagcctcttgctcagggtcccctaaaaggctttctggaagatttaggcagactgcaaaagaagttctatgccaaaaatgaacggttactttgtcctatcaggacctacctggttacagctaggagtgcagccagttcaggcgcccgtgtgctgaagacccttcgacgctggggtctagagatagacgaagctcttttccttgctggagcccccaaaagtcccatcttggtgaagatccggccccacatcttctttgatgaccacatgttccacattgaaggggcacagaggttaggttccatcgcagcttatggctttaataaaaaattcagtagttaggggcagggaggagaaataaagtggtgatagtctggtgttacagaagccacttcttttggctctctaggataattagataggtatttcagaaaattggaccttaaaactttgcttctttggaaaggttttctcctgattttttggaaaaccttttgaaccctcaagttaccatcaaactacttctctttgaactaccaatactgttgaatgccattacacctatctctgtgtaagtcataatgatgactctttaggataagtttagaacttgaatatttgcatgcttaaggcactgttttagaagcttacttagttttataaacactgctcatttttggatgtttgtagataacaatgaattgttacccatcagcattgtagaatagtgtcttcaaaggtagaaggagtatggttaagcacactcttgaaaactggagctttgtattctgtgactgctatggctagctttgtaaccaaagcaaaatgagaatttcactctacctgcatgagtataacaattttgatactgctcatttagaaataaatcatctggttgttcctcca

SEQ ID NO: 102921 - DNA, 2554 bp, Homo sapiens
  Payload ID: 85
  Gene Symbol: NT5C1B
  Gene Name: 5'-nucleotidase, cytosolic IB
  ENST ID: ENST00000406971
  CDS Start-End: 105-716
gacattctaaatgcaaagctagactgagcaagggaagtgacaggaaatggagctggggagacaaaaatgtggataacaacaaaagaatttcaacaggtaaaaaaatgagtcaaacatctctcaaacagaaaaagaatgagcctggaatgaggtcctcaaaagagagtctagaagcagaaaaaagaaaggaatctgacaaaacaggagttcgtctgagcaatcagggatcacaagaatcatcactgcggaagacagactctcgagggtaccttgtgcgcagtcaatggtctagaatatcccggagcccatccaccaaggctccatccatagatgagcctagaagcaggaacaccagtgctaaggtagagctccccagcagccctcgctccagccacccgcgtcgccccagctgccccggtcgctggactcgcggcctcccacgcccccagagcccgatcctggctcccggcgcagcaccaaaatgcaagagaatccggaggcctgggcccaaggcatcgtgcgggaaatccgccagacccgggactcgcagccgctggaatattcgcgcacgtcccccaccgagtggaagtcctccagccagcgcagggggatctaccccgcctccacccagctggaccgcaactctctgtccgagcagcagcagcagcagcgggaggacgaggacgactacgaggctgcctactgggcatccatgaggtcgttctacgagaagaacccgagctgctcgcgcccctggccgcccaaacccaagaacgccatcaccattgctctctcatcctgcgcgctcttcaacatggtggacggcaggaaaatctacgagcaagagggtctggaaaagtacatggagtatcagctcaccaatgagaacgtcatcctgaccccgggcccggcgttccgcttcgtcaaggcactacagtatgtcaatgctagactccgtgatctatatcctgatgaacaggacttatttgatattgtactgatgactaataaccatgcccaagtgggagtgcggcttataaacagcgtcaatcactacggcttactgattgaccgcttctgtctgaccgggggaaaagaccccattggctatttgaaggcatatcttaccaacttgtatattgctgcagattctgaaaaagtgcaagaggcaatacaagaaggtattgcctctgcgacaatgtttgatggagccaaagacatggcttactgtgacactcagctccgtgtagcctttgatggggatgctgtcctcttctctgatgagtctgaacattttaccaaggagcatgggctcgacaaattcttccagtatgatacattatgtgaaagtaagcctcttgctcagggtcccctaaaaggctttctggaagatttaggcagactgcaaaagaagttctatgccaaaaatgaacggttactttgtcctatcaggacctacctggttacagctaggagtgcagccagttcaggcgcccgtgtgctgaagacccttcgacgctggggtctagagatagacgaagctcttttccttgctggagcccccaaaagtcccatcttggtgaagatccggccccacatcttctttgatgaccacatgttccacattgaaggggcacagaggttaggttccatcgcagcttatggctttaataaaaaattcagtagttaggggcagggaggagaaataaagtggtgatagtctggtgttacagaagccacttcttttggctctctaggataattagataggtatttcagaaaattggaccttaaaactttgcttctttggaaaggttttctcctgattttttggaaaaccttttgaaccctcaagttaccatcaaactacttctctttgaactaccaatactgttgaatgccattacacctatctctgtgtaagtcataatgatgactctttaggataagtttagaacttgaatatttgcatgcttaaggcactgttttagaagcttacttagttttataaacactgctcatttttggatgtttgtagataacaatgaattgttacccatcagcattgtagaatagtgtcttcaaaggtagaaggagtatggttaagcacactcttgaaaactggagctttgtattctgtgactgctatggctagctttgtaaccaaagcaaaatgagaatttcactctacctgcatgagtataacaattttgatactgctcatttagaaataaatcatctggttgttcctccagggtactttctaagataagccttaaacagaaacccctaagaaaggttctctgaaaattatttggtgggttaaatgcctctgatccacagagtttcatatttgaagtctccggctttgggcctggcaggctggcacatccatatttgtatggaaaaaaaaaaaaaagaccctacgctaccacttcaaaaagtgacatgaagtgtagtatcctggcccttcattgtcattctctcatgatttttgttttgttttcaacaaaaattggttggtcattaaatatatcatatgttaggcacagtg

SEQ ID NO: 102922 - DNA, 914 bp, Homo sapiens
  Payload ID: 85
  Gene Symbol: NT5C1B
  Gene Name: 5'-nucleotidase, cytosolic IB
  ENST ID: ENST00000418427
  CDS Start-End: 1-796
gaggaagggactccagcccacagccctagatttggcactacagtatgtcaatgctagactccgtgatctatatcctgatgaacaggacttatttgatattgtactgatgactaataaccatgcccaagtgggagtgcggcttataaacagcgtcaatcactacggcttactgattgaccgcttctgtctgaccgggggaaaagaccccattggctatttgaaggcatatcttaccaacttgtatattgctgcagattctgaaaaagtgcaagaggcaatacaagaaggtattgcctctgcgacaatgtttgatggagccaaagacatggcttactgtgacactcagctccgtgtagcctttgatggggatgctgtcctcttctctgatgagtctgaacattttaccaaggagcatgggctcgacaaattcttccagtatgatacattatgtgaaagtaagcctcttgctcagggtcccctaaaaggctttctggaagatttaggcagactgcaaaagaagttctatgccaaaaatgaacggttactttgtcctatcaggacctacctggttacagctaggagtgcagccagttcaggcgcccgtgtgctgaagacccttcgacgctggggtctagagatagacgaagctcttttccttgctggagcccccaaaagtcccatcttggtgaagatccggccccacatcttctttgatgaccacatgttccacattgaaggggcacagaggttaggttccatcgcagcttatggctttaataaaaaattcagtagttaggggcagggaggagaaataaagtggtgatagtctggtgttacagaagccacttcttttggctctctaggataattagataggtatttcagaaaattggaccttaaaactttgcttcttt

SEQ ID NO: 102923 - DNA, 685 bp, Homo sapiens
  Payload ID: 85
  Gene Symbol: NT5C1B
  Gene Name: 5'-nucleotidase, cytosolic IB
  ENST ID: ENST00000416783
  CDS Start-End: 69-685
gtgacaggaaatggagctggggagacaaaaatgtggataacaacaaaagaatttcaacaggtaaaaaaatgagtcaaacatctctcaaacagaaaaagaatgagcctggaatgaggtcctcaaaagagagtctagaagcagaaaaaagaaaggaatctgacaaaacaggagttcgtctgagcaatcagatgaggcgtgcagtcaatccgaatcactcgctgagatgttgccccttccagggtcactcgtcgtgtagacgctgcctttgtgcagctgagggaacagcccttggcccctgccacacaatacgtatttatattcacatgtgcctgttgtgggagcagggccagcagatcaccatgatgagggtgagcagagatcacactaccgattctggaggggaaccacagacaacctggggatcacaagaatcatcactgcggaagacagactctcgagggtaccttgtgcgcagtcaatggtctagaatatcccggagcccatccaccaaggctccatccatagatgagcctagaagcaggaacaccagtgctaagctccccagcagctccacgagctcccggactccatccacctccccaagcctgcatgactcctcaccgccgccgctgtccgggcagccctcgctccagccacccgcgtcgccccagctgccccggtcgct

SEQ ID NO: 102924 - DNA, 3435 bp, Homo sapiens
  Payload ID: 86
  Gene Symbol: NT5C2
  Gene Name: 5'-nucleotidase, cytosolic II
  Uniprot ID: P49902
  ENST ID: ENST00000343289
  CDS Start-End: 96-1781
gggcggggagggcgcgcgttgaggcggctgcggcagttgcgcgctgggattgttgcggtgcgctggagccgaatacaaaatacagttaaaataaaatgtcaacctcctggagtgatcggttacagaatgcagcagatatgcctgctaacatggataagcatgccctgaaaaagtatcgtcgagaagcctatcatcgggtgtttgtgaaccgaagtttagcaatggaaaagataaagtgttttggttttgatatggattatacccttgctgtgtacaagtccccagagtatgagtcccttggttttgagcttactgtggagagattagtttctattggctatccccaggagttgctcagctttgcttatgattctacattccctaccaggggacttgtctttgacacactgtatggaaatcttttgaaagtcgatgcctatggaaacctcttggtctgtgcacatggatttaactttataaggggaccagaaactagagaacagtatccaaataaatttatccagcgagatgatactgaaagattttacattctgaacacactattcaacctaccagagacctacctgttggcctgcctagtagatttttttactaattgtcccagatataccagttgtgaaacaggatttaaagatggggacctcttcatgtcctaccggagtatgttccaggatgtaagagatgctgttgactgggttcattacaagggctcccttaaggaaaagacagttgaaaatcttgagaagtatgtagtcaaagatggaaaactgcctttgcttctgagccggatgaaggaagtagggaaagtatttcttgctaccaacagtgactataaatatacagataaaattatgacttacctgtttgacttcccacatggccccaagcctgggagctcccatcgaccatggcagtcctactttgacttgatcttggtggatgcacggaaaccactcttttttggagaaggcacagtactgcgtcaggtggatactaaaactggcaagctgaaaattggtacctacacagggcccctacagcatggtatcgtctactcaggaggttcttctgatacgatctgtgacctgttgggagccaagggaaaagacattttgtatattggagatcacatttttggggacattttaaaatcaaagaaacggcaagggtggcgaacttttttggtgattcctgaactcgcacaggagctacatgtctggactgacaagagttcacttttcgaagaacttcagagcttggatattttcttggctgaactctacaagcatcttgacagcagtagcaatgagcgtccagacatcagttccatccagagacgtattaagaaagtaactcatgacatggacatgtgctatgggatgatgggaagcctgtttcgcagtggctcccggcagaccctttttgccagtcaagtgatgcgttatgctgacctctatgcagcatctttcatcaacctgctgtattaccctttcagctacctcttcagggctgcccatgtcttgatgcctcatgaatcaacggtggagcacacacacgtagatatcaatgagatggagtctcctcttgccacccggaaccgcacatcagtggatttcaaagacactgactacaagcggcaccagctgacacggtcaattagtgagattaaacctcccaacctcttcccactggccccccaggaaattacacactgccatgacgaagatgatgatgaagaggaggaggaggaggaagaataaggaggaaaaccaaaaccccaagcacccattaaacaagtcctggcaggactcacaggaacaaacgaggtccctgttagggttctactcgggggagggagggggctccatgaaaggtacgtctgaaaagtttctgaagattttattatcatagatacttgttttggttttgtgtatctgtactctctgcagatggtccaaaattgtaatggagtctgtattagaagaaaataagggtaaaatcaggctgaactgcatgtatatggctccactgtggcttgtgacacttttaaaatcatccgtatgtcagtgtatctggatacacgaggaaaaggaaagagtctcagagtggaacaaagagtgggaagaggtgatctgtaatgttacaaattgtgctattactccaaggtccaacttttccagtgcattacatggtattgtatatcagtggagaaatgtattatttccatgatcaaatgtagtctctgttaaggtcaagttttcttttataagcctttaattcatcctcagtgactctggcaaggctgcttctctatcactggctttgcacagaagtatgctctacttgcgttgctttagggcaggattctattttgagggaaaagacagtatccttattaccttttgtttgtttaatagcacaaatgcttatttgttatccaaaaacaacctccttcttatctgtgataaatctatagaaagaatttagctgcaagtggacaaaggaacaagcccccagaaaagaaagggaagaactgccttcttatactacagaacatgcattagtgtgggctatatagctgtggctcatgctacccaattccagatttctttgtcctctaagagttgattgctgtatattaaaattgaacatcagaggatgggaagagggctctgtaagccagaaccttactaaagtagagggcacaatcagtgtgaataaattcacttcagaatctcaagtcaaggccaggcacggcggctcacgcctgtaatcccagcactttgggaggccgagacaggcggatcacctgaggtcgggagttcgagaccagccttaccaacatggagaaaccccatctctactaaaaatacaaaattacctgggcgtggtggtgcatgcctgtaatcccatcatctactcaggaggctgaggcaggagaattgcttgaacccaggaggcggaggttgcagtgagccaggattgtgccattgcactccagcctgggcaacaagaacaaaactccatctcaaaaaataaaaatcccaatcccaagtcgaaatcacctcttgttttaaacaagaatgaatcattactgtgtatgttagggtattaaaactgtttcaccagtacagtgaaagttgtttcaacattttaaacaaacagtggttatagactctttctttaaccattgtatattttcttccattcttgtcattggtcaataggggagggtagattagctgctccagaattcaataaagtgtaatatttctaacggtgactttgacctattctgtagtacaactgtaatagctattggtcttcaagtgggtttagatttggtgacatcagtttgatattctcttaaaggaaataaatattcaagaactgattatgttctaacatgattat

SEQ ID NO: 102925 - DNA, 3365 bp, Homo sapiens
  Payload ID: 86
  Gene Symbol: NT5C2
  Gene Name: 5'-nucleotidase, cytosolic II
  Uniprot ID: P49902
  ENST ID: ENST00000404739
  CDS Start-End: 25-1710
aatacaaaatacagttaaaataaaatgtcaacctcctggagtgatcggttacagaatgcagcagatatgcctgctaacatggataagcatgccctgaaaaagtatcgtcgagaagcctatcatcgggtgtttgtgaaccgaagtttagcaatggaaaagataaagtgttttggttttgatatggattatacccttgctgtgtacaagtccccagagtatgagtcccttggttttgagcttactgtggagagattagtttctattggctatccccaggagttgctcagctttgcttatgattctacattccctaccaggggacttgtctttgacacactgtatggaaatcttttgaaagtcgatgcctatggaaacctcttggtctgtgcacatggatttaactttataaggggaccagaaactagagaacagtatccaaataaatttatccagcgagatgatactgaaagattttacattctgaacacactattcaacctaccagagacctacctgttggcctgcctagtagatttttttactaattgtcccagatataccagttgtgaaacaggatttaaagatggggacctcttcatgtcctaccggagtatgttccaggatgtaagagatgctgttgactgggttcattacaagggctcccttaaggaaaagacagttgaaaatcttgagaagtatgtagtcaaagatggaaaactgcctttgcttctgagccggatgaaggaagtagggaaagtatttcttgctaccaacagtgactataaatatacagataaaattatgacttacctgtttgacttcccacatggccccaagcctgggagctcccatcgaccatggcagtcctactttgacttgatcttggtggatgcacggaaaccactcttttttggagaaggcacagtactgcgtcaggtggatactaaaactggcaagctgaaaattggtacctacacagggcccctacagcatggtatcgtctactcaggaggttcttctgatacgatctgtgacctgttgggagccaagggaaaagacattttgtatattggagatcacatttttggggacattttaaaatcaaagaaacggcaagggtggcgaacttttttggtgattcctgaactcgcacaggagctacatgtctggactgacaagagttcacttttcgaagaacttcagagcttggatattttcttggctgaactctacaagcatcttgacagcagtagcaatgagcgtccagacatcagttccatccagagacgtattaagaaagtaactcatgacatggacatgtgctatgggatgatgggaagcctgtttcgcagtggctcccggcagaccctttttgccagtcaagtgatgcgttatgctgacctctatgcagcatctttcatcaacctgctgtattaccctttcagctacctcttcagggctgcccatgtcttgatgcctcatgaatcaacggtggagcacacacacgtagatatcaatgagatggagtctcctcttgccacccggaaccgcacatcagtggatttcaaagacactgactacaagcggcaccagctgacacggtcaattagtgagattaaacctcccaacctcttcccactggccccccaggaaattacacactgccatgacgaagatgatgatgaagaggaggaggaggaggaagaataaggaggaaaaccaaaaccccaagcacccattaaacaagtcctggcaggactcacaggaacaaacgaggtccctgttagggttctactcgggggagggagggggctccatgaaaggtacgtctgaaaagtttctgaagattttattatcatagatacttgttttggttttgtgtatctgtactctctgcagatggtccaaaattgtaatggagtctgtattagaagaaaataagggtaaaatcaggctgaactgcatgtatatggctccactgtggcttgtgacacttttaaaatcatccgtatgtcagtgtatctggatacacgaggaaaaggaaagagtctcagagtggaacaaagagtgggaagaggtgatctgtaatgttacaaattgtgctattactccaaggtccaacttttccagtgcattacatggtattgtatatcagtggagaaatgtattatttccatgatcaaatgtagtctctgttaaggtcaagttttcttttataagcctttaattcatcctcagtgactctggcaaggctgcttctctatcactggctttgcacagaagtatgctctacttgcgttgctttagggcaggattctattttgagggaaaagacagtatccttattaccttttgtttgtttaatagcacaaatgcttatttgttatccaaaaacaacctccttcttatctgtgataaatctatagaaagaatttagctgcaagtggacaaaggaacaagcccccagaaaagaaagggaagaactgccttcttatactacagaacatgcattagtgtgggctatatagctgtggctcatgctacccaattccagatttctttgtcctctaagagttgattgctgtatattaaaattgaacatcagaggatgggaagagggctctgtaagccagaaccttactaaagtagagggcacaatcagtgtgaataaattcacttcagaatctcaagtcaaggccaggcacggcggctcacgcctgtaatcccagcactttgggaggccgagacaggcggatcacctgaggtcgggagttcgagaccagccttaccaacatggagaaaccccatctctactaaaaatacaaaattacctgggcgtggtggtgcatgcctgtaatcccatcatctactcaggaggctgaggcaggagaattgcttgaacccaggaggcggaggttgcagtgagccaggattgtgccattgcactccagcctgggcaacaagaacaaaactccatctcaaaaaataaaaatcccaatcccaagtcgaaatcacctcttgttttaaacaagaatgaatcattactgtgtatgttagggtattaaaactgtttcaccagtacagtgaaagttgtttcaacattttaaacaaacagtggttatagactctttctttaaccattgtatattttcttccattcttgtcattggtcaataggggagggtagattagctgctccagaattcaataaagtgtaatatttctaacggtgactttgacctattctgtagtacaactgtaatagctattggtcttcaagtgggtttagatttggtgacatcagtttgatattctcttaaaggaaataaatattcaagaactgattatgttctaacatgattata

SEQ ID NO: 102926 - DNA, 856 bp, Homo sapiens
  Payload ID: 86
  Gene Symbol: NT5C2
  Gene Name: 5'-nucleotidase, cytosolic II
  ENST ID: ENST00000452156
  CDS Start-End: 62-856
agttgcgcgctgggattgttgcggtgcgctggagccgaatacaaaatacagttaaaataaaatgtcaacctcctggagtgatcggttacagaatgcagcagatatgcctgctaacatggataagcatgccctgaaaaagtatcgtcgagaagcctatcatcgggtgtttgtgaaccgaagtttagcaatggaaaagataaagtgttttggttttgatatggattatacccttgctgtgtacaagtccccagagtatgagtcccttggttttgagcttactgtggagagattagtttctattggctatccccaggagttgctcagctttgcttatgattctacattccctaccaggggacttgtctttgacacactgtatggaaatcttttgaaagtcgatgcctatggaaacctcttggtctgtgcacatggatttaactttataaggggttctcaggtagctgttcagaagagaccagaaactagagaacagtatccaaataaatttatccagcgagatgatactgaaagattttacattctgaacacactattcaacctaccagagacctacctgttggcctgcctagtagatttttttactaattgtcccagatataccagttgtgaaacaggatttaaagatggggacctcttcatgtcctaccggagtatgttccaggatgtaagagatgctgttgactgggttcattacaagggctcccttaaggaaaagacagttgaaaatcttgagaagtatgtagtcaaagatggaaaactgcctttgcttctgagccggatgaaggaagtagggaaagtatttcttgctaccaacagtgactataaatatacagat

SEQ ID NO: 102927 - DNA, 440 bp, Homo sapiens
  Payload ID: 86
  Gene Symbol: NT5C2
  Gene Name: 5'-nucleotidase, cytosolic II
  ENST ID: ENST00000421281
  CDS Start-End: 1-440
gtactgcgtcaggtggatactaaaactggcaagctgaaaattggtacctacacagggcccctacagcatggtatcgtctactcaggaggttcttctgatacgatctgtgacctgttgggagccaagggaaaagacattttgtatattggagatcacatttttggggacattttaaaatcaaagaaacggcaagggtggcgaacttttttggtgattcctgaactcgcacaggagctacatgtctggactgacaagagttcacttttcgaagaacttcagagcttggatattttcttggctgaactctacaagcatcttgacagcagtagcaatgagcgtccagacatcagttccatccagagacgtattaagatgcctcatgaatcaacggtggagcacacacacgtagatatcaatgagatggagtctcctcttgccac

SEQ ID NO: 102928 - DNA, 597 bp, Homo sapiens
  Payload ID: 86
  Gene Symbol: NT5C2
  Gene Name: 5'-nucleotidase, cytosolic II
  ENST ID: ENST00000458345
  CDS Start-End: 1-525
gtttctattggctatccccaggagttgctcagctttgcttatgattctacattccctaccaggggacttgtctttgacacactgtatggaaatcttttgaaagtcgatgcctatggaaacctcttggtctgtgcacatggatttaactttataaggggttctcaggtagctgttcagaagagaccagaaactagagaacagtatccaaataaatttatccagcgagatgatactgaaagattttacattctgaacacactattcaacctaccagagacctacctgttggcctgcctagtagatttttttactaattgtcccagatataccagttgtgaaacaggatttaaagatggggacctcttcatgtcctaccggagtatgttccaggatgtaagagatgctgttgactgggttcattacaagggctcccttaaggaaaagacagttgaaaatcttgagaagtatgtagtcaaagatagtaaaagtagcagaatacagtattttctcaaagtactgtggtaaagatttcttgttttcagtttttgtgcttcctattttcacccacctcccttatttcaagaaagaacactgaat

SEQ ID NO: 102929 - DNA, 642 bp, Homo sapiens
  Payload ID: 86
  Gene Symbol: NT5C2
  Gene Name: 5'-nucleotidase, cytosolic II
  ENST ID: ENST00000552185
  CDS Start-End: 1-472
gtcccttggttttgagcttactgtggagagattagtttctattggctatccccaggagttgctcagctttgcttatgattctacattccctaccaggggacttgtctttgacacactgtatggaaatcttttgaaagtcgatgcctatggaaacctcttggtctgtgcacatggatttaactttataaggggaccagaaactagagaacagtatccaaataaatttatccagcgagatgatactgaaagattttacattctgaacacactattcaacctaccagagacctacctgttggcctgcctagtagatttttttactaattgtcccagatataccagtgaatttagtgctagtgagagatgccacattgccaacctgagagatgggacagcaccagcagctccatgcaggctctcacctcccacacggcccctctccttgccagtgtgctgcagccaccacttctgattggcttctcctgggaatgaagacggccagcagaggtgctaattgtgacaactgagtgggagttgtgaaacaggatttaaagatggggacctcttcatgtcctaccggagtatgttccaggatgtaagagatgctgttgactgggttcattacaagggctcccttaagga

SEQ ID NO: 102930 - DNA, 902 bp, Homo sapiens
  Payload ID: 86
  Gene Symbol: NT5C2
  Gene Name: 5'-nucleotidase, cytosolic II
  ENST ID: ENST00000461461
  CDS Start-End: 88-276
agggcgcgcgttgaggcggctgcggcagttgcgcgctgggattgttgcggtgcgctggagccgaatacaaaatacagttaaaataaaatgtcaacctcctggagtgatcggttacagaatgcagcagatatgcctgctaacatggataagcatgccctgaaaaagtatcgtcgagaagcctatcatcgggtgtttgtgaaccgaagtttagcaatggaaaagataaagtgttttggttttgatatggattatacccttgctggagagccagtgtaactccttcaagactggagtgacacacactgcatctgcatctgcctcattgtacaagtccccagagtatgagtcccttggttttgagcttactgtggagagattagtttctattggctatccccaggagttgctcagctttgcttatgattctacattccctaccaggggacttgtctttgacacactgtatggaaatcttttgaaagtcgatgcctatggaaacctcttggtctgtgcacatggatttaactttataaggggaccagaaactagagaacagtatccaaataaatttatccagcgagatgatactgaaagattttacattctgaacacactattcaacctaccagagacctacctgttggcctgcctagtagatttttttactaattgtcccagatataccagttgtgaaacaggatttaaagatggggacctcttcatgtcctaccggagtatgttccaggatgtaagagatgctgttgactgggttcattacaagggctcccttaaggaaaagacagttgaaaatcttgagaagtatgtagtcaaagatggaaaactgcctttgcttctgagccggatgaaggaagtagggaaagtatttcttgctaccaacagtg

SEQ ID NO: 102931 - DNA, 249 bp, Homo sapiens
  Payload ID: 86
  Gene Symbol: NT5C2
  Gene Name: 5'-nucleotidase, cytosolic II
  ENST ID: ENST00000470299
  CDS Start-End: 88-222
agggcgcgcgttgaggcggctgcggcagttgcgcgctgggattgttgcggtgcgctggagccgaatacaaaatacagttaaaataaaatgtcaacctcctggagtgatcggttacagaatgcagcagatatgcctgctaacatggataagcatgccctgaaaaagtatcgtcgagaagcctatcatcggagagccagtgtaactccttcaagactggagtgacacacactgcatctgcatctgcctcat

SEQ ID NO: 102932 - DNA, 1670 bp, Homo sapiens
  Payload ID: 87
  Gene Symbol: NT5C3A
  Gene Name: 5'-nucleotidase, cytosolic IIIA
  Uniprot ID: Q9H0P0
  ENST ID: ENST00000242210
  CDS Start-End: 78-1088
cgtgatgctctgggatcccgcgcttccgagactcgcagtctacgcgagctgcctgtttttttcctgcttggacgcgcatgagggccccgtccatggaccgcgcggccgtggcgagggtgggcgcggtagcgagcgccagcgtgtgcgccctggtggcgggggtggtgctggctcagtacatattcaccttgaagaggaagacggggcggaagaccaagatcatcgagatgatgccagaattccagaaaagttcagttcgaatcaagaaccctacaagagtagaagaaattatctgtggtcttatcaaaggaggagctgccaaacttcagataataacggactttgatatgacactcagtagattttcatataaagggaaaagatgcccaacatgtcataatatcattgacaactgtaagctggttacagatgaatgtagaaaaaagttattgcaactaaaggaaaaatattacgctattgaagttgatcctgttcttactgtagaagagaagtacccttatatggtggaatggtatactaaatcacatggtttgcttgttcagcaagctttaccaaaagctaaacttaaagaaattgtggcagaatctgacgttatgctcaaagaaggatatgagaatttctttgataagctccaacaacatagcatccccgtgttcatattttcggctggaatcggcgatgtactagaggaagttattcgtcaagctggtgtttatcatcccaatgtcaaagttgtgtccaattttatggattttgatgaaactggggtgctcaaaggatttaaaggagaactaattcatgtatttaacaaacatgatggtgccttgaggaatacagaatatttcaatcaactaaaagacaatagtaacataattcttctgggagactcccaaggagacttaagaatggcagatggagtggccaatgttgagcacattctgaaaattggatatctaaatgatagagtggatgagcttttagaaaagtacatggactcttatgatattgttttagtacaagatgaatcattagaagtagccaactctattttacagaagattctataaacaagcattctccaagaagacctctctcctgtgggtgcaattgaactgttcatccgttcatcttgctgagagacttatttataatatatccttactctcgaagtgttccctttgtataactgaagtattttcagatatggtgaatgcattgactggaagctccttttctccacctctctcaacacactcctcaccgtatcttttaacccatttaaaaaaaaaaaaaagctaaaattagaaaaataactccctacttttccaaagtgaattttgtagtttaatgttatcatgcagcttttgaggagtcttttacactgggaaagtttgtagaaattttaaaataagttttatgaaatggtgaaataatatgcatgattttaagtattgccatttttgtaatttgggttattatgctgatggtatcaccatctcttgaaattgtgttaggtttggttattttgtctggggaaaaaatatttactggaaaagactagcagttagtgttggaaaaacctggtggtgtttacaatgttgctaatcattacaaaacattctatattgaagcactgataataaatatga

SEQ ID NO: 102933 - DNA, 1909 bp, Homo sapiens
  Payload ID: 87
  Gene Symbol: NT5C3A
  Gene Name: 5'-nucleotidase, cytosolic IIIA
  Uniprot ID: Q9H0P0
  ENST ID: ENST00000381626
  CDS Start-End: 436-1293
ttttctttccagagccagttgccagttctaatagtacagatttaccttctctttaatcgtcacataacttcaattgataatgttatgtagattgacttgtgactagctcagagctagcgaggctgtaaccaagagcatatataaagtactgtgcagcagtgcgtcacaaggtttttgcatagggcttagtcaaggcttttggaaccgccctcagttgcaccttgtgctatattagtacttctcagacaggaagaattttcttttgctggtgtagctcgtccggttaccttcaggaagattggataaccaagaaatgactaatcaagagtctgccgtacatgtgaaaatgtgtagcagaaaccagccttcttcgaagtggtcttggtgtgattctcctatccgttatcaaaaacttgaagctgtgatttgcctgagatgccagaattccagaaaagttcagttcgaatcaagaaccctacaagagtagaagaaattatctgtggtcttatcaaaggaggagctgccaaacttcagataataacggactttgatatgacactcagtagattttcatataaagggaaaagatgcccaacatgtcataatatcattgacaactgtaagctggttacagatgaatgtagaaaaaagttattgcaactaaaggaaaaatattacgctattgaagttgatcctgttcttactgtagaagagaagtacccttatatggtggaatggtatactaaatcacatggtttgcttgttcagcaagctttaccaaaagctaaacttaaagaaattgtggcagaatctgacgttatgctcaaagaaggatatgagaatttctttgataagctccaacaacatagcatccccgtgttcatattttcggctggaatcggcgatgtactagaggaagttattcgtcaagctggtgtttatcatcccaatgtcaaagttgtgtccaattttatggattttgatgaaactggggtgctcaaaggatttaaaggagaactaattcatgtatttaacaaacatgatggtgccttgaggaatacagaatatttcaatcaactaaaagacaatagtaacataattcttctgggagactcccaaggagacttaagaatggcagatggagtggccaatgttgagcacattctgaaaattggatatctaaatgatagagtggatgagcttttagaaaagtacatggactcttatgatattgttttagtacaagatgaatcattagaagtagccaactctattttacagaagattctataaacaagcattctccaagaagacctctctcctgtgggtgcaattgaactgttcatccgttcatcttgctgagagacttatttataatatatccttactctcgaagtgttccctttgtataactgaagtattttcagatatggtgaatgcattgactggaagctccttttctccacctctctcaacacactcctcaccgtatcttttaacccatttaaaaaaaaaaaaaagctaaaattagaaaaataactccctacttttccaaagtgaattttgtagtttaatgttatcatgcagcttttgaggagtcttttacactgggaaagtttgtagaaattttaaaataagttttatgaaatggtgaaataatatgcatgattttaagtattgccatttttgtaatttgggttattatgctgatggtatcaccatctcttgaaattgtgttaggtttggttattttgtctggggaaaaaatatttactggaaaagactagcagttagtgttggaaaaacctggtggtgtttacaatgttgctaatcattacaaaacattctatattgaagcactgataataaatatgaaatgcaaaacctttttaattctatggtcaaaact

SEQ ID NO: 102934 - DNA, 1788 bp, Homo sapiens
  Payload ID: 87
  Gene Symbol: NT5C3A
  Gene Name: 5'-nucleotidase, cytosolic IIIA
  Uniprot ID: Q9H0P0
  ENST ID: ENST00000396152
  CDS Start-End: 304-1197
agagccagttgccagttctaatagtacagatttaccttctctttaatcgtcacataacttcaattgataatgttatgtagattgacttgtgactagctcagagctagcgaggctgtaaccaagagcatatataaagtactgtgcagcagtgcgtcacaaggtttttgcatagggcttagtcaaggcttttggaaccgccctcagttgcaccttgtgctatattagtacttctcagacaggaagaattttcttttgctggtgtagctcgtccggttaccttcaggaagattggataaccaagaaatgactaatcaagagtctgccgtacatgtgaaaatgatgccagaattccagaaaagttcagttcgaatcaagaaccctacaagagtagaagaaattatctgtggtcttatcaaaggaggagctgccaaacttcagataataacggactttgatatgacactcagtagattttcatataaagggaaaagatgcccaacatgtcataatatcattgacaactgtaagctggttacagatgaatgtagaaaaaagttattgcaactaaaggaaaaatattacgctattgaagttgatcctgttcttactgtagaagagaagtacccttatatggtggaatggtatactaaatcacatggtttgcttgttcagcaagctttaccaaaagctaaacttaaagaaattgtggcagaatctgacgttatgctcaaagaaggatatgagaatttctttgataagctccaacaacatagcatccccgtgttcatattttcggctggaatcggcgatgtactagaggaagttattcgtcaagctggtgtttatcatcccaatgtcaaagttgtgtccaattttatggattttgatgaaactggggtgctcaaaggatttaaaggagaactaattcatgtatttaacaaacatgatggtgccttgaggaatacagaatatttcaatcaactaaaagacaatagtaacataattcttctgggagactcccaaggagacttaagaatggcagatggagtggccaatgttgagcacattctgaaaattggatatctaaatgatagagtggatgagcttttagaaaagtacatggactcttatgatattgttttagtacaagatgaatcattagaagtagccaactctattttacagaagattctataaacaagcattctccaagaagacctctctcctgtgggtgcaattgaactgttcatccgttcatcttgctgagagacttatttataatatatccttactctcgaagtgttccctttgtataactgaagtattttcagatatggtgaatgcattgactggaagctccttttctccacctctctcaacacactcctcaccgtatcttttaacccatttaaaaaaaaaaaaaagctaaaattagaaaaataactccctacttttccaaagtgaattttgtagtttaatgttatcatgcagcttttgaggagtcttttacactgggaaagtttgtagaaattttaaaataagttttatgaaatggtgaaataatatgcatgattttaagtattgccatttttgtaatttgggttattatgctgatggtatcaccatctcttgaaattgtgttaggtttggttattttgtctggggaaaaaatatttactggaaaagactagcagttagtgttggaaaaacctggtggtgtttacaatgttgctaatcattacaaaacattctatattgaagcactgataataaatatgaaatgcaaaa

SEQ ID NO: 102935 - DNA, 1759 bp, Homo sapiens
  Payload ID: 87
  Gene Symbol: NT5C3A
  Gene Name: 5'-nucleotidase, cytosolic IIIA
  Uniprot ID: Q9H0P0
  ENST ID: ENST00000405342
  CDS Start-End: 250-1143
cgtgatgctctgggatcccgcgcttccgagactcgcagtctacgcgagctgcctgtttttttcctgcttggacgcgcatgagggccccgtccatggaccgcgcggccgtggcgagggtgggcgcggtagcgagcgccagcgtgtgcgccctggtggcgggggtggtgctggctcagtacatattcaccttgaagaggaagacggggcggaagaccaagatcatcgagatgaagattggataaccaagaaatgactaatcaagagtctgccgtacatgtgaaaatgatgccagaattccagaaaagttcagttcgaatcaagaaccctacaagagtagaagaaattatctgtggtcttatcaaaggaggagctgccaaacttcagataataacggactttgatatgacactcagtagattttcatataaagggaaaagatgcccaacatgtcataatatcattgacaactgtaagctggttacagatgaatgtagaaaaaagttattgcaactaaaggaaaaatattacgctattgaagttgatcctgttcttactgtagaagagaagtacccttatatggtggaatggtatactaaatcacatggtttgcttgttcagcaagctttaccaaaagctaaacttaaagaaattgtggcagaatctgacgttatgctcaaagaaggatatgagaatttctttgataagctccaacaacatagcatccccgtgttcatattttcggctggaatcggcgatgtactagaggaagttattcgtcaagctggtgtttatcatcccaatgtcaaagttgtgtccaattttatggattttgatgaaactggggtgctcaaaggatttaaaggagaactaattcatgtatttaacaaacatgatggtgccttgaggaatacagaatatttcaatcaactaaaagacaatagtaacataattcttctgggagactcccaaggagacttaagaatggcagatggagtggccaatgttgagcacattctgaaaattggatatctaaatgatagagtggatgagcttttagaaaagtacatggactcttatgatattgttttagtacaagatgaatcattagaagtagccaactctattttacagaagattctataaacaagcattctccaagaagacctctctcctgtgggtgcaattgaactgttcatccgttcatcttgctgagagacttatttataatatatccttactctcgaagtgttccctttgtataactgaagtattttcagatatggtgaatgcattgactggaagctccttttctccacctctctcaacacactcctcaccgtatcttttaacccatttaaaaaaaaaaaaaagctaaaattagaaaaataactccctacttttccaaagtgaattttgtagtttaatgttatcatgcagcttttgaggagtcttttacactgggaaagtttgtagaaattttaaaataagttttatgaaatggtgaaataatatgcatgattttaagtattgccatttttgtaatttgggttattatgctgatggtatcaccatctcttgaaattgtgttaggtttggttattttgtctggggaaaaaatatttactggaaaagactagcagttagtgttggaaaaacctggtggtgtttacaatgttgctaatcattacaaaacattctatattgaagcactgataataaatatgaaatgcaaaacctttttaattctatggtcaaaact

SEQ ID NO: 102936 - DNA, 1032 bp, Homo sapiens
  Payload ID: 87
  Gene Symbol: NT5C3A
  Gene Name: 5'-nucleotidase, cytosolic IIIA
  Uniprot ID: Q9H0P0
  ENST ID: ENST00000409467
  CDS Start-End: 175-1032
tttcttttgctggtgtagctcgtccggttaccttcaggaagattggataaccaagaaatgactaatcaagagtctgccgtacatgtgaaaatgcagaaaccagccttcttcgaagtggtcttggtgtgattctcctatccgttatcaaaaacttgaagctgtgatttgcctgagatgccagaattccagaaaagttcagttcgaatcaagaaccctacaagagtagaagaaattatctgtggtcttatcaaaggaggagctgccaaacttcagataataacggactttgatatgacactcagtagattttcatataaagggaaaagatgcccaacatgtcataatatcattgacaactgtaagctggttacagatgaatgtagaaaaaagttattgcaactaaaggaaaaatattacgctattgaagttgatcctgttcttactgtagaagagaagtacccttatatggtggaatggtatactaaatcacatggtttgcttgttcagcaagctttaccaaaagctaaacttaaagaaattgtggcagaatctgacgttatgctcaaagaaggatatgagaatttctttgataagctccaacaacatagcatccccgtgttcatattttcggctggaatcggcgatgtactagaggaagttattcgtcaagctggtgtttatcatcccaatgtcaaagttgtgtccaattttatggattttgatgaaactggggtgctcaaaggatttaaaggagaactaattcatgtatttaacaaacatgatggtgccttgaggaatacagaatatttcaatcaactaaaagacaatagtaacataattcttctgggagactcccaaggagacttaagaatggcagatggagtggccaatgttgagcacattctgaaaattggatatctaaatgatagagtggatgagcttttagaaaagtacatggactcttatgatattgttttagtacaagatgaatcattagaagtagccaactctattttacagaagattctataa

SEQ ID NO: 102937 - DNA, 840 bp, Homo sapiens
  Payload ID: 87
  Gene Symbol: NT5C3A
  Gene Name: 5'-nucleotidase, cytosolic IIIA
  ENST ID: ENST00000409787
  CDS Start-End: 15-632
tggataaccaagaaatgactaatcaagagtctgccgtacatgtgaaaatgatgccagaattccagaaaagttcagttcgaatcaagaaccctacaagagtagaagaaattatctgtggtcttatcaaaggaggagctgccaaacttcagataataacggactttgatatgacactcagtagattttcatataaagggaaaagatgcccaacatgtcataatatcattgacaactgtaagctggttacagatgaatgtagaaaaaagttattgcaactaaaggaaaaatattacgctattgaagttgatcctgttcttactgtagaagagaagtacccttatatggtggaatggtatactaaatcacatggtttgcttgttcagcaagctttaccaaaagctaaacttaaagaaattgtggcagaatctgacgttatgctcaaagaaggatatgagaatttctttgataagctccaacaacatagcatccccgtgttcatattttcggctggaatcggcgatgtactagaggaagttattcgtcaagctggtgtttatcatcccaatgtcaaagttgtgtccaattttatggattttgatgaaactgtaagaatatcaaatcgttcttcataattttaaaatctgaaaatattttaatcatgtaaatttatttattgttacttaatatatatcctatatccagaaattaggccaagccgataggcccactgtgggactccatccttctcagtgttaatatatccatattttaaaaacaatgtgcccttcttaaactttcattccccaagctatagactaataataaaagtagtaaaacttc

SEQ ID NO: 102938 - DNA, 1742 bp, Homo sapiens
  Payload ID: 87
  Gene Symbol: NT5C3A
  Gene Name: 5'-nucleotidase, cytosolic IIIA
  ENST ID: ENST00000456458
  CDS Start-End: 77-241
gtgatgctctgggatcccgcgcttccgagactcgcagtctacgcgagctgcctgtttttttcctgcttggacgcgcatgagggccccgtccatggaccgcgcggccgtggcgagggtgggcgcggtagcgagcgccagcgtgtgcgccctggtggcgggggtggtgctggctcagtacatattcaccttgaagaggaagacggggcggaagaccaagatcatcgagatgaagattggataaccaagaaatgactaatcaagagtctgccgtacatgtgaaaatgatgccagaattccagaaaagttcagttcgaatcaagaaccctacaagagtagaagaaattatctgtggtcttatcaaaggaggagctgccaaacttcagataataacggactttgatatgacactcagtagattttcatataaagggaaaagatgcccaacatgtcataatatcattgacaactgtaagctggttacagatgaatgtagaaaaaagttattgcaactaaaggaaaaatattacgctattgaagttgatcctgttcttactgtagaagagaagtacccttatatggtggaatggtatactaaatcacatggtttgcttgttcagcaagctttaccaaaagctaaacttaaagaaattgtggcagaatctgacgttatgctcaaagaaggatatgagaatttctttgataagctccaacaacatagcatccccgtgttcatattttcggctggaatcggcgatgtactagaggaagttattcgtcaagctggtgtttatcatcccaatgtcaaagttgtgtccaattttatggattttgatgaaactggggtgctcaaaggatttaaaggagaactaattcatgtatttaacaaacatgatggtgccttgaggaatacagaatatttcaatcaactaaaagacaatagtaacataattcttctgggagactcccaaggagacttaagaatggcagatggagtggccaatgttgagcacattctgaaaattggatatctaaatgatagagtggatgagcttttagaaaagtacatggactcttatgatattgttttagtacaagatgaatcattagaagtagccaactctattttacagaagattctataaacaagcattctccaagaagacctctctcctgtgggtgcaattgaactgttcatccgttcatcttgctgagagacttatttataatatatccttactctcgaagtgttccctttgtataactgaagtattttcagatatggtgaatgcattgactggaagctccttttctccacctctctcaacacactcctcaccgtatcttttaacccatttaaaaaaaaaaaaaagctaaaattagaaaaataactccctacttttccaaagtgaattttgtagtttaatgttatcatgcagcttttgaggagtcttttacactgggaaagtttgtagaaattttaaaataagttttatgaaatggtgaaataatatgcatgattttaagtattgccatttttgtaatttgggttattatgctgatggtatcaccatctcttgaaattgtgttaggtttggttattttgtctggggaaaaaatatttactggaaaagactagcagttagtgttggaaaaacctggtggtgtttacaatgttgctaatcattacaaaacattctatattgaagcactgataataaatatgaaatgcaaaacctttttaa

SEQ ID NO: 102939 - DNA, 306 bp, Homo sapiens
  Payload ID: 87
  Gene Symbol: NT5C3A
  Gene Name: 5'-nucleotidase, cytosolic IIIA
  ENST ID: ENST00000449201
  CDS Start-End: 180-306
tttcttttgctggtgtagctcgtccggttaccttcaggaagattggataaccaagaaatgactaatcaagagtctgccgtacatgtgaaaatgtgtagcagaaaccagccttcttcgaagtggtcttggtgtgattctcctatccgttatcaaaaacttgaagctgtgatttgcctgagatgccagaattccagaaaagttcagttcgaatcaagaaccctacaagagtagaagaaattatctgtggtcttatcaaaggaggagctgccaaacttcagataataacggactttgatatgacactca

SEQ ID NO: 102940 - DNA, 1670 bp, Homo sapiens
  Payload ID: 87
  Gene Symbol: NT5C3A
  Gene Name: 5'-nucleotidase, cytosolic IIIA
  ENST ID: ENST00000610140
  CDS Start-End: 75-1070
cgcgcttccgagactcgcagtctacgcgagctgcctgtttttttcctgcttggacgcgcatgagggccccgtccatggaccgcgcggccgtggcgagggtgggcgcggtagcgagcgccagcgtgtgcgccctggtggcgggggtggtgctggctcagtacatattcaccttgaagaggaagacggggcggaagaccaagatcatcgagatgatgccagaattccagaaaagttcagttcgaatcaagaaccctacaagagtagaagaaattatctgtggtcttatcaaaggaggagctgccaaacttcagataataacggactttgatatgacactcagtagattttcatataaagggaaaagatgcccaacatgtcataatatcattgacaactgtaagctggttacagatgaatgtagaaaaaagttattgcaactaaaggaaaaatattacgctattgaagttgatcctgttcttactgtagaagagaagtacccttatatggtggaatggtatactaaatcacatggtttgcttgttcagcaagctttaccaaaagctaaacttaaagaaattgtggcagaatctgacgttatgctcaaagaaggatatgagaatttctttgataagctccaacaacatagcatccccgtgttcatattttcggctggaatcggcgatgtactagaggaagttattcgtcaagctggtgtttatcatcccaatgtcaaagttgtgtccaattttatggattttgatgaaactggggtgctcaaaggatttaaaggagaactaattcatgtatttaacaaacatgatggtgccttgaggaatacagaatatttcaatcaactaaaagacaatagtaacataattcttctgggagactcccaaggagacttaagaatggcagatggagtggccaatgttgagcacattctgaaaattggatatctaaatgatagagtggatgagcttttagaaaagtacatggactcttatgatattgttttagtacaagatgaatcattagaagtagccaactctattttacagaagattctataaacaagcattctccaagaagacctctctcctgtgggtgcaattgaactgttcatccgttcatcttgctgagagacttatttataatatatccttactctcgaagtgttccctttgtataactgaagtattttcagatatggtgaatgcattgactggaagctccttttctccacctctctcaacacactcctcaccgtatcttttaacccatttaaaaaaaaaaaaaagctaaaattagaaaaataactccctacttttccaaagtgaattttgtagtttaatgttatcatgcagcttttgaggagtcttttacactgggaaagtttgtagaaattttaaaataagttttatgaaatggtgaaataatatgcatgattttaagtattgccatttttgtaatttgggttattatgctgatggtatcaccatctcttgaaattgtgttaggtttggttattttgtctggggaaaaaatatttactggaaaagactagcagttagtgttggaaaaacctggtggtgtttacaatgttgctaatcattacaaaacattctatattgaagcactgataataaatatgaaatgcaaaacctttttaa

SEQ ID NO: 102941 - DNA, 1704 bp, Homo sapiens
  Payload ID: 87
  Gene Symbol: NT5C3A
  Gene Name: 5'-nucleotidase, cytosolic IIIA
  Uniprot ID: Q9H0P0
  ENST ID: ENST00000620705
  CDS Start-End: 78-1088
cgtgatgctctgggatcccgcgcttccgagactcgcagtctacgcgagctgcctgtttttttcctgcttggacgcgcatgagggccccgtccatggaccgcgcggccgtggcgagggtgggcgcggtagcgagcgccagcgtgtgcgccctggtggcgggggtggtgctggctcagtacatattcaccttgaagaggaagacggggcggaagaccaagatcatcgagatgatgccagaattccagaaaagttcagttcgaatcaagaaccctacaagagtagaagaaattatctgtggtcttatcaaaggaggagctgccaaacttcagataataacggactttgatatgacactcagtagattttcatataaagggaaaagatgcccaacatgtcataatatcattgacaactgtaagctggttacagatgaatgtagaaaaaagttattgcaactaaaggaaaaatattacgctattgaagttgatcctgttcttactgtagaagagaagtacccttatatggtggaatggtatactaaatcacatggtttgcttgttcagcaagctttaccaaaagctaaacttaaagaaattgtggcagaatctgacgttatgctcaaagaaggatatgagaatttctttgataagctccaacaacatagcatccccgtgttcatattttcggctggaatcggcgatgtactagaggaagttattcgtcaagctggtgtttatcatcccaatgtcaaagttgtgtccaattttatggattttgatgaaactggggtgctcaaaggatttaaaggagaactaattcatgtatttaacaaacatgatggtgccttgaggaatacagaatatttcaatcaactaaaagacaatagtaacataattcttctgggagactcccaaggagacttaagaatggcagatggagtggccaatgttgagcacattctgaaaattggatatctaaatgatagagtggatgagcttttagaaaagtacatggactcttatgatattgttttagtacaagatgaatcattagaagtagccaactctattttacagaagattctataaacaagcattctccaagaagacctctctcctgtgggtgcaattgaactgttcatccgttcatcttgctgagagacttatttataatatatccttactctcgaagtgttccctttgtataactgaagtattttcagatatggtgaatgcattgactggaagctccttttctccacctctctcaacacactcctcaccgtatcttttaacccatttaaaaaaaaaaaaaagctaaaattagaaaaataactccctacttttccaaagtgaattttgtagtttaatgttatcatgcagcttttgaggagtcttttacactgggaaagtttgtagaaattttaaaataagttttatgaaatggtgaaataatatgcatgattttaagtattgccatttttgtaatttgggttattatgctgatggtatcaccatctcttgaaattgtgttaggtttggttattttgtctggggaaaaaatatttactggaaaagactagcagttagtgttggaaaaacctggtggtgtttacaatgttgctaatcattacaaaacattctatattgaagcactgataataaatatgaaatgcaaaacctttttaattctatggtcaaaact

SEQ ID NO: 102942 - DNA, 975 bp, Homo sapiens
  Payload ID: 88
  Gene Symbol: NT5C3B
  Gene Name: 5'-nucleotidase, cytosolic IIIB
  Uniprot ID: Q969T7
  ENST ID: ENST00000435506
  CDS Start-End: 71-973
ggcgacgcctgcgcagtgcggtcgcggggctgtcgttgtcccgcgagccgccgaccaggcctcgaacgggatggcagaggaggtgagcaccctgatgaaggccacggtcctgatgcggcagcctgggcgggtgcaggagatcgtgggcgccctccgcaagggcggcggagaccggttacaggtgatttctgattttgacatgaccttgagcaggtttgcatataatggaaagcgatgcccttcttcttacaatattctggataatagcaagatcatcagtgaggagtgtcggaaagagctcacagcgctccttcaccactattacccaattgagatcgacccacaccggaccgtcaaggagaagctacctcatatggtggaatggtggaccaaagcacacaatctcctatgtcagcagaagattcagaagtttcagatagcccaggtggttagagagtccaatgcaatgctcagggagggatataagaccttcttcaacacactctaccataacaacattccccttttcatcttttctgcgggcattggtgatatcctggaagaaattatccgacagatgaaagtgttccaccccaacatccacatcgtgtctaactacatggattttaatgaagatggttttctccagggatttaagggccagctcatacacacatacaacaagaacagctctgcgtgtgagaactctggttacttccagcaacttgagggcaaaaccaatgtcatcctgctgggagactctatcggggacctcaccatggccgatggggttcctggtgtgcagaacattctcaaaattggcttcctgaatgacaaggtggaggagcggcgggagcgctacatggactcctatgacatcgtgctggagaaggacgagactctggatgtggtcaacgggctactgcagcacatcctgtgccagggggtccagctggagatgcaaggcccctgaag

SEQ ID NO: 102943 - DNA, 922 bp, Homo sapiens
  Payload ID: 88
  Gene Symbol: NT5C3B
  Gene Name: 5'-nucleotidase, cytosolic IIIB
  ENST ID: ENST00000445655
  CDS Start-End: 52-276
ggtcgcggggctgtcgttgtcccgcgagccgccgaccaggcctcgaacgggatggcagaggaggtgaggagggaggaagcgtccggagtggggcgggcccggactccgacccccggggcgcttcgagccccccagctggtcaccgaggcaccgccgcttcacccaggtgagcaccctgatgaaggccacggtcctgatgcggcagcctgggcgggtgcaggagatcgtgggcgccctccgcaagggcggcggagaccggttacaggtgatttctgattttgacatgaccttgagcaggtttgcatataatggaaagcgatgcccttcttcttacaatattctggataatagcaagatcatcagtgaggagtgtcggaaagagctcacagcgctccttcaccactattacccaattgagatcgacccacaccggaccgtcaaggagaagctacctcatatggtggaatggtggaccaaagcacacaatctcctatgtcagcagaagattcagaagtttcagatagcccaggtggttagagagtccaatgcaatgctcagggagggatataagaccttcttcaacacactctaccataacaacattccccttttcatcttttctgcgggcattggtgatatcctggaagaaattatccgacagatgaaagtgttccaccccaacatccacatcgtgtctaactacatggattttaatgaagatggttttctccagggatttaagggccagctcatacacacatacaacaagaacagctctgcgtgtgagaactctggttacttccagcaacttgagggcaaaaccaatgtcatcctgctgggagactctatcggggacctcaccatggccgatggggttcctggtgtgcagaacattctcaaaattggcttcctgaatgacaag

SEQ ID NO: 102944 - DNA, 730 bp, Homo sapiens
  Payload ID: 88
  Gene Symbol: NT5C3B
  Gene Name: 5'-nucleotidase, cytosolic IIIB
  ENST ID: ENST00000415460
  CDS Start-End: 49-730
cgcggggctgtcgttgtcccgcgagccgccgaccaggcctcgaacgggatggcagaggaggtgagcaccctgatgaaggccacggtcctgatgcggcagcctgggcgggtgcaggagatcgtgggcgccctccgcaagggcggcggagaccggttacaggtgatttctgattttgacatgaccttgagcaggtttgcatataatggaaagcgatgcccttcttcttacaatattctggataatagcaagatcatcagtgaggagtgtcggaaagagctcacagcgctccttcaccactattacccaattgagatcgacccacaccggaccgtcaaggagaagctacctcatatggtggaatgggagggatataagaccttcttcaacacactctaccataacaacattccccttttcatcttttctgcgggcattggtgatatcctggaagaaattatccgacagatgaaagtgttccaccccaacatccacatcgtgtctaactacatggattttaatgaagatggttttctccagggatttaagggccagctcatacacacatacaacaagaacagctctgcgtgtgagaactctggttacttccagcaacttgagggcaaaaccaatgtcatcctgctgggagactctatcggggacctcaccatggccgatggggttcctggtgtgcagaacattctcaaaattggcttcctgaatgacaaggtgg

SEQ ID NO: 102945 - DNA, 993 bp, Homo sapiens
  Payload ID: 88
  Gene Symbol: NT5C3B
  Gene Name: 5'-nucleotidase, cytosolic IIIB
  ENST ID: ENST00000521789
  CDS Start-End: 68-670
gacgcctgcgcagtgcggtcgcggggctgtcgttgtcccgcgagccgccgaccaggcctcgaacgggatggcagaggaggtgatttctgattttgacatgaccttgagcaggtttgcatataatggaaagcgatgcccttcttcttacaatattctggataatagcaagatcatcagtgaggagtgtcggaaagagctcacagcgctccttcaccactattacccaattgagatcgacccacaccggaccgtcaaggagaagctacctcatatggtggaatggtggaccaaagcacacaatctcctatgtcagcagaagattcagaagtttcagatagcccaggtggttagagagtccaatgcaatgctcagggagggatataagaccttcttcaacacactctaccataacaacattccccttttcatcttttctgcgggcattggtgatatcctggaagaaattatccgacagatgaaagtgttccaccccaacatccacatcgtgtctaactacatggattttaatgaagatgtggaggagcggcgggagcgctacatggactcctatgacatcgtgctggagaaggacgagactctggatgtggtcaacgggctactgcagcacatcctgtgccagggggtccagctggagatgcaaggcccctgaaggcgcaggctccagcccggcctgcaggccgtggtgaggaggggcgcctccccagagtctgctcccccgtgaacacagagcagaggccagggtggccagcagtggctgggtccttccgcgcccctccgtcctcctttccctgagcaccttcatcaccagaggcttgaaggaaccccgccatgtggcagggcacaggcactgttcctggtgaaccttggaccacagcatgtcagtgctctagggattgtctactccagggattttcttcaaaatttttaaacatgggaagttcaaacaaatataatgtgtgaaacagatcaaaa

SEQ ID NO: 102946 - DNA, 675 bp, Homo sapiens
  Payload ID: 88
  Gene Symbol: NT5C3B
  Gene Name: 5'-nucleotidase, cytosolic IIIB
  ENST ID: ENST00000475053
  CDS Start-End: 54-227
gcggtcgcggggctgtcgttgtcccgcgagccgccgaccaggcctcgaacgggatggcagaggaggtgagcaccctgatgaaggccacggtcctgatgcggcagcctgggcgggtgcaggagatcgtgggcgccctccgcaagggcggcggagaccggttacagatttctcaatatggtcatgctgcttcctctaattggacagaaggcgcccacaccagtacctagggccttatcctccccaagccagcggctccccagtgatttctgattttgacatgaccttgagcaggtttgcatataatggaaagcgatgcccttcttcttacaatattctggataatagcaagatcatcagtgaggagtgtcggaaagagctcacagcgctccttcaccactattacccaattgagatcgacccacaccggaccgtcaaggagaagctacctcatatggtggaatggtggaccaaagcacacaatctcctatgtcagcagaagattcagaagtttcagatagcccaggtggttagagagtccaatgcaatgctcagggagggatataagaccttcttcaacacactctaccataacaacattccccttttcatcttttctgcgggcattggtgatatcctggaagaaattatccgacagatgaaagtgttccaccccaa

SEQ ID NO: 102947 - DNA, 711 bp, Homo sapiens
  Payload ID: 88
  Gene Symbol: NT5C3B
  Gene Name: 5'-nucleotidase, cytosolic IIIB
  ENST ID: ENST00000486304
  CDS Start-End: 1-318
gcacacaatctcctatgtcagcagaagattcagaagtttcagatagcccaggtggttagagagtccaatgcaatgctcagggagggatataagaccttcttcaacacactctaccataacaacattccccttttcatcttttctgcgggcattggtgatatcctggaagaaattatccgacagatgaaagtgttccaccccaacatccacatcgtgtctaactacatggattttaatgaagatgtgagccaaatcctgtttgggctgggaaaggacgaggggtggggaccaccagccagggcagttaactctgcatgaaccctaacctggggaagaaggggagggaagccactctagcttcttcaccctcaggcagttgtttatgggttactttttggccaggcgcggtggctcagacctgtaatcctagcactttgggaggccgaggcgggcggatcacttgaggtcaggagttcgagaccagcctggccaacatggtgaaagtccatctgtactaaaaatacagaaataagccgggcgtggtggtgtgtggctgtaatcccagctccttcgaggctgaggcaggagaattgcctgaacccaggaggcagaggttgcagtgagccaagatcacaccactgcactccatcctgggtgacagagtaagactctgtcttcagaaaaaaacaaaaacaaaaaaactttcaaagg

SEQ ID NO: 102948 - DNA, 3548 bp, Homo sapiens
  Payload ID: 89
  Gene Symbol: NT5E
  Gene Name: 5'-nucleotidase, ecto (CD73)
  Uniprot ID: P21589
  ENST ID: ENST00000257770
  CDS Start-End: 50-1774
gcactcgcccggctcgcccgctttcgcacccagttcacgcgccacagctatgtgtccccgagccgcgcgggcgcccgcgacgctactcctcgccctgggcgcggtgctgtggcctgcggctggcgcctgggagcttacgattttgcacaccaacgacgtgcacagccggctggagcagaccagcgaggactccagcaagtgcgtcaacgccagccgctgcatgggtggcgtggctcggctcttcaccaaggttcagcagatccgccgcgccgaacccaacgtgctgctgctggacgccggcgaccagtaccagggcactatctggttcaccgtgtacaagggcgccgaggtggcgcacttcatgaacgccctgcgctacgatgccatggcactgggaaatcatgaatttgataatggtgtggaaggactgatcgagccactcctcaaagaggccaaatttccaattctgagtgcaaacattaaagcaaaggggccactagcatctcaaatatcaggactttatttgccatataaagttcttcctgttggtgatgaagttgtgggaatcgttggatacacttccaaagaaaccccttttctctcaaatccagggacaaatttagtgtttgaagatgaaatcactgcattacaacctgaagtagataagttaaaaactctaaatgtgaacaaaattattgcactgggacattcgggttttgaaatggataaactcatcgctcagaaagtgaggggtgtggacgtcgtggtgggaggacactccaacacatttctttacacaggcaatccaccttccaaagaggtgcctgctgggaagtacccattcatagtcacttctgatgatgggcggaaggttcctgtagtccaggcctatgcttttggcaaatacctaggctatctgaagatcgagtttgatgaaagaggaaacgtcatctcttcccatggaaatcccattcttctaaacagcagcattcctgaagatccaagcataaaagcagacattaacaaatggaggataaaattggataattattctacccaggaattagggaaaacaattgtctatctggatggctcctctcaatcatgccgctttagagaatgcaacatgggcaacctgatttgtgatgcaatgattaacaacaacctgagacacacggatgaaatgttctggaaccacgtatccatgtgcattttaaatggaggtggtatccggtcgcccattgatgaacgcaacaatggcacaattacctgggagaacctggctgctgtattgccctttggaggcacatttgacctagtccagttaaaaggttccaccctgaagaaggcctttgagcatagcgtgcaccgctacggccagtccactggagagttcctgcaggtgggcggaatccatgtggtgtatgatctttcccgaaaacctggagacagagtagtcaaattagatgttctttgcaccaagtgtcgagtgcccagttatgaccctctcaaaatggacgaggtatataaggtgatcctcccaaacttcctggccaatggtggagatgggttccagatgataaaagatgaattattaagacatgactctggtgaccaagatatcaacgtggtttctacatatatctccaaaatgaaagtaatttatccagcagttgaaggtcggatcaagttttccacaggaagtcactgccatggaagcttttctttaatatttctttcactttgggcagtgatctttgttttataccaatagccaaaaattctccttgcctttaatgtgtgaaactgcattttttcaagtgagattcaaatctgccttttaggacctggctttgtgacagcaaaaaccatctttacaggctcctagaagctgaaggttagagcattataaaatgaagagacagacatgattactcagggtcagcaacctagtgagttagaaaaaaaattaacatagggccctataaggagaaagccaactatgttaagtttacgtgtccaaattttaatgaaattttactaacaattttaaaccatatttttcttcttcatatccatttctaatccatcaaacagcttatgtttacataaaattttatcattcacaaggaagttttaagcacactgtctcatttgatatccacaacttatttttggtaggaaagagagatgtttttcccacctgtcagatgaaaaaactgaagctcaaaaagggttgacttgaccatacagctaatgctgacagatccaagacctagacctaggtcttttgaactcaagtccagcattctcaactatatcaagttactgttcagaatacttaatatctcctctcttcataattatcaatagccccaagctcatggatgacaaatctctgctttatttcttgtctctattttttcactttatagctcctgttataatagcaagtttaatggtataaacacaggataccatcctctcttgcaacacccatgtgcctttgatgagtcaggtagcaagctgtagtagataatgagaaaggccagaggctgcaaaagacagtcaaaggacacgagagaaaggaaggggaagaacaggactccaggactgttttatattatagaaaagcaagagctaaagagcatttacacatgttaaacagatacttgttaagcatagtgcctgacacacggcattagctgttattttatgagattccatcagctctgcctctgtcctctttcttctaacatgaaggtatcatgagaagagaaccttctaacataagctgtaattctaaacctgcacttgtccctctccagcaagaggctagcactgaattcattctactcatactacacacccagttatggaatgtccagagttctcgaagaaaataaatgactttaggaagaggtatacattttttaagtcgctctgcctccaaatctgaacagtcactgtaaatcattcttaagcccagatatgagaacttctgctggaaagtgggaccctctgagtgggtggtcagaaaatacccatgctgatgaaatgacctatgcccaaagaacaaatacttaacgtgggagtggaaccacatgagcctgctcagctctgcataagtaattcaagaaatgggaggcttcaccttaaaaacagtgtgcaaatggcagctagaggttttgataggaagtatgtttgtttcttagtgtttacaaatattaagtactcttgatacaaaatatacttttaaacttcataacctttttataaaagttgttgcagcaaaataatagcctcggttctatgcatatatggattagctataaaaaatgtcaataagattgtacaaggaaaattagagaaagtcacatttagggtttattttttacacttggccagtaaaatagggtaaatcctattagaattttttaaagaactttttttaagtttcctaaatctgtgtgtgtattgtgaagtggtataagaaatgactttgaaccactttgcaattgtagattcccaacaataaaattgaagat

SEQ ID NO: 102949 - DNA, 974 bp, Homo sapiens
  Payload ID: 89
  Gene Symbol: NT5E
  Gene Name: 5'-nucleotidase, ecto (CD73)
  ENST ID: ENST00000369646
  CDS Start-End: 50-844
gcactcgcccggctcgcccgctttcgcacccagttcacgcgccacagctatgtgtccccgagccgcgcgggcgcccgcgacgctactcctcgccctgggcgcggtgctgtggcctgcggctggcgcctgggagcttacgattttgcacaccaacgacgtgcacagccggctggagcagaccagcgaggactccagcaagtgcgtcaacgccagccgctgcatgggtggcgtggctcggctcttcaccaaggttcagcagatccgccgcgccgaacccaacgtgctgctgctggacgccggcgaccagtaccagggcactatctggttcaccgtgtacaagggcgccgaggtggcgcacttcatgaacgccctgcgctacgatgccatggcactgggaaatcatgaatttgataatggtgtggaaggactgatcgagccactcctcaaagaggccaaatttccaattctgagtgcaaacattaaagcaaaggggccactagcatctcaaatatcaggactttatttgccatataaagttcttcctgttggtgatgaagttgtgggaatcgttggatacacttccaaagaaaccccttttctctcaaatccagggacaaatttagtgtttgaagatgaaatcactgcattacaacctgaagtagataagttaaaaactctaaatgtgaacaaaattattgcactgggacattcgggttttgaaatggataaactcatcgctcagaaagtgaggggtgtggacgtcgtggtgggaggacactccaacacatttctttacacaggtaattgtttcaaaaggattgcatgggccaggatgtccagataagcactgtgtctcttttgcctttgtaactgttattactctttttactgctatttaatatgtaatgtatattatatgatctataatatatatgtaatatacattaaatgggaacatgtgcaaatcttacaaa

SEQ ID NO: 102950 - DNA, 3918 bp, Homo sapiens
  Payload ID: 89
  Gene Symbol: NT5E
  Gene Name: 5'-nucleotidase, ecto (CD73)
  Uniprot ID: P21589
  ENST ID: ENST00000369651
  CDS Start-End: 557-2131
actcctcctctctgcccctcagctcgctcatctttcttcccgccccctctcttttccttctttggttctttgaagtgatgagctagcgcaaccacaaaccatacattccttttgtagaaaaacccgtgcctcgaatgaggcgagactcagagaggacccaggcgcggggcggacccctccaattccttcctcgcgcccccgaaagagcggcgcaccagcagccgaactgccggcgcccaggctccctggtccggccgggatgcggccggtacccgctccccgccgggaacaacctctccactcttcctgcagggagctggtgccagccgacagccgcgccagggccgctccgggtaccagggtcggatcgggtgacgtcgcgaacttgcgcctggccgccaagccggcctccaggctgaagaaggacccgccccggccttgacccgggccccgcccctccagccggggcaccgagccccggccctagctgctcgcccctactcgccggcactcgcccggctcgcccgctttcgcacccagttcacgcgccacagctatgtgtccccgagccgcgcgggcgcccgcgacgctactcctcgccctgggcgcggtgctgtggcctgcggctggcgcctgggagcttacgattttgcacaccaacgacgtgcacagccggctggagcagaccagcgaggactccagcaagtgcgtcaacgccagccgctgcatgggtggcgtggctcggctcttcaccaaggttcagcagatccgccgcgccgaacccaacgtgctgctgctggacgccggcgaccagtaccagggcactatctggttcaccgtgtacaagggcgccgaggtggcgcacttcatgaacgccctgcgctacgatgccatggcactgggaaatcatgaatttgataatggtgtggaaggactgatcgagccactcctcaaagaggccaaatttccaattctgagtgcaaacattaaagcaaaggggccactagcatctcaaatatcaggactttatttgccatataaagttcttcctgttggtgatgaagttgtgggaatcgttggatacacttccaaagaaaccccttttctctcaaatccagggacaaatttagtgtttgaagatgaaatcactgcattacaacctgaagtagataagttaaaaactctaaatgtgaacaaaattattgcactgggacattcgggttttgaaatggataaactcatcgctcagaaagtgaggggtgtggacgtcgtggtgggaggacactccaacacatttctttacacaggcaatccaccttccaaagaggtgcctgctgggaagtacccattcatagtcacttctgatgatgggcggaaggttcctgtagtccaggcctatgcttttggcaaatacctaggctatctgaagatcgagtttgatgaaagaggaaacgtcatctcttcccatggaaatcccattcttctaaacagcagcattcctgaagatccaagcataaaagcagacattaacaaatggaggataaaattggataattattctacccaggaattagggaaaacaattgtctatctggatggctcctctcaatcatgccgctttagagaatgcaacatgggcaacctgatttgtgatgcaatgattaacaacaacctgagacacacggatgaaatgttctggaaccacgtatccatgtgcattttaaatggaggtggtatccggtcgcccattgatgaacgcaacaatggaatccatgtggtgtatgatctttcccgaaaacctggagacagagtagtcaaattagatgttctttgcaccaagtgtcgagtgcccagttatgaccctctcaaaatggacgaggtatataaggtgatcctcccaaacttcctggccaatggtggagatgggttccagatgataaaagatgaattattaagacatgactctggtgaccaagatatcaacgtggtttctacatatatctccaaaatgaaagtaatttatccagcagttgaaggtcggatcaagttttccacaggaagtcactgccatggaagcttttctttaatatttctttcactttgggcagtgatctttgttttataccaatagccaaaaattctccttgcctttaatgtgtgaaactgcattttttcaagtgagattcaaatctgccttttaggacctggctttgtgacagcaaaaaccatctttacaggctcctagaagctgaaggttagagcattataaaatgaagagacagacatgattactcagggtcagcaacctagtgagttagaaaaaaaattaacatagggccctataaggagaaagccaactatgttaagtttacgtgtccaaattttaatgaaattttactaacaattttaaaccatatttttcttcttcatatccatttctaatccatcaaacagcttatgtttacataaaattttatcattcacaaggaagttttaagcacactgtctcatttgatatccacaacttatttttggtaggaaagagagatgtttttcccacctgtcagatgaaaaaactgaagctcaaaaagggttgacttgaccatacagctaatgctgacagatccaagacctagacctaggtcttttgaactcaagtccagcattctcaactatatcaagttactgttcagaatacttaatatctcctctcttcataattatcaatagccccaagctcatggatgacaaatctctgctttatttcttgtctctattttttcactttatagctcctgttataatagcaagtttaatggtataaacacaggataccatcctctcttgcaacacccatgtgcctttgatgagtcaggtagcaagctgtagtagataatgagaaaggccagaggctgcaaaagacagtcaaaggacacgagagaaaggaaggggaagaacaggactccaggactgttttatattatagaaaagcaagagctaaagagcatttacacatgttaaacagatacttgttaagcatagtgcctgacacacggcattagctgttattttatgagattccatcagctctgcctctgtcctctttcttctaacatgaaggtatcatgagaagagaaccttctaacataagctgtaattctaaacctgcacttgtccctctccagcaagaggctagcactgaattcattctactcatactacacacccagttatggaatgtccagagttctcgaagaaaataaatgactttaggaagaggtatacattttttaagtcgctctgcctccaaatctgaacagtcactgtaaatcattcttaagcccagatatgagaacttctgctggaaagtgggaccctctgagtgggtggtcagaaaatacccatgctgatgaaatgacctatgcccaaagaacaaatacttaacgtgggagtggaaccacatgagcctgctcagctctgcataagtaattcaagaaatgggaggcttcaccttaaaaacagtgtgcaaatggcagctagaggttttgataggaagtatgtttgtttcttagtgtttacaaatattaagtactcttgatacaaaatatacttttaaacttcataacctttttataaaagttgttgcagcaaaataatagcctcggttctatgcatatatggattagctataaaaaatgtcaataagattgtacaaggaaaattagagaaagtcacatttagggtttattttttacacttggccagtaaaatagggtaaatcctattagaattttttaaagaactttttttaagtttcctaaatctgtgtgtgtattgtgaagtggtataagaaatgactttgaaccactttgcaattgtagattcccaacaataaaattgaagataagctctttggtc

SEQ ID NO: 102951 - DNA, 738 bp, Homo sapiens
  Payload ID: 89
  Gene Symbol: NT5E
  Gene Name: 5'-nucleotidase, ecto (CD73)
  ENST ID: ENST00000437581
  CDS Start-End: 1-539
gaaatcccattcttctaaacagcagcattcctgaagatccaagcataaaagcagacattaacaaatggaggataaaattggataattattctacccaggaattagggaaaacaattgtctatctggatggctcctctcaatcatgccgctttagagaatgcaacatgggcaacctgatttgtgatgcaatgattaacaacaacctgagacacacggatgaaatgttctggaaccacgtatccatgtgcattttaaatggaggtggtatccggtcgcccattgatgaacgcaacaatggcacaattacctgggagaacctggctgctgtattgccctttggaggcacatttgacctagtccagttaaaaggttccaccctgaagaaggcctttgagcatagcgtgcaccgctacggccagtccactggagagttcctgcaggtgggcgatttaaaggaatgctgtccaatctgtattaaccaggatgattcctggaaggagcagcctactgcacagacatacctgaacacctggttctagtcccactgtgacctggggcaagttctcaacccctctgggcacagggagaaaacctttcctgtttatctcatggactgcagtgaaagttgaatggaaataaatgcttcctaaattgccaagggcttctgaaacacttttgttaataattccacagtccagtgaattaatcctttaaaagcaatcttattttacctggaaa

SEQ ID NO: 102952 - DNA, 689 bp, Homo sapiens
  Payload ID: 89
  Gene Symbol: NT5E
  Gene Name: 5'-nucleotidase, ecto (CD73)
  ENST ID: ENST00000416334
  CDS Start-End: 1-689
tggacgtcgtggtgggaggacactccaacacatttctttacacaggcaatccaccttccaaagaggtgcctgctgggaagtacccattcatagtcacttctgatgatgggcggaaggttcctgtagtccaggcctatgcttttggcaaatacctaggctatctgaagatcgagtttgatgaaagaggaaacgtcatctcttcccatggaaatcccattcttctaaacagcagcattcctgaagatccaagcataaaagcagacattaacaaatggaggataaaattggataattattctacccaggaattagggaaaacaattgtctatctggatggctcctctcaatcatgccgctttagagaatgcaacatgggcaacctgatttgtgatgcaatgattaacaacaacctgagacacacggatgaaatgttctggaaccacgtatccatgtgcattttaaatggaggtggtatccggtcgcccattgatgaacgcaacaatggaatccatgtggtgtatgatctttcccgaaaacctggagacagagtagtcaaattagatgttctttgcaccaagtgtcgagtgcccagttatgaccctctcaaaatggacgaggtatataaggtgatcctcccaaacttcctggccaatggtggagatgggttccagatgataaaagatgaatta

SEQ ID NO: 102953 - DNA, 4031 bp, Homo sapiens
  Payload ID: 90
  Gene Symbol: OPLAH
  Gene Name: 5-oxoprolinase (ATP-hydrolysing)
  Uniprot ID: O14841
  ENST ID: ENST00000618853
  CDS Start-End: 105-3971
ggagcgcaggcagagccgaccgcgagcgaccgagccggagccgagcgccagtttttccagggctaccagctgaagagctcctgtgggactccagccccaccaccatgggcagccccgagggccgcttccactttgccatcgaccgtgggggtaccttcacagacgtctttgcccagtgcccaggggggcacgtgcgggtcttaaaactgctctcagaggaccctgccaactatgcggacgcgccaaccgaaggcatccgccgcatcctggagcaggaggccggcatgctcctgccccgggaccagccgctggactccagtcatatcgccagcatccgcatgggcaccacagtggccaccaacgcactgctggagcggaagggggagcgggtggcgctgctggtgacacgtggcttccgagacctgctgcacattggcacccaagcccgtggggacctctttgacctggccgtgcccatgcctgaggtgctgtatgaagaggtgctggaggtggacgaacgcgtggtgctgcaccgtggagaggcgggcaccgggacgcctgtgaaaggccgcacgggggacctgctggaagtgcagcagcctgtggacctgggggccctgcgtgggaagctggaggggctgctatctcgaggcatccgcagcctggctgtggtgctcatgcactcgtacacgtgggcccagcatgagcagcaggtgggtgtgctggcccgggagctgggcttcacgcacgtgtcactgtcctcggaggccatgcccatggtgcgcatcgtccctcgggggcacacggcctgtgccgacgcctacctcacgcccgccatccagcgctacgtgcagggcttctgccgtggcttccagggccaactcaaggatgtgcaggtgttgttcatgcgctccgatggcggcctggcgcccatggacaccttcagcggctccagtgctgtgctctcgggcccggccggcggcgtggtgggctactcagccaccacctaccagcaggagggtggccagcctgtcatcggctttgacatgggaggcacgtccacggatgtgagccgctatgctggggaattcgagcacgtcttcgaggccagcacagctggcgtcaccctccaggccccgcagctggacatcaacaccgtggcagcgggagggggttcccgcctcttcttcaggtctggcctctttgtggttgggcccgagtcagcaggagcccacccaggacccgcctgctaccgcaaagggggccctgtgacagtgacggatgctaatctggtcctgggtcgcctgctgcctgcctccttcccctgcatttttgggccgggagagaaccaaccactttcccctgaggcctcccgcaaagccctggaggctgtggccactgaggtcaacagcttcctgaccaacgggccctgcccggcctccccgctgagcctggaggaggtggccatggggttcgtgcgcgtggccaacgaggccatgtgccggcccatccgtgcactcacgcaggcaagaggccatgacccctcagcccatgtgctggcctgctttgggggagctggtgggcagcatgcatgtgccatcgcccgggccctgggcatggacacggtgcacatccacaggcacagtgggctgctgtcggccctggggctggccctggctgacgtggtgcatgaggcacaggaaccctgctccctgctctacgcgcctgagaccttcgtgcagctggaccagaggctgagccgcctggaggagcagtgtgtggatgctctgcaggcccagggcttccccaggtcccagatcagcactgagagcttcctgcacctgcgctaccagggcacggactgtgctctgatggtgtctgcccaccagcacccagccacagcccgctcgccccgtgcgggggacttcggggcagcctttgtggagcggtacatgagggagtttggctttgtcatacctgagcggccggtggtcgtggacgatgtgcgagtgcggggcaccggccgcagtggtcttcgcctcgaggatgcccccaaagcccagaccgggcctccccgggtggacaagatgacccagtgctactttgaggggggctaccaggagacccctgtgtacctgctggcagagctgggctatgggcacaagctccatgggccctgcctcatcatcgacagtaacagcaccatcctggtggagccaggttgccaggcagaggtgaccaagacaggggacatctgcatctccgtgggggccgaagtccccggcacagtgggcccccagctggaccctatccagctgtccatcttctcacaccgcttcatgagcattgctgagcagatgggccgcatcctgcagcgcacagccatctccaccaacatcaaggagcgtctggacttctcctgtgccctctttgggcccgatggggggctggtgtccaatgccccccacatccctgtgcacctgggtgccatgcaggagacggtgcagttccagattcagcacctgggggccgatctccaccctggcgacgtgctactgagcaaccatcccagtgccgggggcagccacctgccagacctgactgttatcacaccggtgttttggccgggtcagacgcggcctgtgttctatgtggccagccgagggcaccacgcagacatcgggggcatcacaccaggctccatgcccccccactccaccatgctgcaacaggagggtgccgtctttctgtccttcaaacttgtccaggggggcgtcttccaggaggaggcggtgacggaggccctgcgggcgccaggcaaggtccccaactgcagcggaaccagaaacctgcacgacaacctgtcggacctccgtgcccaggtggcagccaaccagaagggcatccagctggtgggggagctcattgggcagtacggcctggacgtggtgcaggcctacatgggccatattcaggcaaacgctgagctggccgtgcgagacatgttgcgtgcctttggaacctcccggcaggcccggggcctgcccctggaggtgtcctcggaagaccacatggacgacggttcccccatccgcctccgtgtgcagatcagcctgagtcagggcagcgccgtgtttgacttcagcggcactgggccggaggtgtttggtaatctcaacgcaccgcgggccgtaaccctgtccgccctcatctactgcctgcgctgtctggtgggccgcgacatcccactcaaccagggctgcctggcgccagtgcgcgtggtcattccccgaggctccatcctggacccgtcgcccgaggcggcggtggtgggcggcaacgtgctcacgtcgcagcgcgtggtggatgtcatcctgggggcctttggggcctgcgccgcctcccagggctgcatgaacaacgtgaccctgggcaacgcccacatgggctactacgagacggtggcgggcggcgcgggcgcgggtcccagctggcacgggcgcagcggtgtgcacagccacatgaccaacacacgcatcaccgaccctgagatcctggagagccggtacccggtcatcctgcgccgcttcgagctgcggcggggctcggggggcagaggccgcttccgaggcggcgacggcgtcacccgcgagctgctctttcgtgaggaggcgctgctgtcagtgctgaccgagcgccgcgccttccggccatacgggctccacgggggcgagcctggcgcccgcggcctaaacctgctgatccgcaaaaacggccggacggtgaatctgggcggcaagacgtcggtgaccgtgtaccccggggatgtgttctgtctccacacgcccggcggcggtggctatggggacccggaggaccccgccccaccgccggggtcgcccccgcaagcactggcctttcccgagcacggcagcgtctatgagtatcgccgggcccaggaggccgtgtgaggatcccgcaataaagatgccttaagtctcccggttctggggacgcagctacggcgccta

SEQ ID NO: 102954 - DNA, 659 bp, Homo sapiens
  Payload ID: 90
  Gene Symbol: OPLAH
  Gene Name: 5-oxoprolinase (ATP-hydrolysing)
  ENST ID: ENST00000567871
  CDS Start-End: 187-659
caggagctgaagctggtgctcaggaaccgcggcagcagcctgggcttctgcagctccgggttcctggctgaggtggctgccagtccctggctacccaggcggagaacgatcaaattcaagaatgctgagagagtttttccagggctaccagctgaagagctcctgtgggactccagccccaccaccatgggcagccccgagggccgcttccactttgccatcgaccgtgggggtaccttcacagacgtctttgcccagtgcccaggggggcacgtgcgggtcttaaaactgctctcagaggaccctgccaactatgcggacgcgccaaccgaaggcatccgccgcatcctggagcaggaggccggcatgctcctgccccgggaccagccgctggactccagtcatatcgccagcatccgcatgggcaccacagtggccaccaacgcactgctggagcggaagggggagcgggtggcgctgctggtgacacgtggcttccgagacctgctgcacattggcacccaagcccgtggggacctctttgacctggccgtgcccatgcctgaggtgctgtatgaagaggtgctggaggtggacgaacgcgtggtgctgcaccgtggagaggcgggcaccgggacgcctgtgaaaggccgcacggg

SEQ ID NO: 102955 - DNA, 2038 bp, Homo sapiens
  Payload ID: 91
  Gene Symbol: PHYKPL
  Gene Name: 5-phosphohydroxy-L-lysine phospho-lyase
  Uniprot ID: Q8IUZ5
  ENST ID: ENST00000308158
  CDS Start-End: 236-1588
agttcctgcgcgggactgccaaggcacgaccacgggccggaaggctgccaggcccagtgggcaagcgaagaaatgaaccaccgcaacgcgggcgcttcggggcggggccgagtgcgaacctgagccccaaatcccgacccaggcaggggcggggcccggagcggggccttggaggcccagcccgcgcggcgacgtctccgcgtggcgtcacggcaccgactgacggccacccaccatggccgcagaccagcgcccgaaggccgacacgctggccctgaggcaacggctcatcagctcttcctgcagactcttttttcccgaggatcctgttaagattgtccgggcccaagggcagtacatgtacgatgaacagggggcagaatacatcgattgcatcagcaatgtggcgcacgttgggcactgccaccctctcgtggtccaagcagcacatgagcagaaccaggtgctcaacaccaacagccggtacctgcatgacaacatcgtggactatgcgcagaggctgtcagagaccctgccggagcagctctgtgtgttctatttcctgaattctgggtcagaagccaatgacctggccctgaggctggctcgccactacacgggacaccaggacgtggtggtattagatcatgcgtatcacggccacctgagctccctgattgacatcagtccctacaagttccgcaacctggatggccagaaggagtgggtccacgtggcacctctcccagacacctaccggggcccctaccgggaggaccaccccaacccagctatggcctatgccaacgaggtgaaacgtgtggtcagcagtgcacaggagaagggcaggaagattgcagccttcttcgctgagtctctgcccagtgtgggagggcagatcattccccctgctggctacttctcccaagtggcagagcacatccgcaaggccggaggggtctttgttgcagatgagatccaggttggctttggccgggtaggcaagcacttctgggccttccagctccagggaaaagacttcgtccctgacatcgtcaccatgggcaagtccattggcaacggccaccctgttgcctgcgtggccgcaacccagcctgtggcgagggcatttgaagccaccggcgttgagtacttcaacacgtttgggggcagcccagtgtcctgcgctgtggggctggccgtcctgaatgtcttggagaaggagcagctccaggatcatgccaccagtgtaggcagcttcctgatgcagctcctcgggcagcaaaaaatcaaacatcccatcgtcggggatgtcaggggtgttgggctcttcattggtgtggatctgatcaaagatgaggccacaaggacaccagcaactgaagaggctgcctacttggtatcaaggctgaaggagaactacgttttgctgagcactgatggccctgggaggaacatcctgaagtttaagcccccaatgtgcttcagcctggacaatgcacggcaggtggtggcaaagctggatgccattctgactgacatggaagagaaggtgagaagttgtgaaacgctgaggctccagccctaagccagccctgctctgcctaagtgtactccagaagaaactcatctcatccaaatacacgctattgagaaggcgagcctgacctccctcttacagataaagtcagctttcagaggctcagggtgggggggcctgcccgaggccataatgctacccaccccctcctcctaaccactggtctgttggaataacccagatgtctgcatcccctcaagtcagtcaatttcctttctgtccactgggggtggaatggggtagggtgggatactttaaagtgctcctgcttaaataaattagaccagaccagtgtatttctaaagaaaatcctgacatgcacacccattaaaaatagtacattttacagtgtcccagtcatacttttaattggcaaattaaaataatgcaatctgatatattctatcctactaaattaaaaatactgaatataaccaa

SEQ ID NO: 102956 - DNA, 739 bp, Homo sapiens
  Payload ID: 91
  Gene Symbol: PHYKPL
  Gene Name: 5-phosphohydroxy-L-lysine phospho-lyase
  ENST ID: ENST00000323594
  CDS Start-End: 81-739
ccggagcggggccttggaggcccagcccgcgcggcgacgtctccgcgtggcgtcacggcaccgactgacggccacccaccatggccgcagaccagcgcccgaaggccgacacgctggccctgaggcaacggctcatcagccaccttttctcaggatccgggagactgacgcggacacatgcagaaatgagcaaggaggccacagaggctgaaaatgctttcagaaacaatccgaagtttcagcgacttgttaccccatctgcttcctgctttgcaaccacctgtggagtggagagacaagttgggcactgccaccctctcgtggtccaagcagcacatgagcagaaccaggtgctcaacaccaacagccggtacctgcatgacaacatcgtggactatgcgcagaggctgtcagagaccctgccggagcagctctgtgtgttctatttcctgaattctgggtcagaagccaatgacctggccctgaggctggctcgccactacacgggacaccaggacgtggtggtattagatcatgcgtatcacggccacctgagctccctgattgacatcagtccctacaagttccgcaacctggatggccagaaggagtgggtccacgtggcacctctcccagacacctaccggggcccctaccgggaggaccaccccaacccagctatggcctatgccaacgaggtgaaacgtgtggtcagcagtgcacaggagaagggcaggaa

SEQ ID NO: 102957 - DNA, 1001 bp, Homo sapiens
  Payload ID: 91
  Gene Symbol: PHYKPL
  Gene Name: 5-phosphohydroxy-L-lysine phospho-lyase
  ENST ID: ENST00000393488
  CDS Start-End: 1-548
tcgtccctgacatcgtcaccatgggcaagtccattggcaacggccaccctgttgcctgcgtggccgcaacccagcctgtggcgagggcatttgaagccaccggcgttgagtacttcaacacgtttgggggcagcccagtgtcctgcgctgtggggctggccgtcctgaatgtcttggagaaggagcagctccaggatcatgccaccagtgtaggcagcttcctgatgcagctcctcgggcagcaaaaaatcaaacatcccatcgtcggggatgtcaggggtgttgggctcttcattggtgtggatctgatcaaagatgaggccacaaggacaccagcaactgaagaggctgcctacttggtatcaaggctgaaggagaactacgttttgctgagcactgatggccctgggaggaacatcctgaagtttaagcccccaatgtgcttcagcctggacaatgcacggcaggtggtggcaaagctggatgccattctgactgacatggaagagaaggtgagaagttgtgaaacgctgaggctccagccctaagccagccctgctctgcctaagtgtactccaggtgagtgggccttgcttcttactcttgaagatgcacagcgggttccttaccatcagcagcaagcagcctcggcaagctgagcctttttttaagacttttttttgttctgactgatgctccttcccaaagaagaaactcatctcatccaaatacacgctattgagaaggcgagcctgacctccctcttacagataaagtcagctttcagaggctcagggtgggggggcctgcccgaggccataatgctacccaccccctcctcctaaccactggtctgttggaataacccagatgtctgcatcccctcaagtcagtcaatttcctttctgtccactgggggtggaatggggtagggtgggatactttaaagtgctcctgcttaaataaattagaccagaccagtgtatttctaaagaaaatcc

SEQ ID NO: 102958 - DNA, 824 bp, Homo sapiens
  Payload ID: 91
  Gene Symbol: PHYKPL
  Gene Name: 5-phosphohydroxy-L-lysine phospho-lyase
  ENST ID: ENST00000476170
  CDS Start-End: 22-393
accgactgacggccacccaccatggccgcagaccagcgcccgaaggccgacacgctggccctgaggcaacggctcatcagctcttcctgcagactcttttttcccgaggatcctgttaagattgtccgggcccaagggcagtacatgtacgatgaacagggggcagaatacatcgattgcatcagcaatgtggcgcacgttgggcactgccaccctctcgtggtccaagcagcacatgagcagaaccaggtgctcaacaccaacagccggtacctgcatgacaacatcgtggactatgcgcagaggctgtcagagaccctgccggagcagctctgtgtgttctatttcctgaattctgggtggggtaacagcagttcaaagaaaggaacttgagcccagacatttgccatgtcaagagctggagcctctggaaagagaagggagctggtgcttcctcagtggtggtggaggaggggcattcttatgccaccagctttattctgtgtggattccagggacttccatgttgccaaatccaaagcaatctctttgctgcattgtcttactctgtcccagcagtaattgacagttaccactctccggaagtggtctgtcatcttgcttcccgggcactgtgctctcctgttttctatcagcttctctagccactccttccctgtcttctttgctgattcctcctctgttccttggggctgatcctgggccacttttctctctgagccctctcctcaggtgatctcttccattctcttggtattacatagcatccatgtgttggtgactcacaaatttttttgagccca

SEQ ID NO: 102959 - DNA, 1539 bp, Homo sapiens
  Payload ID: 91
  Gene Symbol: PHYKPL
  Gene Name: 5-phosphohydroxy-L-lysine phospho-lyase
  ENST ID: ENST00000474052
  CDS Start-End: 241-438
gctcgagttcctgcgcgggactgccaaggcacgaccacgggccggaaggctgccaggcccagtgggcaagcgaagaaatgaaccaccgcaacgcgggcgcttcggggcggggccgagtgcgaacctgagccccaaatcccgacccaggcaggggcggggcccggagcggggccttggaggcccagcccgcgcggcgacgtctccgcgtggcgtcacggcaccgactgacggccacccaccatggccgcagaccagcgcccgaaggccgacacgctggccctgaggcaacggctcatcagctcttcctgcagactcttttttcccgaggatcctgttaagattgtccgggcccaagggcagtacatgtacgatgaacagggggcagaatacatcgattgcatcagcaatgtggcgcacgtgcgtatcacggccacctgagctccctgattgacatcagtccctacaagttccgcaacctggatggccagaaggagtgggtccacgtggtatgcactgcccaactcaacaacagattgcagccttcttcgctgagtctctgcccagtgtgggagggcagatcattccccctgctggctacttctcccaagtggcagactccagggaaaagacttcgtccctgacatcgtcaccatgggcaagtccattggcaacggccaccctgttgcctgcgtggccgcaacccagcctgtggcgagggcatttgaagccaccggcgttgagtacttcaacacgtttgggggcagcccagtgtcctgcgctgtggggctggccgtcctgaatgtcttggagaaggagcagctccaggatcatgccaccagtgtaggcagcttcctgatgcagctcctcgggcagcaaaaaatcaaacatcccatcgtcggggatgtcaggggtgttgggctcttcattggtgtggatctgatcaaagatgaggccacaaggacaccagcaactgaagaggctgcctacttggtatcaaggctgaaggagaactacgttttgctgagcactgatggccctgggaggaacatcctgaagtttaagcccccaatgtgcttcagcctggacaatgcacggcaggtggtggcaaagctggatgccattctgactgacatggaagagaaggtgagaagttgtgaaacgctgaggctccagccctaagccagccctgctctgcctaagtgtactccagaagaaactcatctcatccaaatacacgctattgagaaggcgagcctgacctccctcttacagataaagtcagctttcagaggctcagggtgggggggcctgcccgaggccataatgctacccaccccctcctcctaaccactggtctgttggaataacccagatgtctgcatcccctcaagtcagtcaatttcctttctgtccactgggggtggaatggggtagggtgggatactttaaagtgctcctgcttaaataaattagaccagaccagtgtatttctaaagaaaatcctgacatgcacacccattaaaaatagtacattttaca

SEQ ID NO: 102960 - DNA, 643 bp, Homo sapiens
  Payload ID: 91
  Gene Symbol: PHYKPL
  Gene Name: 5-phosphohydroxy-L-lysine phospho-lyase
  ENST ID: ENST00000510913
  CDS Start-End: 1-348
caagcagcacatgagcagaaccaggtgctcaacaccaacagccggtacctgcatgacaacatcgtggactatgcgcagaggctgtcagagaccctgccggagcagctctgtgtgttctatttcctgaattctgggtcagaagccaatgacctggccctgaggctggctcgccactacacgggacaccaggacgtggtggtattagatcatgcgtatcacggccacctgagctccctgattgacatcagtccctacaagttccgcaacctggatggccagaaggagtgggtccacgtggtatgcactgcccaactcaacaacagtgacatgctcagttctctgggttgaggcatcatcaccctggtggccatgtggaggatggactggaaaaggcattcagttagaagacctctgcaggagtccaaggaagaaacaggcaaatctgcaggaggcagattgcagccttcttcgctgagtctctgcccagtgtgggagggcagatcattccccctgctggctacttctcccaagtggcagagcacatccgcaaggccggaggggtctttgttgcagatgagatccaggttggctttggccgggtaggcaagcacttctgggccttccagctccagggaaaagactt

SEQ ID NO: 102961 - DNA, 1969 bp, Homo sapiens
  Payload ID: 91
  Gene Symbol: PHYKPL
  Gene Name: 5-phosphohydroxy-L-lysine phospho-lyase
  ENST ID: ENST00000493197
  CDS Start-End: 219-386
gccaaggcacgaccacgggccggaaggctgccaggcccagtgggcaagcgaagaaatgaaccaccgcaacgcgggcgcttcggggcggggccgagtgcgaacctgagccccaaatcccgacccaggcaggggcggggcccggagcggggccttggaggcccagcccgcgcggcgacgtctccgcgtggcgtcacggcaccgactgacggccacccaccatggccgcagaccagcgcccgaaggccgacacgctggccctgaggcaacggctcatcagacacgcggccttatggagtccccatgggacggggcagccaccttttctcaggatccgggagactgacgcggacacatgcagaaatgagcaaggaggccacagaggctgaaaatgctttcagaaacaatccgaagtttcagcgacttgttaccccatctgcttcctgctttgcaaccacctgtggagtggagagacaagctcttcctgcagactcttttttcccgaggatcctgttaagattgtccgggcccaagggcagtacatgtacgatgaacagggggcagaatacatcgattgcatcagcaatgtggcgcacgttgggcactgccaccctctcgtggtccaagcagcacatgagcagaaccaggtgctcaacaccaacagccggtacctgcatgacaacatcgtggactatgcgcagaggctgtcagagaccctgccggagcagctctgtgtgttctatttcctgaattctgggatcattgctggagcttagtgaggtcagaagccaatgacctggccctgaggctggctcgccactacacgggacaccaggacgtggtggtattagatcatgcgtatcacggccacctgagctccctgattgacatcagtccctacaagttccgcaacctggatggccagaaggagtgggtccacgtggcacctctcccagacacctaccggggcccctaccgggaggaccaccccaacccagctatggcctatgccaacgaggtgaaacgtgtggtcagcagtgcacaggagaagggcaggaagattgcagccttcttcgctgagtctctgcccagtgtgggagggcagatcattccccctgctggctacttctcccaagtggcagagcacatccgcaaggccggaggggtctttgttgcagatgagatccaggttggctttggccgggtaggcaagcacttctgggccttccagctccagggaaaagacttcgtccctgacatcgtcaccatgggcaagtccattggcaacggccaccctgttgcctgcgtggccgcaacccagcctgtggcgagggcatttgaagccaccggcgttgagtacttcaacacgtttgggggcagcccagtgtcctgcgctgtggggctggccgtcctgaatgtcttggagaaggagcagctccaggatcatgccaccagtgtaggcagcttcctgatgcagctcctcgggcagcaaaaaatcaaacatcccatcgtcggggatgtcaggggtgttgggctcttcattggtgtggatctgatcaaagatgaggccacaaggacaccagcaactgaagaggctgcctacttggtatcaagacatggaagagaaggtgagaagttgtgaaacgctgaggctccagccctaagccagccctgctctgcctaagtgtactccagaagaaactcatctcatccaaatacacgctattgagaaggcgagcctgacctccctcttacagataaagtcagctttcagaggctcagggtgggggggcctgcccgaggccataatgctacccaccccctcctcctaaccactggtctgttggaataacccagatgtctgcatcccctcaagtcagtcaatttcctttctgtccactgggggtggaatggggtagggtgggatactttaaagtgctcctgcttaaataaattagaccagaccagtgta

SEQ ID NO: 102962 - DNA, 731 bp, Homo sapiens
  Payload ID: 91
  Gene Symbol: PHYKPL
  Gene Name: 5-phosphohydroxy-L-lysine phospho-lyase
  ENST ID: ENST00000506045
  CDS Start-End: 1-87
attgcagccttcttcgctgagtctctgcccagtgtgggagggcagatcattccccctgctggctacttctcccaagtggcagaatgagatccaggttggctttggccgggtaggcaagcacttctgggccttccagctccagggaaaagacttcgtccctgacatcgtcaccatgggcaagtccattggcaacggccaccctgttgcctgcgtggccgcaacccagcctgtggcgagggcatttgaagccaccggcgttgagtacttcaacacgtttgggggcagcccagtgtcctgcgctgtggggctggccgtcctgaatgtcttggagaaggagcagctccaggatcatgccaccagtgtaggcagcttcctgatgcagctcctcgggcagcaaaaaatcaaacatcccatcgtcggggatgtcaggggtgttgggctcttcattggtgtggatctgatcaaagatgaggccacaaggacaccagcaactgaagaggctgcctacttggtatcaaggctgaaggagaactacgttttgctgagcactgatggccctgggaggaacatcctgaagtttaagcccccaatgtgcttcagcctggacaatgcacggcaggtggtggcaaagctggatgccattctgactgacatggaagagaaggtgagaagttgtgaaacgctgaggctccagccctaagccagccctgctctgcctaagtgtactccag

SEQ ID NO: 102963 - DNA, 1057 bp, Homo sapiens
  Payload ID: 92
  Gene Symbol:
  Gene Name: 60S ribosomal protein L7a  [Source:UniProtKB/Swiss-Prot
  Acc:P62424]
  ENST ID: ENST00000625844
  CDS Start-End: 483-1057
tgagctgtagttccgtggcactatagccaggttccggctgtatccgctgccatcctcctccaggcgcggcctcggagggcctcctgctcctcctggcgctaggagagccccactcggtgtggcacggagacaccgaggtggattagagccccacttggtgtggcacggagacattgagatggactagagccccgggcggccgagagcggaatgcgttgttcccggtgtcgcagggctgggtgtcgcaggcctggagcaccgcagtgcggggctcggagccctagcgtctctcgggcttgctgggggccgctccagaggccttgtgagcgacgagttctgagcccgcccctgttgcttctagagcctgtggggccgcgactcagaggagtcatgagtccggggtgtctcctgggtgggcgacgcgaagagagcgtggtctcgggcttagccttgctctggccactcggggttcccggggctgcatgcttgtgcggctgaatgtgagatgctcctgtcgaggggtggtgctggggggttgcagaaagctgctcgccagcttagttcagccgaaaggaaagaaggccaagggaaagaaggtggctccggccccagctgtcgtgaagaagcaggaggctaagaaagtggtgaatcccctgtttgagaaaaggcctaagaattttggcattggacaggacatccagcccaaaagagacctcacccgctttgtgaaatggccccgctatatcaggttgcagcggcagagagccatcctctataagcggctgaaagtgcctcctgcgattaaccagttcacccaggccctggaccgccaaacagctactcagctgcttaagctggcccacaagtacagaccagagacaaagcaagagaagaagcagagactgttggcccgggccgagaagaaggctgctggcaaaggggacgtcccaacgaagagaccacctgtccttcgagcaggagttaacaccgtcaccaccttggtggagaacaagaaagctcagctggtggtgattgcacacgacgtggatcccatcga

SEQ ID NO: 102964 - DNA, 680 bp, Homo sapiens
  Payload ID: 92
  Gene Symbol:
  Gene Name: 60S ribosomal protein L7a  [Source:UniProtKB/Swiss-Prot
  Acc:P62424]
  ENST ID: ENST00000627260
  CDS Start-End: 165-620
ccgaaaggaaagaaggccaagggaaagaaggtggctccggccccagctgtcgtgaagaagcaggaggctaagaaagtggtgaatcccctgtttgagaaaaggcctaagaattttggcattggacaggacatccagcccaaaagagacctcacccgctttgtgaaatggccccgctatatcaggctgctggcaaaggggacgtcccaacgaagagaccacctgtccttcgagcaggagttaacaccgtcaccaccttggtggagaacaagaaagctcagctggtggtgattgcacacgacgtggatcccatcgagctggttgtcttcttgcctgccctgtgtcgtaaaatgggggtcccttactgcattatcaagggaaaggcaagactgggacgtctagtccacaggaagacctgcaccactgtcgccttcacacaggtgaactcggaagacaaaggcgctttggctaagctggtggaagctatcaggaccaattacaatgacagatacgatgagatccgccgtcactggggtggcaatgtcctgggtcctaagtctgtggctcgtatcgccaagctcgaaaaggcaaaggctaaagaacttgccactaaactgggttaaatgtacactgttgagttttctgtacataaaaataattgaaataatacaaattttccttca

SEQ ID NO: 102965 - DNA, 891 bp, Homo sapiens
  Payload ID: 92
  Gene Symbol:
  Gene Name: 60S ribosomal protein L7a  [Source:UniProtKB/Swiss-Prot
  Acc:P62424]
  Uniprot ID: P62424
  ENST ID: ENST00000630979
  CDS Start-End: 31-831
tttcctttctctctcctcccgccgcccaagatgccgaaaggaaagaaggccaagggaaagaaggtggctccggccccagctgtcgtgaagaagcaggaggctaagaaagtggtgaatcccctgtttgagaaaaggcctaagaattttggcattggacaggacatccagcccaaaagagacctcacccgctttgtgaaatggccccgctatatcaggttgcagcggcagagagccatcctctataagcggctgaaagtgcctcctgcgattaaccagttcacccaggccctggaccgccaaacagctactcagctgcttaagctggcccacaagtacagaccagagacaaagcaagagaagaagcagagactgttggcccgggccgagaagaaggctgctggcaaaggggacgtcccaacgaagagaccacctgtccttcgagcaggagttaacaccgtcaccaccttggtggagaacaagaaagctcagctggtggtgattgcacacgacgtggatcccatcgagctggttgtcttcttgcctgccctgtgtcgtaaaatgggggtcccttactgcattatcaagggaaaggcaagactgggacgtctagtccacaggaagacctgcaccactgtcgccttcacacaggtgaactcggaagacaaaggcgctttggctaagctggtggaagctatcaggaccaattacaatgacagatacgatgagatccgccgtcactggggtggcaatgtcctgggtcctaagtctgtggctcgtatcgccaagctcgaaaaggcaaaggctaaagaacttgccactaaactgggttaaatgtacactgttgagttttctgtacataaaaataattgaaataatacaaattttccttca

SEQ ID NO: 102966 - DNA, 1156 bp, Homo sapiens
  Payload ID: 93
  Gene Symbol: PFKFB1
  Gene Name: 6-phosphofructo-2-kinase/fructose-2,6-biphosphatase 1
  ENST ID: ENST00000374992
  CDS Start-End: 72-887
gacagctagtaagataggaagtgaggccaggtaccttgtgggcagtgatgtcattcggtgcgactcctaagatgtctccagagatgggagagctcacccaaaccaggttgcagaagatctggattccacacagcagcggcagcagcaggctgcaacggagaaggggctcatccataccccagtttaccaattcccccacaatggtgatcatggtgggtttaccagctcgaggcaagacctatatctccacaaagctcacacgatatctcaactggataggaacaccaactaaagacaacatggaagccctgcaaatcaggaagcagtgcgccctggcagccctgaaggatgttcacaactatctcagccatgaggaaggtcatgttgcggtttttgatgccaccaacactaccagagaacgacggtcactgatcctgcagtttgcaaaagaacatggttacaagggtgtctgtgaggagatgacctatgaagaaatccaggaacattaccctgaagaatttgcactgcgagaccaagataaatatcgctaccgctatcccaagggagagtcctatgaggatctggttcagcgtctggagccagtgataatggagctagaacgacaggagaatgtactggtgatctgccaccaggctgtcatgcggtgcctcctggcctatttcctggataaaagttcagatgagcttccatatctcaagtgccctctgcacacagtgctcaaactcactcctgtggcttatggctgcaaagtggaatccatctacctgaatgtggaggccgtgaacacacaccgggagaagcctgagaatgtggacatcacccgggaacctgaggaagccctggatactgtcccagcccactactgagccctttccaagaagtcaaactgcctgtgtcctcatcgccttccacctttaggaaatgctatctttgctcttctcctactctgccttggcctcactgaggcaccccacttccagtgaagaagtcctccgcaactcccaaacaagcctcgcttgctggccgcaaccaaggagctatctagctctggaggaaactttctttcttaattcctattctctgacgaataaagacttactgcctacaagaggagaggaggaggtcatggcgaggc

SEQ ID NO: 102967 - DNA, 1929 bp, Homo sapiens
  Payload ID: 93
  Gene Symbol: PFKFB1
  Gene Name: 6-phosphofructo-2-kinase/fructose-2,6-biphosphatase 1
  Uniprot ID: P16118
  ENST ID: ENST00000375006
  CDS Start-End: 72-1487
gacagctagtaagataggaagtgaggccaggtaccttgtgggcagtgatgtcattcggtgcgactcctaagatgtctccagagatgggagagctcacccaaaccaggttgcagaagatctggattccacacagcagcggcagcagcaggctgcaacggagaaggggctcatccataccccagtttaccaattcccccacaatggtgatcatggtgggtttaccagctcgaggcaagacctatatctccacaaagctcacacgatatctcaactggataggaacaccaactaaagtgtttaatttaggccagtatcgacgagaggcagtgagctacaagaactatgaattctttcttccagacaacatggaagccctgcaaatcaggaagcagtgcgccctggcagccctgaaggatgttcacaactatctcagccatgaggaaggtcatgttgcggtttttgatgccaccaacactaccagagaacgacggtcactgatcctgcagtttgcaaaagaacatggttacaaggtgtttttcattgagtccatttgtaatgaccctggcataattgcagaaaacatcaggcaagtgaaacttggcagccctgattatatagactgtgaccgggaaaaggttctggaagactttctaaagagaattgagtgctatgaggtcaactaccaacccttggatgaggaactggacagccacctgtcctacatcaagatcttcgacgtgggcacacgctacatggtgaaccgagtgcaggatcacatccagagccgcacagtctactacctcatgaatatccatgtcacacctcgctccatctacctttgccgacatggcgagagtgaactcaacatcagaggccgcatcggaggtgactctggcctctcagttcgcggcaagcagtatgcctatgccctggccaacttcattcagtcccagggcatcagctccctgaaggtgtggaccagtcacatgaagaggaccatccagacagctgaggccctgggtgtcccctatgagcagtggaaggccctgaatgagattgatgcgggtgtctgtgaggagatgacctatgaagaaatccaggaacattaccctgaagaatttgcactgcgagaccaagataaatatcgctaccgctatcccaagggagagtcctatgaggatctggttcagcgtctggagccagtgataatggagctagaacgacaggagaatgtactggtgatctgccaccaggctgtcatgcggtgcctcctggcctatttcctggataaaagttcagatgagcttccatatctcaagtgccctctgcacacagtgctcaaactcactcctgtggcttatggctgcaaagtggaatccatctacctgaatgtggaggccgtgaacacacaccgggagaagcctgagaatgtggacatcacccgggaacctgaggaagccctggatactgtcccagcccactactgagccctttccaagaagtcaaactgcctgtgtcctcatcgccttccacctttaggaaatgctatctttgctcttctcctactctgccttggcctcactgaggcaccccacttccagtgaagaagtcctccgcaactcccaaacaagcctcgcttgctggccgcaaccaaggagctatctagctctggaggaaactttctttcttaattcctattctctgacgaataaagacttactgcctacaagaggagaggaggaggtcatggcgaggcttttccagttgttctcaaggtactgaccctaatcctgacccagctctgctgctgtgagggcatggaatgggtgaggatttcctggagggaaaagttctacagtagcacctccaaagatgggggagaagataggtgcctgtgagttcctgtgggccttgttccagcaaggtggc

SEQ ID NO: 102968 - DNA, 1591 bp, Homo sapiens
  Payload ID: 93
  Gene Symbol: PFKFB1
  Gene Name: 6-phosphofructo-2-kinase/fructose-2,6-biphosphatase 1
  Uniprot ID: P16118
  ENST ID: ENST00000545676
  CDS Start-End: 102-1322
gggaaccaacgaacacctccaggcttcctctttgatgccacccactggacctgccttgggggtctgtaaatgcaagagaaccgagtgttggataattagcgatggaagaaaaaacctctagaataaaagtgtttaatttaggccagtatcgacgagaggcagtgagctacaagaactatgaattctttcttccagacaacatggaagccctgcaaatcaggaagcagtgcgccctggcagccctgaaggatgttcacaactatctcagccatgaggaaggtcatgttgcggtttttgatgccaccaacactaccagagaacgacggtcactgatcctgcagtttgcaaaagaacatggttacaaggtgtttttcattgagtccatttgtaatgaccctggcataattgcagaaaacatcaggcaagtgaaacttggcagccctgattatatagactgtgaccgggaaaaggttctggaagactttctaaagagaattgagtgctatgaggtcaactaccaacccttggatgaggaactggacagccacctgtcctacatcaagatcttcgacgtgggcacacgctacatggtgaaccgagtgcaggatcacatccagagccgcacagtctactacctcatgaatatccatgtcacacctcgctccatctacctttgccgacatggcgagagtgaactcaacatcagaggccgcatcggaggtgactctggcctctcagttcgcggcaagcagtatgcctatgccctggccaacttcattcagtcccagggcatcagctccctgaaggtgtggaccagtcacatgaagaggaccatccagacagctgaggccctgggtgtcccctatgagcagtggaaggccctgaatgagattgatgcgggtgtctgtgaggagatgacctatgaagaaatccaggaacattaccctgaagaatttgcactgcgagaccaagataaatatcgctaccgctatcccaagggagagtcctatgaggatctggttcagcgtctggagccagtgataatggagctagaacgacaggagaatgtactggtgatctgccaccaggctgtcatgcggtgcctcctggcctatttcctggataaaagttcagatgagcttccatatctcaagtgccctctgcacacagtgctcaaactcactcctgtggcttatggctgcaaagtggaatccatctacctgaatgtggaggccgtgaacacacaccgggagaagcctgagaatgtggacatcacccgggaacctgaggaagccctggatactgtcccagcccactactgagccctttccaagaagtcaaactgcctgtgtcctcatcgccttccacctttaggaaatgctatctttgctcttctcctactctgccttggcctcactgaggcaccccacttccagtgaagaagtcctccgcaactcccaaacaagcctcgcttgctggccgcaaccaaggagctatctagctctggaggaaactttctttcttaattcctattctctgacgaataaagacttactgcctacaagaggagaggaggaggtcatggcgaggc

SEQ ID NO: 102969 - DNA, 1353 bp, Homo sapiens
  Payload ID: 93
  Gene Symbol: PFKFB1
  Gene Name: 6-phosphofructo-2-kinase/fructose-2,6-biphosphatase 1
  ENST ID: ENST00000614686
  CDS Start-End: 603-1337
ggtgcgactcctaagatgtctccagagatgggagagctcacccaaaccaggttgcagaagatctggattccacacagcagcggcagcagcaggctgcaacggagaaggggctcatccataccccagtttaccaattcccccacaatggtgatcatggtgggtttaccagctcgaggcaagacctatatctccacaaagctcacacgatatctcaactggataggaacaccaactaaaggcagtgcgccctggcagccctgaaggatgttcacaactatctcagccatgaggaaggtcatgttgcggtttttgatgccaccaacactaccagagaacgacggtcactgatcctgcagtttgcaaaagaacatggttacaaggtgtttttcattgagtccatttgtaatgaccctggcataattgcagaaaacatcaggcaagtgaaacttggcagccctgattatatagactgtgaccgggaaaaggttctggaagactttctaaagagaattgagtgctatgaggtcaactaccaacccttggatgaggaactggacagccacctgtcctacatcaagatcttcgacgtgggcacacgctacatggtgaaccgagtgcaggatcacatccagagccgcacagtctactacctcatgaatatccatgtcacacctcgctccatctacctttgccgacatggcgagagtgaactcaacatcagaggccgcatcggaggtgactctggcctctcagttcgcggcaagcagtatgcctatgccctggccaacttcattcagtcccagggcatcagctccctgaaggtgtggaccagtcacatgaagaggaccatccagacagctgaggccctgggtgtcccctatgagcagtggaaggccctgaatgagattgatgcgggtgtctgtgaggagatgacctatgaagaaatccaggaacattaccctgaagaatttgcactgcgagaccaagataaatatcgctaccgctatcccaagggagagtcctatgaggatctggttcagcgtctggagccagtgataatggagctagaacgacaggagaatgtactggtgatctgccaccaggctgtcatgcggtgcctcctggcctatttcctggataaaagttcagatgagcttccatatctcaagtgccctctgcacacagtgctcaaactcactcctgtggcttatggctgcaaagtggaatccatctacctgaatgtggaggccgtgaacacacaccgggagaagcctgagaatgtggacatcacccgggaacctgaggaagccctggatactgtcccagcccactactgagccctttccaagaagt

SEQ ID NO: 102970 - DNA, 3494 bp, Homo sapiens
  Payload ID: 94
  Gene Symbol: PFKFB2
  Gene Name: 6-phosphofructo-2-kinase/fructose-2,6-biphosphatase 2
  Uniprot ID: O60825
  ENST ID: ENST00000367079
  CDS Start-End: 74-1489
gttacagggcaggcgccggggccaaggcagggagggatcttaggagagatcgtaggacatctgaagagctgccatgtctggggcatcttcctcagaacagaacaacaacagctatgaaaccaaaaccccaaatcttcgaatgtcagagaagaaatgttcatgggcctcctacatgaccaactccccgactctgatcgttatgattggtttgccagcccggggtaaaacctacgtgtccaagaaactaacacgctacctcaactggattggagtccccaccaaagtgtttaatcttggggtgtatcggcgtgaagcagtcaagtcctataagtcctacgacttctttcggcatgacaatgaggaggccatgaagatccgcaaacagtgtgctctggtggcgctggaagatgttaaggcgtatctcactgaggagaatggtcagattgcggtgtttgatgccaccaatacaacccgggagaggagggacatgattttgaactttgctgaacagaattccttcaaggtattctttgtggaatccgtctgtgatgatcctgatgtcattgctgccaatattctggaggttaaggtatcaagccctgactatcctgaaaggaacagagagaacgtgatggaggacttcctgaagagaattgaatgctacaaagttacctaccgacctcttgacccagacaactatgacaaggatctttctttcatcaaggtgataaacgtgggccagcgatttttagtcaacagagtccaggactacatccagagcaagatagtctactacctcatgaatatccacgtccagcctcgcaccatttacctttgccggcatggagaaagcgagttcaatctcttggggaagattgggggtgactctggcctctcggtgcggggaaagcagtttgcccaagctctaaggaaatttctggaggaacaggaaataacagacctcaaagtgtggacaagccagttgaagaggaccatacagactgctgaatctctcggggtgccctatgagcagtggaagattctgaatgagattgatgctggtgtgtgtgaagagatgacctatgcagagattgagaaacggtacccagaagagtttgcacttcgagatcaagagaagtatctgtatcgatatcctggtggggagtcataccaggacctggtgcagcggctggagcctgtcatcatggagctggaacgtcagggcaatgtcctcgtcatctcccaccaggctgtcatgcgctgcctcctggcctacttcttggataagggcgcagatgagctaccatacttgagatgccctctccataccatcttcaaacttactcctgtggcctatgggtgcaaagtggaaacaattaaacttaacgtggaggctgtgaacacgcaccgtgacaagccaactgcagcagagaccacactggctgtgcgcagacgcccctccgcagcgtccctcatgttgccttgctaatgatgtggatgttcaggcctcacctctccaaacgactgggatctactgaaaagcttgggatgtcagcttcacagaggctagaacaggaagttaagtgggaactggactttgggggccaccaaaacgaggcctggagaaacgtcaccatatttcctcccctcctgcctaatgggaatatcagttacactgaaaaatttaacttccctgtgcctcaaaacatttagcaacctgaaccagtgactttttgtcatctctgtgctgagtttggtccaagttggtcaatctcattctgtataggcatttaacatcctacctgtgactgtctgcatcctttgctggctcttttttgcccaaagtgcaaatgcacttcttcagatttacttttcaagtgagaaggtaagagctggtctctgccactgttccaggcgagcaggctagagtctaatatacttatgctagcagttaccatttgccacattggaagcaagagacaaatcaccaggtgaatggagggtcttctgagaaattcagtccctaaaacatcttctctgccttgatagaagaacagtgtcagtggcaaccttttcatttagagaagtttttcttgttccaggcccttcaggacaggatctgactgcaagactccccaaaatgggtacccatcttctaagttcccttttgtagctactgtacttttgacttgatgcatgtgcctctcatgcatcaagatggggctgatgtggttctcctgggtggttgggaatgtggactagacagaaaagtagagtgccatttatatcacgtgagtaagtcaagaaagctccttgagaatcagcccgatcagggagtgttttggcttcagaacaggtggaaggagacacgcccctctgtgggctctgtcaccatgatacagtccttgagagagctgtggctgtgacttggagggcagtagtctcctgatacctgcctcttggccactggtcactattgtggtcactgatctctcatataaaagtgagggtggcggggtcatggaccagcgcctcagtgcattagtcattcgcttttccttacagacaaatcagataactcttccccagtgattgtcaaatgtatgaatgtatctctgtaaatgtggttttgacatgtcactgttactgaaggagagtatggaatccccacaggatattatatcttgcaaggaaagtctattttttaaagaatagtatgtttttagctttacttttctttcttttccttttcactcaaatgctcacttgctgggcaaaagggtgagtagcaagaaaagtaatgatatgtagcttttctcaaatggttcttttatactgtggatgatacaggactctgttacctaagatgtgataagctgggctgcaggcggttcagcatccagcaactaggagctgcttttctacgtacaaagctgccttcaggaaggctccttaccctgtagcagatgattttcatctggctgcctaccgcatgctgtactataatgatttagttgtgatatggatttctctctgcatcgaaaactgtcttttgatgatcagacaatgtttatatttagttatttattctatccatgtaaggcatttttgagttttcttgtcactgtttgcatgtatttaatcagaatgtaatataatttatgttgtcaggtttttttttgtttgtttgtttggggttttttttgtagaaatttaggtagttagagcttttaagtctaatgtcatattaacttaagttaaatttccagaacgtagatatctgtcttctgtaaaaggaaaataacgatgttaagggacagtgaattttttttgaatactttgtttctcattgatttttattgtaagtgtaaaccaagagatgcatttctctggagaagtgtttatctcctggattaataaaatcatgctaaaatatgcgagtaatatgtattgcttttgtaataagaacataaaataaaattatttttaattaa

SEQ ID NO: 102971 - DNA, 7094 bp, Homo sapiens
  Payload ID: 94
  Gene Symbol: PFKFB2
  Gene Name: 6-phosphofructo-2-kinase/fructose-2,6-biphosphatase 2
  Uniprot ID: O60825
  ENST ID: ENST00000367080
  CDS Start-End: 125-1642
ggcgactgtagcgccggtcccggccacaagctgtcggctcggttcggtcgcgttacagggcaggcgccggggccaaggcagggagggatcttaggagagatcgtaggacatctgaagagctgccatgtctggggcatcttcctcagaacagaacaacaacagctatgaaaccaaaaccccaaatcttcgaatgtcagagaagaaatgttcatgggcctcctacatgaccaactccccgactctgatcgttatgattggtttgccagcccggggtaaaacctacgtgtccaagaaactaacacgctacctcaactggattggagtccccaccaaagtgtttaatcttggggtgtatcggcgtgaagcagtcaagtcctataagtcctacgacttctttcggcatgacaatgaggaggccatgaagatccgcaaacagtgtgctctggtggcgctggaagatgttaaggcgtatctcactgaggagaatggtcagattgcggtgtttgatgccaccaatacaacccgggagaggagggacatgattttgaactttgctgaacagaattccttcaaggtattctttgtggaatccgtctgtgatgatcctgatgtcattgctgccaatattctggaggttaaggtatcaagccctgactatcctgaaaggaacagagagaacgtgatggaggacttcctgaagagaattgaatgctacaaagttacctaccgacctcttgacccagacaactatgacaaggatctttctttcatcaaggtgataaacgtgggccagcgatttttagtcaacagagtccaggactacatccagagcaagatagtctactacctcatgaatatccacgtccagcctcgcaccatttacctttgccggcatggagaaagcgagttcaatctcttggggaagattgggggtgactctggcctctcggtgcggggaaagcagtttgcccaagctctaaggaaatttctggaggaacaggaaataacagacctcaaagtgtggacaagccagttgaagaggaccatacagactgctgaatctctcggggtgccctatgagcagtggaagattctgaatgagattgatgctggtgtgtgtgaagagatgacctatgcagagattgagaaacggtacccagaagagtttgcacttcgagatcaagagaagtatctgtatcgatatcctggtggggagtcataccaggacctggtgcagcggctggagcctgtcatcatggagctggaacgtcagggcaatgtcctcgtcatctcccaccaggctgtcatgcgctgcctcctggcctacttcttggataagggcgcagatgagctaccatacttgagatgccctctccataccatcttcaaacttactcctgtggcctatgggtgcaaagtggaaacaattaaacttaacgtggaggctgtgaacacgcaccgtgacaagccaactaacaacttccccaagaaccaaacccctgtaaggatgagaaggaacagctttacgcctctgtccagttcgaatacaataaggcgtccaagaaattacagtgttgggagccggcccctcaagcccctcagccctctccgtgcccaggacatgcaagaaggggccgactagccgaagacccaagtcagcattccggtggtgtaactgtgtgtttccctccagccctggcctcctgcccttgtcactaatcaccaaggagtcattaacttcctccctctatgcccacccctgacacttcaccattaatcttaacacagaacatgaggttatgtgtttataggacaacttaagctgttcttcagtttgaaacatcttttcacccaggggcaagttagcaaattgagtcttttaggacagattctcagatgggatgatctggaggaggaggaaaaagatacactcccttggggctgagcatgccccacactcttggatcttctctctgttccctggtgtcttcactaatgtcctcatgttggtgaagtgttgggggatggagggcgggtgagcagtcgggggacaaaaagtctatttttccttcacttttgtctcttcaatgtgtgttttcctcacactccttacttgactgctttcttcccccactttcatgtcccctctggattgtccagtgtaatgcatggcattgtggtgtctgtctaggaaggaaggggtgattgacaagagacaagtctggcccagttaatgctttctgcagtgggtctaaatggatctggactggaggagtctttcctttcctttctcccttcctctccagccaggtcctgtaagggccagcccagactacaggacatccacagaatattctggagcttgcaagtagacatagggtgagagttcttgcctcctttcatgagaaacagttctaagtcttcgatgccctgggagaatctggctctgagcatgtgggaaatgtcttggtttttatttttaatttagagtcaggcctgggtcttttgaggtctgcagagtggggtttaggagagtagggtgggctctagctcttgcagggctcttagagagcagtcatgtcttttctcccatgactctcaggttctttgccaatcacagcaacttttcctgccaaagccagtatcctctggggctgtttagaagggcagttagattcaggagtcaccactgatgtttgagttgctcaaggcaagaggcagagaagagttcactaaaactgcttatttttgaataatttcagcacactgtccttaagaagaaagaaacatcaaaacaaaatagtttttacatgaccatttttttcccaaatgtggaaaagcttgatgatgaatttaatctctctcattggagtattcttttgttcataaagagaaactatctcatcttgatgtccagagaagtccttggaaccctgtgggatctagctcgtaactgtttgtatttctctattcacttctgtcatttcattttctttgtagggttaaacagaaaatgtttagggaagaaattcttagccccttgatgaccatgatggcttattctctttcccaattttgcatgcaaaatgtacgaatatatgtatgtttttctgagaggcaagtttagggttctcatgggattttaaaaagagataggtgactccccaccttaaagttatctgctggtcttttagaggtaaccagtgagaaggagttagctattttccaagggtgttttcatttggtaatggaagactttttgctgtggttctcatccaggagtattccttagaattgcctttaggattgttgaatcataaacatgcctgtgtccaccttatgcttaatactgactcagaatctctgggatctgggtctggacatgcatgtatttaagtagcttcccggatgattctgattcatagctcgggttaagaactccaccttaggaagttaggtggaaaaatactggatagtagtttctcagacaaaagtgtcagcctaggaattctgaattcctcatagtcctgaaaggacagttctttgggtttgatgtttgagcagatcataatgttaaatgatataaccccctggaaggcaggctgctgtgttttagagggttattctaggttctagtcccatctttaaccctttacattgctgagtgatgtggaacaaatcactgaattaaataattgtctctagagagcagctggggattttaagcaccctggagagaggtgcagaccctgccaggatgataaaggttgtcatcactggcaactgactcctgaccccgggtcctttactcgtatgtcccaagtaggataccataggcagcttctaaaggctgcttacctagattcttctcaaaattgtgtccaagatgttaagtaacctgctattcctgtttagtggttacataacatgtacttagtgtctttgtggagctttgggctggtaggggcagggataggggaaagctaaacagaagtagaagaaaaggtccttgtccagaggaaggttattttaagagacaggacatgtaatttataacaaatggacatttgcaatatagcaacagtctgagtctagaagtgttcaaccatcacatcgcttctcctgacttttctgttgtcctatggctatgagactacaggggttgggggatggggatgcccccaccaccaccagtgtgagaatgagatatggttggggaggcgtgtttggcacttttacaaggttgcattgtccacatttgcttggatggtggcatctgtagcccaaatgggcattcagtcttttcttctgctgtgaggtaagagtaattcagacctaatgaatgagaagagggagcactttgatccacagactttggattaacactgtacccactcttagcaaaaggggacttctctaacaagctagcattgtgttaacctgtcattaacccagcattagagacaggtcactgggatgttcattctggctctcagcctgctgttatttccccactctcacctgtgctagttcgctttctccagaagaggagctgaggtggtcttatcctcagataggacatgagaaattggaatttggcaagcaagggcttcagcatcctttagtttctaaagcaagatcccttcagagaagtctagcaggaagaagccaggagaatgtagaatggaaaagagctcttactccaaattttagagaagtttcagctctacttctcatcttttctctcctggtcttacttgaatgcatgttggtaatctgtatacattactatgactgtgtctatcacaagtcctacaaaataaaaatggacttaaaagtactctctgctgaggctgtaagttttgttttgtgagaaataggtaaagacattagcatttaatctactggaataagctggttgctgtggcttatacctgtagtcccagatacttgggaggctgaggcaggagaatcacttgagaccagcctgggcaatatagtgagacctcacctctaaaaaagttttttataaatttacttgtctaaagtggggaaagggaaattattctgttttcttattcttgcttcaagactatgacagatttgaaagagaattctaaagcagatttagagaacctgcttctcttcttatctcctaatccctaaattgtaatttagctcttatctgtattgttgttttgttttggtaaagggatgatttttacattgagttttaaagtagaataagaaaagcttctaaaaacttgcattgtgctagggatctgccctatatctttgcctctggtgtttcgttgttgttgttattgtttgtttgtttccaaagaagttggagttaaggacacaatatatttgtacccctagactgaatgggtgagtattccatatgaggatctgggtaatcctctttgcaacccacatttggtcttcagagacactggcattttgaagaaacatatgatatagctgtttggaaataaattcatctatgttactttttttttcttttttttttttttttatgagcaggagatcttaattgacagaaactcattggtggttggagtggccaatgggcacgggaaaaagtatccagtaatcagaagaattgtatctgggttatgtaatcttatgcacattccattgtctttgccaagcccagaagccatgttgtgttcattgttaagaaatttgatagatttacccagcttttctatgtattttgacttattgaaaatatgtaacaactgagtcgggttgcagcactggtggggtagaatcgactttccctgaaggtgacacagatgtcagaattgtgtccagggatttaatttagacccatactgtccaggagactgtctctagttggatctctgtgctgactgactgacagacagactttagtgtctgtgtgctgactgacagactctagtagtgtctatatgttgaccaactggtagaccaggaggatctgtgtgctgattgactctagtaggatctgtttgtcactgacagactgtagtagtgtctgtgtgctgactgatagatagactatagtaaaatttgggtgttgcctgactaacggtctagggtctgtaagctgacagtctgcctgctttctgattgtatccattgaagtgtatgtacattatggtaattctctgtctattaaatgtgtctaacaaaggaaggaattaagcactccacgtgttttctttataggggagttctgtacactatgattttaaatagatatttcttatatagtagtggccaaattctcattattttgtacaagataaaggttatgcatcacttttatggtattttgtgaactcagctaagggaatgcctgttcagagcctggagttgttacctttacttgaagtcatctcatccagtcccctgctttagggcaggacttcagttccactgttcatttctgaagcttctgtgtccccagcttaccctgttctgaaatgttgtattccattggacagggctgctatttttagtcagccatgcatttggattttacacttaatctagtaagtaaaaatgagaagaaaatttggcatttaaaaattgattttaagggttggcaaaagtattttttccagtaagcctttcactggatatctgtgaccaatgtttacctacgcaatgtttttgtatctgaattgcttatgtacgttttttattatattgacctaacaagaagatcaacttatgctggtatggtgatggttttgctatggcaaaatcaaagggctgatcatacatggtgccctttgggaagggggatggtgtggggctgagcacctctgggttgaatgggaatgggtcagattgggaagcctaggaagagagttctactgtagatttcctaggcactgctctgttgaaataggaacataagtctttagcaacattctgatttaatcgggtgacactgataacaaagtatgccactcagatccatttaaagtgtgcataactgtatttgaaatgtgtttttgtgtgcgtgtgtgtagaatgggtaaataaaattgttgagtaacttgaacctatcagaa

SEQ ID NO: 102972 - DNA, 1876 bp, Homo sapiens
  Payload ID: 94
  Gene Symbol: PFKFB2
  Gene Name: 6-phosphofructo-2-kinase/fructose-2,6-biphosphatase 2
  ENST ID: ENST00000411990
  CDS Start-End: 273-563
agtgcaaccagagtcacacccatggatgaagtcaatgaagttgatccagctccatagcctccaagacggccatcaaacctgtttttcaccacattttacagtattgcctcactatagaagtctggatcgcttgctacaatttgtgctatgaggcgtctcatctcaggggcacaagctggattcaagactcctccttcgacgacatagtacacactagtaaagaggcaagagttgtctgctgggaccacggttctgacatctgaagagctgccatgtctggggcatcttcctcagaacagaacaacaacagctatgaaaccaaaaccccaaatcttcgaatgtcagagaagaaatgttcatgggcctcctacatgaccaactccccgactctgatcgttatgattggtttgccagcccggggtaaaacctacgtgtccaagaaactaacacgctacctcaactggattggagtccccaccaaaggccaagaaacaagtcccatttggtggggccatcatattattttgctgctgaaggatttgggtgtcttctacagtgtttaatcttggggtgtatcggcgtgaagcagtcaagtcctataagtcctacgacttctttcggcatgacaatgaggaggccatgaagatccgcaaacagtgtgctctggtggcgctggaagatgttaaggcgtatctcactgaggagaatggtcagattgcggtgtttgatgccaccaatacaacccgggagaggagggacatgattttgaactttgctgaacagaattccttcaaggtattctttgtggaatccgtctgtgatgatcctgatgtcattgctgccaatattctggaggttaaggtatcaagccctgactatcctgaaaggaacagagagaacgtgatggaggacttcctgaagagaattgaatgctacaaagttacctaccgacctcttgacccagacaactatgacaaggatctttctttcatcaaggtgataaacgtgggccagcgatttttagtcaacagagtccaggactacatccagagcaagatagtctactacctcatgaatatccacgtccagcctcgcaccatttacctttgccggcatggagaaagcgagttcaatctcttggggaagattgggggtgactctggcctctcggtgcggggaaagcagtttgcccaagctctaaggaaatttctggaggaacaggaaataacagacctcaaagtgtggacaagccagttgaagaggaccatacagactgctgaatctctcggggtgccctatgagcagtggaagattctgaatgagattgatgctggtgtgtgtgaagagatgacctatgcagagattgagaaacggtacccagaagagtttgcacttcgagatcaagagaagtatctgtatcgatatcctggtggggagtcataccaggacctggtgcagcggctggagcctgtcatcatggagctggaacgtcagggcaatgtcctcgtcatctcccaccaggctgtcatgcgctgcctcctggcctacttcttggataagggcgcagatgagctaccatacttgagatgccctctccataccatcttcaaacttactcctgtggcctatgggtgcaaagtggaaacaattaaacttaacgtggaggctgtgaacacgcaccgtgacaagccaactgcagcagagaccacactggctgtgcgcagacgcccctccgcagcgtccctcatgttgccttgctaatgatgtggatgttcaggcctcacctctccaaacgactgggatctactgaaaagcttgggatgtcagcttcacagaggctagaacaggaagttaagtgggaactggactttggggg

SEQ ID NO: 102973 - DNA, 543 bp, Homo sapiens
  Payload ID: 94
  Gene Symbol: PFKFB2
  Gene Name: 6-phosphofructo-2-kinase/fructose-2,6-biphosphatase 2
  ENST ID: ENST00000545806
  CDS Start-End: 169-543
gatgtcataatactaacaaaacaggaagggcatctccaaatcagcagttcagtgcaaccagagtcacacccatggatgaagtcaatgaagttgatccagctccatagcctccaagacggccatcaaacctgtttttcaccacattttacagacatctgaagagctgccatgtctggggcatcttcctcagaacagaacaacaacagctatgaaaccaaaaccccaaatcttcgaatgtcagagaagaaatgttcatgggcctcctacatgaccaactccccgactctgatcgttatgattggtttgccagcccggggtaaaacctacgtgtccaagaaactaacacgctacctcaactggattggagtccccaccaaagtgtttaatcttggggtgtatcggcgtgaagcagtcaagtcctataagtcctacgacttctttcggcatgacaatgaggaggccatgaagatccgcaaacagtgtgctctggtggcgctggaagatgttaaggcgtatctcactgaggagaatggtcagattgcg

SEQ ID NO: 102974 - DNA, 523 bp, Homo sapiens
  Payload ID: 94
  Gene Symbol: PFKFB2
  Gene Name: 6-phosphofructo-2-kinase/fructose-2,6-biphosphatase 2
  ENST ID: ENST00000464777
  CDS Start-End: 110-244
ggtcccggccacaagctgtcggctcggttcggtcgcgttacagggcaggcgccggggccaaggcagggagggatcttaggagagatcgtaggacatctgaagagctgccatgtctggggcatcttcctcagaacagaacaacaacagctatgaaaccaaaaccccaaatcttcgaatgtcagagaagaaatgttgctggagtgcagtgacgggatcatggctcactgcaaccttgaactcctgagctcaagcaatcctcctgagtagctgggactatagcatgggcctcctacatgaccaactccccgactctgatcgttatgattggtttgccagcccggggtaaaacctacgtgtccaagaaactaacacgctacctcaactggattggagtccccaccaaagtgtttaatcttggggtgtatcggcgtgaagcagtcaagtcctataagtcctacgacttctttcggcatgacaatgaggaggccatgaagatccgcaatgtgctctggtggcgctggaa

SEQ ID NO: 102975 - DNA, 554 bp, Homo sapiens
  Payload ID: 94
  Gene Symbol: PFKFB2
  Gene Name: 6-phosphofructo-2-kinase/fructose-2,6-biphosphatase 2
  ENST ID: ENST00000618513
  CDS Start-End: 408-554
agtgcaaccagagtcacacccatggatgaagtcaatgaagttgatccagctccatagaaatataccaagtctctaacattccaagagagttggaaaggaggcctggactacagaaaagggaggatttccaaagtcagtcaaaagcctgaaagaataagacttcctggttgatataggtcatcatttgaggggcctccaagacggccatcaaacctgtttttcaccacattttacagtattgcctcactatagaagtctggatcgcttgctacaatttgtgctatgaggcgtctcatctcaggggcacaagctggattcaagactcctccttcgacgacatagtacacactagtaaagaggcaagagttgtctgctgggaccacggttctgacatctgaagagctgccatgtctggggcatcttcctcagaacagaacaacaacagctatgaaaccaaaaccccaaatcttcgaatgtcagagaagaaatgttcatgggcctcctacatgaccaactccccgactctgatcgttatgattggtttgccagcccgg

SEQ ID NO: 102976 - DNA, 1964 bp, Homo sapiens
  Payload ID: 95
  Gene Symbol: PFKFB3
  Gene Name: 6-phosphofructo-2-kinase/fructose-2,6-biphosphatase 3
  Uniprot ID: Q16875
  ENST ID: ENST00000360521
  CDS Start-End: 362-1906
tctttaaaagccggcggtgcgcggggcatcccagccaagccggagaggaggcgagcagcagggcctggtggcgagagcgcggctgtcactgcgcccgagcatcccagagctttccgagcggacgagccggccgtgccgggcatccccagcctcgctaccctcgcagcacacgtcgagccccgcacaggcgagggtccggaacttagcccaaagcacgtttcccctggcagcgcaggaaacgcccggccgcgcgccggcgcacgcccccctctcctcctttgttccgggggtcggcggccgctctcctgccagcgtcgggatctcggccccgggaggcgggccgtcgggcgcagccgcgaagatgccgttggaactgacgcagagccgagtgcagaagatctgggtgcccgtggaccacaggccctcgttgcccagatcctgtgggccaaagctgaccaactcccccaccgtcatcgtcatggtgggcctccccgcccggggcaagacctacatctccaagaagctgactcgctacctcaactggattggcgtccccacaaaagtgttcaacgtcggggagtatcgccgggaggctgtgaagcagtacagctcctacaacttcttccgccccgacaatgaggaagccatgaaagtccggaagcaatgtgccttagctgccttgagagatgtcaaaagctacctggcgaaagaagggggacaaattgcggttttcgatgccaccaatactactagagagaggagacacatgatccttcattttgccaaagaaaatgactttaaggcgtttttcatcgagtcggtgtgcgacgaccctacagttgtggcctccaatatcatggaagttaaaatctccagcccggattacaaagactgcaactcggcagaagccatggacgacttcatgaagaggatcagttgctatgaagccagctaccagcccctcgaccccgacaaatgcgacagggacttgtcgctgatcaaggtgattgacgtgggccggaggttcctggtgaaccgggtgcaggaccacatccagagccgcatcgtgtactacctgatgaacatccacgtgcagccgcgtaccatctacctgtgccggcacggcgagaacgagcacaacctccagggccgcatcgggggcgactcaggcctgtccagccggggcaagaagtttgccagtgctctgagcaagttcgtggaggagcagaacctgaaggacctgcgcgtgtggaccagccagctgaagagcaccatccagacggccgaggcgctgcggctgccctacgagcagtggaaggcgctcaatgagatcgacgcgggcgtctgtgaggagctgacctacgaggagatcagggacacctaccctgaggagtatgcgctgcgggagcaggacaagtactattaccgctaccccaccggggagtcctaccaggacctggtccagcgcttggagccagtgatcatggagctggagcggcaggagaatgtgctggtcatctgccaccaggccgtcctgcgctgcctgcttgcctacttcctggataagagtgcagaggagatgccctacctgaaatgccctcttcacaccgtcctgaaactgacgcctgtcgcttatggctgccgtgtggaatccatctacctgaacgtggagtccgtctgcacacaccgggagaggtcagaggatgcaaagaagggacctaacccgctcatgagacgcaatagtgtcaccccgctagccagccccgaacccaccaaaaagcctcgcatcaacagctttgaggagcatgtggcctccacctcggccgccctgcccagctgcctgcccccggaggtgcccacgcagctgcctggacaacctttgctagggcaagcctgtctaacatgaaaggctcccggagcagcgctgactcctccaggaaacactgaggcagacgtgtcggttc

SEQ ID NO: 102977 - DNA, 4483 bp, Homo sapiens
  Payload ID: 95
  Gene Symbol: PFKFB3
  Gene Name: 6-phosphofructo-2-kinase/fructose-2,6-biphosphatase 3
  Uniprot ID: Q16875
  ENST ID: ENST00000379775
  CDS Start-End: 331-1893
cagccaagccggagaggaggcgagcagcagggcctggtggcgagagcgcggctgtcactgcgcccgagcatcccagagctttccgagcggacgagccggccgtgccgggcatccccagcctcgctaccctcgcagcacacgtcgagccccgcacaggcgagggtccggaacttagcccaaagcacgtttcccctggcagcgcaggaaacgcccggccgcgcgccggcgcacgcccccctctcctcctttgttccgggggtcggcggccgctctcctgccagcgtcgggatctcggccccgggaggcgggccgtcgggcgcagccgcgaagatgccgttggaactgacgcagagccgagtgcagaagatctgggtgcccgtggaccacaggccctcgttgcccagatcctgtgggccaaagctgaccaactcccccaccgtcatcgtcatggtgggcctccccgcccggggcaagacctacatctccaagaagctgactcgctacctcaactggattggcgtccccacaaaagtgttcaacgtcggggagtatcgccgggaggctgtgaagcagtacagctcctacaacttcttccgccccgacaatgaggaagccatgaaagtccggaagcaatgtgccttagctgccttgagagatgtcaaaagctacctggcgaaagaagggggacaaattgcggttttcgatgccaccaatactactagagagaggagacacatgatccttcattttgccaaagaaaatgactttaaggcgtttttcatcgagtcggtgtgcgacgaccctacagttgtggcctccaatatcatggaagttaaaatctccagcccggattacaaagactgcaactcggcagaagccatggacgacttcatgaagaggatcagttgctatgaagccagctaccagcccctcgaccccgacaaatgcgacagggacttgtcgctgatcaaggtgattgacgtgggccggaggttcctggtgaaccgggtgcaggaccacatccagagccgcatcgtgtactacctgatgaacatccacgtgcagccgcgtaccatctacctgtgccggcacggcgagaacgagcacaacctccagggccgcatcgggggcgactcaggcctgtccagccggggcaagaagtttgccagtgctctgagcaagttcgtggaggagcagaacctgaaggacctgcgcgtgtggaccagccagctgaagagcaccatccagacggccgaggcgctgcggctgccctacgagcagtggaaggcgctcaatgagatcgacgcgggcgtctgtgaggagctgacctacgaggagatcagggacacctaccctgaggagtatgcgctgcgggagcaggacaagtactattaccgctaccccaccggggagtcctaccaggacctggtccagcgcttggagccagtgatcatggagctggagcggcaggagaatgtgctggtcatctgccaccaggccgtcctgcgctgcctgcttgcctacttcctggataagagtgcagaggagatgccctacctgaaatgccctcttcacaccgtcctgaaactgacgcctgtcgcttatggctgccgtgtggaatccatctacctgaacgtggagtccgtctgcacacaccgggagaggtcagaggatgcaaagaagggacctaacccgctcatgagacgcaatagtgtcaccccgctagccagccccgaacccaccaaaaagcctcgcatcaacagctttgaggagcatgtggcctccacctcggccgccctgcccagctgcctgcccccggaggtgcccacgcagctgcctggacaaaacatgaaaggctcccggagcagcgctgactcctccaggaaacactgaggcagacgtgtcggttccattccatttccatttctgcagcttagcttgtgtcctgccctccgcccgaggcaaaacgtatcctgaggacttcttccggagagggtggggtggagcagcgggggagccttggccgaagagaaccatgcttggcaccgtctgtgtcccctcggccgctggacaccagaaagccacgtgggtccctggcgccctgcctttagccgtggggcccccacctccactctctgggtttcctaggaatgtccagcctcggagaccttcacaaagccttgggagggtgatgagtgctggtcctgacaggaggccgctggggacactgtgctgttttgtttcgtttctgtgatctcccggcacgtttggagctgggaagaccacactggtggcagaatcctaaaattaaaggaggcaggctcctagttgctgaaagttaaggaatgtgtaaaacctccacgtgactgtttggtgcatcttgacctgggaagacgcctcatgggaacgaacttggacaggtgttgggttgaggcctcttctgcaggaagtccctgagctgagacgcaagttggctgggtggtccgcaccctggctctcctgcaggtccacacaccttccaggcctgtggcctgcctccaaagatgtgcaagggcaggctggctgcacggggagagggaagtattttgccgaaatatgagaactggggcctcctgctcccagggagctccagggcccctctctcctcccacctggacttggggggaactgagaaacactttcctggagctgctggcttttgcacttttttgatggcagaagtgtgacctgagagtcccaccttctcttcaggaacgtagatgttggggtgtcttgccctggggggcttggaacctctgaaggtggggagcggaacacctggcatccttccccagcacttgcattaccgtccctgctcttcccaggtggggacagtggcccaagcaaggcctcactcgcagccacttcttcaagagctgcctgcacactgtcttggagcatctgccttgtgcctggcactctgccggtgccttgggaaggtcggaagagtggactttgtcctggccttcccttcatggcgtctatgacacttttgtggtgatggaaagcatgggacctgtcgtctcagcctgttggtttctcctcattgcctcaaaccctggggtaggtgggacggggggtctcgtgcccagatgaaaccatttggaaactcggcagcagagtttgtccaaatgacccttttcaggatgtctcaaagcttgtgccaaaggtcacttttctttcctgccttctgctgtgagccctgagatcctcctcccagctcaagggacaggtcctgggtgagggtgggagatttagacacctgaaactgggcgtggagagaagagccgttgctgtttgttttttgggaagagcttttaaagaatgcatgtttttttcctggttggaattgagtaggaactgaggctgtgcttcaggtatggtacaatcaagtgggggattttcatgctgaaccattcaagccctccccgcccgttgcacccactttggctggcgtctgctggagaggatgtctctgtccgcattcccgtgcagctccaggctcgcgcagttttctctctctccctggatgttgagtctcatcagaatatgtgggtagggggtggacgtgcacgggtgcatgattgtgcttaacttggttgtatttttcgatttgacatggaaggcctgttgctttgctcttgagaatagtttctcgtgtccccctcgcaggcctcattctttgaacatcgactctgaagtttgatacagataggggcttgatagctgtggtcccctctcccctctgactacctaaaatcaatacctaaatacagaagccttggtctaacacgggacttttagtttgcgaagggcctagatagggagagaggtaacatgaatctggacagggagggagatactatagaaaggagaacactgcctactttgcaagccagtgacctgccttttgaggggacattggacgggggccgggggcgggggttgggtttgagctacagtcatgaacttttggcgtctactgattcctccaactctccaccccacaaaataacggggaccaatatttttaactttgcctatttgtttttgggtgagtttcccccctccttattctgtcctgagaccacgggcaaagctcttcattttgagagagaagaaaaactgtttggaaccacaccaatgatatttttctttgtaatacttgaaatttatttttttattattttgatagcagatgtgctatttatttatttaatatgtataaggagcctaaacaatagaaagctgtagagattgggtttcattgttaattggtttgggagcctcctatgtgtgacttatgacttctctgtgttctgtgtatttgtctgaattaatgacctgggatataaagctatgctagctttcaaacaggagatgcctttcagaaatttgtatattttgcagttgccagaccaataaaatacctggttgaaataca

SEQ ID NO: 102978 - DNA, 1999 bp, Homo sapiens
  Payload ID: 95
  Gene Symbol: PFKFB3
  Gene Name: 6-phosphofructo-2-kinase/fructose-2,6-biphosphatase 3
  ENST ID: ENST00000317350
  CDS Start-End: 396-1937
gaggctgacgtacgcgtctgcggccagcccggactctttaaaagccggcggtgcgcggggcatcccagccaagccggagaggaggcgagcagcagggcctggtggcgagagcgcggctgtcactgcgcccgagcatcccagagctttccgagcggacgagccggccgtgccgggcatccccagcctcgctaccctcgcagcacacgtcgagccccgcacaggcgagggtccggaacttagcccaaagcacgtttcccctggcagcgcaggaaacgcccggccgcgcgccggcgcacgcccccctctcctcctttgttccgggggtcggcggccgctctcctgccagcgtcgggatctcggccccgggaggcgggccgtcgggcgcagccgcgaagatgccgttggaactgacgcagagccgagtgcagaagatctgggtgcccgtggaccacaggccctcgttgcccagatcctgtgggccaaagctgaccaactcccccaccgtcatcgtcatggtgggcctccccgcccggggcaagacctacatctccaagaagctgactcgctacctcaactggattggcgtccccacaaaagtgttcaacgtcggggagtatcgccgggaggctgtgaagcagtacagctcctacaacttcttccgccccgacaatgaggaagccatgaaagtccggaagcaatgtgccttagctgccttgagagatgtcaaaagctacctggcgaaagaagggggacaaattgcggttttcgatgccaccaatactactagagagaggagacacatgatccttcattttgccaaagaaaatgactttaaggcgtttttcatcgagtcggtgtgcgacgaccctacagttgtggcctccaatatcatggaagttaaaatctccagcccggattacaaagactgcaactcggcagaagccatggacgacttcatgaagaggatcagttgctatgaagccagctaccagcccctcgaccccgacaaatgcgacagggacttgtcgctgatcaaggtgattgacgtgggccggaggttcctggtgaaccgggtgcaggaccacatccagagccgcatcgtgtactacctgatgaacatccacgtgcagccgcgtaccatctacctgtgccggcacggcgagaacgagcacaacctccagggccgcatcgggggcgactcaggcctgtccagccggggcaagaagtttgccagtgctctgagcaagttcgtggaggagcagaacctgaaggacctgcgcgtgtggaccagccagctgaagagcaccatccagacggccgaggcgctgcggctgccctacgagcagtggaaggcgctcaatgagatcgacgcgggcgtctgtgaggagctgacctacgaggagatcagggacacctaccctgaggagtatgcgctgcgggagcaggacaagtactattaccgctaccccaccggggagtcctaccaggacctggtccagcgcttggagccagtgatcatggagctggagcggcaggagaatgtgctggtcatctgccaccaggccgtcctgcgctgcctgcttgcctacttcctggataagagtgcagaggagatgccctacctgaaatgccctcttcacaccgtcctgaaactgacgcctgtcgcttatggctgccgtgtggaatccatctacctgaacgtggagtccgtctgcacacaccgggagaggtcagaggatgcaaagaagggacctaacccgctcatgagacgcaatagtgtcaccccgctagccagccccgaacccaccaaaaagcctcgcatcaacagctttgaggagcatgtggcctccacctcggccgccctgcccagctgcctgcccccggaggtgcccacgcagctgcctggacaacctttgctagggcaagcctgtctgtaagtatctctccgatcatcgctgctgcttgcactgctttcttcctgcttgctcatttggcctcc

SEQ ID NO: 102979 - DNA, 2181 bp, Homo sapiens
  Payload ID: 95
  Gene Symbol: PFKFB3
  Gene Name: 6-phosphofructo-2-kinase/fructose-2,6-biphosphatase 3
  ENST ID: ENST00000379785
  CDS Start-End: 396-1976
gaggctgacgtacgcgtctgcggccagcccggactctttaaaagccggcggtgcgcggggcatcccagccaagccggagaggaggcgagcagcagggcctggtggcgagagcgcggctgtcactgcgcccgagcatcccagagctttccgagcggacgagccggccgtgccgggcatccccagcctcgctaccctcgcagcacacgtcgagccccgcacaggcgagggtccggaacttagcccaaagcacgtttcccctggcagcgcaggaaacgcccggccgcgcgccggcgcacgcccccctctcctcctttgttccgggggtcggcggccgctctcctgccagcgtcgggatctcggccccgggaggcgggccgtcgggcgcagccgcgaagatgccgttggaactgacgcagagccgagtgcagaagatctgggtgcccgtggaccacaggccctcgttgcccagatcctgtgggccaaagctgaccaactcccccaccgtcatcgtcatggtgggcctccccgcccggggcaagacctacatctccaagaagctgactcgctacctcaactggattggcgtccccacaaaagtgttcaacgtcggggagtatcgccgggaggctgtgaagcagtacagctcctacaacttcttccgccccgacaatgaggaagccatgaaagtccggaagcaatgtgccttagctgccttgagagatgtcaaaagctacctggcgaaagaagggggacaaattgcggttttcgatgccaccaatactactagagagaggagacacatgatccttcattttgccaaagaaaatgactttaaggcgtttttcatcgagtcggtgtgcgacgaccctacagttgtggcctccaatatcatggaagttaaaatctccagcccggattacaaagactgcaactcggcagaagccatggacgacttcatgaagaggatcagttgctatgaagccagctaccagcccctcgaccccgacaaatgcgacagggacttgtcgctgatcaaggtgattgacgtgggccggaggttcctggtgaaccgggtgcaggaccacatccagagccgcatcgtgtactacctgatgaacatccacgtgcagccgcgtaccatctacctgtgccggcacggcgagaacgagcacaacctccagggccgcatcgggggcgactcaggcctgtccagccggggcaagaagtttgccagtgctctgagcaagttcgtggaggagcagaacctgaaggacctgcgcgtgtggaccagccagctgaagagcaccatccagacggccgaggcgctgcggctgccctacgagcagtggaaggcgctcaatgagatcgacgcgggcgtctgtgaggagctgacctacgaggagatcagggacacctaccctgaggagtatgcgctgcgggagcaggacaagtactattaccgctaccccaccggggagtcctaccaggacctggtccagcgcttggagccagtgatcatggagctggagcggcaggagaatgtgctggtcatctgccaccaggccgtcctgcgctgcctgcttgcctacttcctggataagagtgcagaggagatgccctacctgaaatgccctcttcacaccgtcctgaaactgacgcctgtcgcttatggctgccgtgtggaatccatctacctgaacgtggagtccgtctgcacacaccgggagaggtcagaggatgcaaagaagggacctaacccgctcatgagacgcaatagtgtcaccccgctagccagccccgaacccaccaaaaagcctcgcatcaacagctttgaggagcatgtggcctccacctcggccgccctgcccagctgcctgcccccggaggtgcccacgcagctgcctggacaacctttgctagggcaagcctgtctacgaactgtctgtcacattttctcaaagttttctccttactaactgtggaagaacatgaaaggctcccggagcagcgctgactcctccaggaaacactgaggcagacgtgtcggttccattccatttccatttctgcagcttagcttgtgtcctgccctccgcccgaggcaaaacgtatcctgaggacttcttccggagagggtggggtggagcagcgggggagccttggccgaagagaaccatgctt

SEQ ID NO: 102980 - DNA, 4157 bp, Homo sapiens
  Payload ID: 95
  Gene Symbol: PFKFB3
  Gene Name: 6-phosphofructo-2-kinase/fructose-2,6-biphosphatase 3
  Uniprot ID: Q16875
  ENST ID: ENST00000379789
  CDS Start-End: 65-1567
gccgcttggacgtcgtcctgtctgggtgtcgcgggccggccccgcggggagcgcccccggcgcgatgcccttcaggaaagcctgtgggccaaagctgaccaactcccccaccgtcatcgtcatggtgggcctccccgcccggggcaagacctacatctccaagaagctgactcgctacctcaactggattggcgtccccacaaaagtgttcaacgtcggggagtatcgccgggaggctgtgaagcagtacagctcctacaacttcttccgccccgacaatgaggaagccatgaaagtccggaagcaatgtgccttagctgccttgagagatgtcaaaagctacctggcgaaagaagggggacaaattgcggttttcgatgccaccaatactactagagagaggagacacatgatccttcattttgccaaagaaaatgactttaaggcgtttttcatcgagtcggtgtgcgacgaccctacagttgtggcctccaatatcatggaagttaaaatctccagcccggattacaaagactgcaactcggcagaagccatggacgacttcatgaagaggatcagttgctatgaagccagctaccagcccctcgaccccgacaaatgcgacagggacttgtcgctgatcaaggtgattgacgtgggccggaggttcctggtgaaccgggtgcaggaccacatccagagccgcatcgtgtactacctgatgaacatccacgtgcagccgcgtaccatctacctgtgccggcacggcgagaacgagcacaacctccagggccgcatcgggggcgactcaggcctgtccagccggggcaagaagtttgccagtgctctgagcaagttcgtggaggagcagaacctgaaggacctgcgcgtgtggaccagccagctgaagagcaccatccagacggccgaggcgctgcggctgccctacgagcagtggaaggcgctcaatgagatcgacgcgggcgtctgtgaggagctgacctacgaggagatcagggacacctaccctgaggagtatgcgctgcgggagcaggacaagtactattaccgctaccccaccggggagtcctaccaggacctggtccagcgcttggagccagtgatcatggagctggagcggcaggagaatgtgctggtcatctgccaccaggccgtcctgcgctgcctgcttgcctacttcctggataagagtgcagaggagatgccctacctgaaatgccctcttcacaccgtcctgaaactgacgcctgtcgcttatggctgccgtgtggaatccatctacctgaacgtggagtccgtctgcacacaccgggagaggtcagaggatgcaaagaagggacctaacccgctcatgagacgcaatagtgtcaccccgctagccagccccgaacccaccaaaaagcctcgcatcaacagctttgaggagcatgtggcctccacctcggccgccctgcccagctgcctgcccccggaggtgcccacgcagctgcctggacaaaacatgaaaggctcccggagcagcgctgactcctccaggaaacactgaggcagacgtgtcggttccattccatttccatttctgcagcttagcttgtgtcctgccctccgcccgaggcaaaacgtatcctgaggacttcttccggagagggtggggtggagcagcgggggagccttggccgaagagaaccatgcttggcaccgtctgtgtcccctcggccgctggacaccagaaagccacgtgggtccctggcgccctgcctttagccgtggggcccccacctccactctctgggtttcctaggaatgtccagcctcggagaccttcacaaagccttgggagggtgatgagtgctggtcctgacaggaggccgctggggacactgtgctgttttgtttcgtttctgtgatctcccggcacgtttggagctgggaagaccacactggtggcagaatcctaaaattaaaggaggcaggctcctagttgctgaaagttaaggaatgtgtaaaacctccacgtgactgtttggtgcatcttgacctgggaagacgcctcatgggaacgaacttggacaggtgttgggttgaggcctcttctgcaggaagtccctgagctgagacgcaagttggctgggtggtccgcaccctggctctcctgcaggtccacacaccttccaggcctgtggcctgcctccaaagatgtgcaagggcaggctggctgcacggggagagggaagtattttgccgaaatatgagaactggggcctcctgctcccagggagctccagggcccctctctcctcccacctggacttggggggaactgagaaacactttcctggagctgctggcttttgcacttttttgatggcagaagtgtgacctgagagtcccaccttctcttcaggaacgtagatgttggggtgtcttgccctggggggcttggaacctctgaaggtggggagcggaacacctggcatccttccccagcacttgcattaccgtccctgctcttcccaggtggggacagtggcccaagcaaggcctcactcgcagccacttcttcaagagctgcctgcacactgtcttggagcatctgccttgtgcctggcactctgccggtgccttgggaaggtcggaagagtggactttgtcctggccttcccttcatggcgtctatgacacttttgtggtgatggaaagcatgggacctgtcgtctcagcctgttggtttctcctcattgcctcaaaccctggggtaggtgggacggggggtctcgtgcccagatgaaaccatttggaaactcggcagcagagtttgtccaaatgacccttttcaggatgtctcaaagcttgtgccaaaggtcacttttctttcctgccttctgctgtgagccctgagatcctcctcccagctcaagggacaggtcctgggtgagggtgggagatttagacacctgaaactgggcgtggagagaagagccgttgctgtttgttttttgggaagagcttttaaagaatgcatgtttttttcctggttggaattgagtaggaactgaggctgtgcttcaggtatggtacaatcaagtgggggattttcatgctgaaccattcaagccctccccgcccgttgcacccactttggctggcgtctgctggagaggatgtctctgtccgcattcccgtgcagctccaggctcgcgcagttttctctctctccctggatgttgagtctcatcagaatatgtgggtagggggtggacgtgcacgggtgcatgattgtgcttaacttggttgtatttttcgatttgacatggaaggcctgttgctttgctcttgagaatagtttctcgtgtccccctcgcaggcctcattctttgaacatcgactctgaagtttgatacagataggggcttgatagctgtggtcccctctcccctctgactacctaaaatcaatacctaaatacagaagccttggtctaacacgggacttttagtttgcgaagggcctagatagggagagaggtaacatgaatctggacagggagggagatactatagaaaggagaacactgcctactttgcaagccagtgacctgccttttgaggggacattggacgggggccgggggcgggggttgggtttgagctacagtcatgaacttttggcgtctactgattcctccaactctccaccccacaaaataacggggaccaatatttttaactttgcctatttgtttttgggtgagtttcccccctccttattctgtcctgagaccacgggcaaagctcttcattttgagagagaagaaaaactgtttggaaccacaccaatgatatttttctttgtaatacttgaaatttatttttttattattttgatagcagatgtgctatttatttatttaatatgtataaggagcctaaacaatagaaagctgtagagattgggtttcattgttaattggtttgggagcctcctatgtgtgacttatgacttctctgtgttctgtgtatttgtctgaattaatgacctgggatataaagctatgctagctttcaaacaggagatgcctttcagaaatttgtatattttgcagttgccagaccaataaaatacctggttgaaataca

SEQ ID NO: 102981 - DNA, 595 bp, Homo sapiens
  Payload ID: 95
  Gene Symbol: PFKFB3
  Gene Name: 6-phosphofructo-2-kinase/fructose-2,6-biphosphatase 3
  ENST ID: ENST00000450232
  CDS Start-End: 1-430
cgtggaggagcagaacctgaaggacctgcgcgtgtggaccagccagctgaagagcaccatccagacggccgaggcgctgcggctgccctacgagcagtggaaggcgctcaatgagatcgacgcgtcctaccaggacctggtccagcgcttggagccagtgatcatggagctggagcggcaggagaatgtgctggtcatctgccaccaggccgtcctgcgctgcctgcttgcctacttcctggataagagtgcagaggagatgccctacctgaaatgccctcttcacaccgtcctgaaactgacgcctgtcgcttatggctgccgtgtggaatccatctacctgaacgtggagtccgtctgcacacaccgggagaggtcagagaacatgaaaggctcccggagcagcgctgactcctccaggaaacactgaggcagacgtgtcggttccattccatttccatttctgcagcttagcttgtgtcctgccctccgcccgaggcaaaacgtatcctgaggacttcttccggagagggtggggtggagcagcgggggagccttggccgaagagaaccatgcttggcaccgtctgtgtccc

SEQ ID NO: 102982 - DNA, 244 bp, Homo sapiens
  Payload ID: 95
  Gene Symbol: PFKFB3
  Gene Name: 6-phosphofructo-2-kinase/fructose-2,6-biphosphatase 3
  ENST ID: ENST00000441697
  CDS Start-End: 1-96
atctacctgaacgtggagtccgtctgcacacaccgggagaggtcagagaacatgaaaggctcccggagcagcgctgactcctccaggaaacactgaggcagacgtgtcggttccattccatttccatttctgcagcttagcttgtgtcctgccctccgcccgaggcaaaacgtatcctgaggacttcttccggagagggtggggtggagcagcgggggagccttggccgaagagaaccatgctt

SEQ ID NO: 102983 - DNA, 513 bp, Homo sapiens
  Payload ID: 95
  Gene Symbol: PFKFB3
  Gene Name: 6-phosphofructo-2-kinase/fructose-2,6-biphosphatase 3
  ENST ID: ENST00000414237
  CDS Start-End: 1-279
atctacctgaacgtggagtccgtctgcacacaccgggagaggtcagaggatgcaaagaagggacctaacccgctcatgagacgcaatagtgtcaccccgctagccagccccgaacccaccaaaaagcctcgcatcaacagctttgaggagcatgtggcctccacctcggccgccctgcccagctgcctgcccccggaggtgcccacgcagctgcctggacaacctttgctagggcaagcctgtctaaactggaaaggtgtgatgaggaatgcagcctgagatgctgaaaagaatgactggctttggaaatgggagagaacatgaaaggctcccggagcagcgctgactcctccaggaaacactgaggcagacgtgtcggttccattccatttccatttctgcagcttagcttgtgtcctgccctccgcccgaggcaaaacgtatcctgaggacttcttccggagagggtggggtggagcagcgggggagccttggccgaagagaaccatgctt

SEQ ID NO: 102984 - DNA, 2063 bp, Homo sapiens
  Payload ID: 95
  Gene Symbol: PFKFB3
  Gene Name: 6-phosphofructo-2-kinase/fructose-2,6-biphosphatase 3
  ENST ID: ENST00000477914
  CDS Start-End: 396-1763
gaggctgacgtacgcgtctgcggccagcccggactctttaaaagccggcggtgcgcggggcatcccagccaagccggagaggaggcgagcagcagggcctggtggcgagagcgcggctgtcactgcgcccgagcatcccagagctttccgagcggacgagccggccgtgccgggcatccccagcctcgctaccctcgcagcacacgtcgagccccgcacaggcgagggtccggaacttagcccaaagcacgtttcccctggcagcgcaggaaacgcccggccgcgcgccggcgcacgcccccctctcctcctttgttccgggggtcggcggccgctctcctgccagcgtcgggatctcggccccgggaggcgggccgtcgggcgcagccgcgaagatgccgttggaactgacgcagagccgagtgcagaagatctgggtgcccgtggaccacaggccctcgttgcccagatcctgtgggccaaagctgaccaactcccccaccgtcatcgtcatggtgggcctccccgcccggggcaagacctacatctccaagaagctgactcgctacctcaactggattggcgtccccacaaaagtgttcaacgtcggggagtatcgccgggaggctgtgaagcagtacagctcctacaacttcttccgccccgacaatgaggaagccatgaaagtccggaagcaatgtgccttagctgccttgagagatgtcaaaagctacctggcgaaagaagggggacaaattgcggttttcgatgccaccaatactactagagagaggagacacatgatccttcattttgccaaagaaaatgactttaaggcgtttttcatcgagtcggtgtgcgacgaccctacagttgtggcctccaatatcatggaagttaaaatctccagcccggattacaaagactgcaactcggcagaagccatggacgacttcatgaagaggatcagttgctatgaagccagctaccagcccctcgaccccgacaaatgcgacagggacttgtcgctgatcaaggtgattgacgtgggccggaggttcctggtgaaccgggtgcaggaccacatccagagccgcatcgtgtactacctgatgaacatccacgtgcagccgcgtaccatctacctgtgccggcacggcgagaacgagcacaacctccagggccgcatcgggggcgactcaggcctgtccagccggggcaagaagtttgccagtgctctgagcaagttcgtggaggagcagaacctgaaggacctgcgcgtgtggaccagccagctgaagagcaccatccagacggccgaggcgctgcggctgccctacgagcagtggaaggcgctcaatgagatcgacgcgggcgtctgtgaggagctgacctacgaggagatcagggacacctaccctgaggagtatgcgctgcgggagcaggacaagtactattaccgctaccccaccggggagtcctaccaggacctggtccagcgcttggagccagtgatcatggagctggagcggcaggagaatgtgctggtcatctgccaccaggccgtcctgcgctgcctgcttgcctacttcctggataagagtgcagaggagatgccctacctgaaatgccctcttcacaccgtcctgaaactgacgcctgtcgcttatggctgccgtgtggaatccatctacctgaacgtggagtccgtctgcacacaccgggagaggtcagaggctgccaaaagtacaacactgtgctagtactagtcagacctttctcttagaccgagcgtgactttctgtcatggcgttcccgaaacaggatgcaaagaagggacctaacccgctcatgagacgcaatagtgtcaccccgctagccagccccgaacccaccaaaaagcctcgcatcaacagctttgaggagcatgtggcctccacctcggccgccctgcccagctgcctgcccccggaggtgcccacgcagctgcctggacaaaacatgaaaggctcccggagcagcgctgactcctccaggaaacactgaggcagacgtgtcggttc

SEQ ID NO: 102985 - DNA, 2098 bp, Homo sapiens
  Payload ID: 95
  Gene Symbol: PFKFB3
  Gene Name: 6-phosphofructo-2-kinase/fructose-2,6-biphosphatase 3
  ENST ID: ENST00000461744
  CDS Start-End: 396-1763
gaggctgacgtacgcgtctgcggccagcccggactctttaaaagccggcggtgcgcggggcatcccagccaagccggagaggaggcgagcagcagggcctggtggcgagagcgcggctgtcactgcgcccgagcatcccagagctttccgagcggacgagccggccgtgccgggcatccccagcctcgctaccctcgcagcacacgtcgagccccgcacaggcgagggtccggaacttagcccaaagcacgtttcccctggcagcgcaggaaacgcccggccgcgcgccggcgcacgcccccctctcctcctttgttccgggggtcggcggccgctctcctgccagcgtcgggatctcggccccgggaggcgggccgtcgggcgcagccgcgaagatgccgttggaactgacgcagagccgagtgcagaagatctgggtgcccgtggaccacaggccctcgttgcccagatcctgtgggccaaagctgaccaactcccccaccgtcatcgtcatggtgggcctccccgcccggggcaagacctacatctccaagaagctgactcgctacctcaactggattggcgtccccacaaaagtgttcaacgtcggggagtatcgccgggaggctgtgaagcagtacagctcctacaacttcttccgccccgacaatgaggaagccatgaaagtccggaagcaatgtgccttagctgccttgagagatgtcaaaagctacctggcgaaagaagggggacaaattgcggttttcgatgccaccaatactactagagagaggagacacatgatccttcattttgccaaagaaaatgactttaaggcgtttttcatcgagtcggtgtgcgacgaccctacagttgtggcctccaatatcatggaagttaaaatctccagcccggattacaaagactgcaactcggcagaagccatggacgacttcatgaagaggatcagttgctatgaagccagctaccagcccctcgaccccgacaaatgcgacagggacttgtcgctgatcaaggtgattgacgtgggccggaggttcctggtgaaccgggtgcaggaccacatccagagccgcatcgtgtactacctgatgaacatccacgtgcagccgcgtaccatctacctgtgccggcacggcgagaacgagcacaacctccagggccgcatcgggggcgactcaggcctgtccagccggggcaagaagtttgccagtgctctgagcaagttcgtggaggagcagaacctgaaggacctgcgcgtgtggaccagccagctgaagagcaccatccagacggccgaggcgctgcggctgccctacgagcagtggaaggcgctcaatgagatcgacgcgggcgtctgtgaggagctgacctacgaggagatcagggacacctaccctgaggagtatgcgctgcgggagcaggacaagtactattaccgctaccccaccggggagtcctaccaggacctggtccagcgcttggagccagtgatcatggagctggagcggcaggagaatgtgctggtcatctgccaccaggccgtcctgcgctgcctgcttgcctacttcctggataagagtgcagaggagatgccctacctgaaatgccctcttcacaccgtcctgaaactgacgcctgtcgcttatggctgccgtgtggaatccatctacctgaacgtggagtccgtctgcacacaccgggagaggtcagaggctgccaaaagtacaacactgtgctagtactagtcagacctttctcttagaccgagcgtgactttctgtcatggcgttcccgaaacaggatgcaaagaagggacctaacccgctcatgagacgcaatagtgtcaccccgctagccagccccgaacccaccaaaaagcctcgcatcaacagctttgaggagcatgtggcctccacctcggccgccctgcccagctgcctgcccccggaggtgcccacgcagctgcctggacaacctttgctagggcaagcctgtctgtaagtatctctccgatcatcgctgctgcttgcactgctttcttcctgcttgctcatttggcctcctgcctgttaaa

SEQ ID NO: 102986 - DNA, 536 bp, Homo sapiens
  Payload ID: 95
  Gene Symbol: PFKFB3
  Gene Name: 6-phosphofructo-2-kinase/fructose-2,6-biphosphatase 3
  ENST ID: ENST00000475881
  CDS Start-End: 1-186
atctacctgaacgtggagtccgtctgcacacaccgggagaggtcagagggtctcagtctgttccccaggctggagtgcggtggcgcagtcacggctcactgcagcctcaacctcctgggttcaagtgatcctcccgcctcagcctcccgcgtagctgagactacaggatgcaaagaagggacctaacccgctcatgagacgcaatagtgtcaccccgctagccagccccgaacccaccaaaaagcctcgcatcaacagctttgaggagcatgtggcctccacctcggccgccctgcccagctgcctgcccccggaggtgcccacgcagctgcctggacaaaacatgaaaggctcccggagcagcgctgactcctccaggaaacactgaggcagacgtgtcggttccattccatttccatttctgcagcttagcttgtgtcctgccctccgcccgaggcaaaacgtatcctgaggacttcttccggagagggtggggtggagcagcgggggagccttggccgaagagaaccatgctt

SEQ ID NO: 102987 - DNA, 2131 bp, Homo sapiens
  Payload ID: 95
  Gene Symbol: PFKFB3
  Gene Name: 6-phosphofructo-2-kinase/fructose-2,6-biphosphatase 3
  ENST ID: ENST00000467491
  CDS Start-End: 396-1763
gaggctgacgtacgcgtctgcggccagcccggactctttaaaagccggcggtgcgcggggcatcccagccaagccggagaggaggcgagcagcagggcctggtggcgagagcgcggctgtcactgcgcccgagcatcccagagctttccgagcggacgagccggccgtgccgggcatccccagcctcgctaccctcgcagcacacgtcgagccccgcacaggcgagggtccggaacttagcccaaagcacgtttcccctggcagcgcaggaaacgcccggccgcgcgccggcgcacgcccccctctcctcctttgttccgggggtcggcggccgctctcctgccagcgtcgggatctcggccccgggaggcgggccgtcgggcgcagccgcgaagatgccgttggaactgacgcagagccgagtgcagaagatctgggtgcccgtggaccacaggccctcgttgcccagatcctgtgggccaaagctgaccaactcccccaccgtcatcgtcatggtgggcctccccgcccggggcaagacctacatctccaagaagctgactcgctacctcaactggattggcgtccccacaaaagtgttcaacgtcggggagtatcgccgggaggctgtgaagcagtacagctcctacaacttcttccgccccgacaatgaggaagccatgaaagtccggaagcaatgtgccttagctgccttgagagatgtcaaaagctacctggcgaaagaagggggacaaattgcggttttcgatgccaccaatactactagagagaggagacacatgatccttcattttgccaaagaaaatgactttaaggcgtttttcatcgagtcggtgtgcgacgaccctacagttgtggcctccaatatcatggaagttaaaatctccagcccggattacaaagactgcaactcggcagaagccatggacgacttcatgaagaggatcagttgctatgaagccagctaccagcccctcgaccccgacaaatgcgacagggacttgtcgctgatcaaggtgattgacgtgggccggaggttcctggtgaaccgggtgcaggaccacatccagagccgcatcgtgtactacctgatgaacatccacgtgcagccgcgtaccatctacctgtgccggcacggcgagaacgagcacaacctccagggccgcatcgggggcgactcaggcctgtccagccggggcaagaagtttgccagtgctctgagcaagttcgtggaggagcagaacctgaaggacctgcgcgtgtggaccagccagctgaagagcaccatccagacggccgaggcgctgcggctgccctacgagcagtggaaggcgctcaatgagatcgacgcgggcgtctgtgaggagctgacctacgaggagatcagggacacctaccctgaggagtatgcgctgcgggagcaggacaagtactattaccgctaccccaccggggagtcctaccaggacctggtccagcgcttggagccagtgatcatggagctggagcggcaggagaatgtgctggtcatctgccaccaggccgtcctgcgctgcctgcttgcctacttcctggataagagtgcagaggagatgccctacctgaaatgccctcttcacaccgtcctgaaactgacgcctgtcgcttatggctgccgtgtggaatccatctacctgaacgtggagtccgtctgcacacaccgggagaggtcagaggctgccaaaagtacaacactgtgctagtactagtcagacctttctcttagaccgagcgtgactttctgtcatggcgttcccgaaacaggatgcaaagaagggacctaacccgctcatgagacgcaatagtgtcaccccgctagccagccccgaacccaccaaaaagcctcgcatcaacagctttgaggagcatgtggcctccacctcggccgccctgcccagctgcctgcccccggaggtgcccacgcagctgcctggacaacctttgctagggcaagcctgtctacgaactgtctgtcacattttctcaaagttttctccttactaactgtggaagaacatgaaaggctcccggagcagcgctgactcctccaggaaacactgaggcagacgtg

SEQ ID NO: 102988 - DNA, 2086 bp, Homo sapiens
  Payload ID: 95
  Gene Symbol: PFKFB3
  Gene Name: 6-phosphofructo-2-kinase/fructose-2,6-biphosphatase 3
  ENST ID: ENST00000490474
  CDS Start-End: 396-1763
gaggctgacgtacgcgtctgcggccagcccggactctttaaaagccggcggtgcgcggggcatcccagccaagccggagaggaggcgagcagcagggcctggtggcgagagcgcggctgtcactgcgcccgagcatcccagagctttccgagcggacgagccggccgtgccgggcatccccagcctcgctaccctcgcagcacacgtcgagccccgcacaggcgagggtccggaacttagcccaaagcacgtttcccctggcagcgcaggaaacgcccggccgcgcgccggcgcacgcccccctctcctcctttgttccgggggtcggcggccgctctcctgccagcgtcgggatctcggccccgggaggcgggccgtcgggcgcagccgcgaagatgccgttggaactgacgcagagccgagtgcagaagatctgggtgcccgtggaccacaggccctcgttgcccagatcctgtgggccaaagctgaccaactcccccaccgtcatcgtcatggtgggcctccccgcccggggcaagacctacatctccaagaagctgactcgctacctcaactggattggcgtccccacaaaagtgttcaacgtcggggagtatcgccgggaggctgtgaagcagtacagctcctacaacttcttccgccccgacaatgaggaagccatgaaagtccggaagcaatgtgccttagctgccttgagagatgtcaaaagctacctggcgaaagaagggggacaaattgcggttttcgatgccaccaatactactagagagaggagacacatgatccttcattttgccaaagaaaatgactttaaggcgtttttcatcgagtcggtgtgcgacgaccctacagttgtggcctccaatatcatggaagttaaaatctccagcccggattacaaagactgcaactcggcagaagccatggacgacttcatgaagaggatcagttgctatgaagccagctaccagcccctcgaccccgacaaatgcgacagggacttgtcgctgatcaaggtgattgacgtgggccggaggttcctggtgaaccgggtgcaggaccacatccagagccgcatcgtgtactacctgatgaacatccacgtgcagccgcgtaccatctacctgtgccggcacggcgagaacgagcacaacctccagggccgcatcgggggcgactcaggcctgtccagccggggcaagaagtttgccagtgctctgagcaagttcgtggaggagcagaacctgaaggacctgcgcgtgtggaccagccagctgaagagcaccatccagacggccgaggcgctgcggctgccctacgagcagtggaaggcgctcaatgagatcgacgcgggcgtctgtgaggagctgacctacgaggagatcagggacacctaccctgaggagtatgcgctgcgggagcaggacaagtactattaccgctaccccaccggggagtcctaccaggacctggtccagcgcttggagccagtgatcatggagctggagcggcaggagaatgtgctggtcatctgccaccaggccgtcctgcgctgcctgcttgcctacttcctggataagagtgcagaggagatgccctacctgaaatgccctcttcacaccgtcctgaaactgacgcctgtcgcttatggctgccgtgtggaatccatctacctgaacgtggagtccgtctgcacacaccgggagaggtcagaggctgccaaaagtacaacactgtgctagtactagtcagacctttctcttagaccgagcgtgactttctgtcatggcgttcccgaaacaggatgcaaagaagggacctaacccgctcatgagacgcaatagtgtcaccccgctagccagccccgaacccaccaaaaagcctcgcatcaacagctttgaggagcatgtggcctccacctcggccgccctgcccagctgcctgcccccggaggtgcccacgcagctgcctggacaacctttgctagggcaagcctgtctaacatgaaaggctcccggagcagcgctgactcctccaggaaacactgaggcagacgtgtcggttc

SEQ ID NO: 102989 - DNA, 4271 bp, Homo sapiens
  Payload ID: 95
  Gene Symbol: PFKFB3
  Gene Name: 6-phosphofructo-2-kinase/fructose-2,6-biphosphatase 3
  Uniprot ID: Q16875
  ENST ID: ENST00000536985
  CDS Start-End: 64-1668
agcgtgggctcctggcggtgaagggggtggctgctgactctcctgtcccgttggggtagagagatgggggagggtggccagaaggaaggtgacagccagcaagcaggggctctgccactcctctgtcagctggacacgtttagtcccaaggccactgtcttcggtgtctccattaatccagcctgtgggccaaagctgaccaactcccccaccgtcatcgtcatggtgggcctccccgcccggggcaagacctacatctccaagaagctgactcgctacctcaactggattggcgtccccacaaaagtgttcaacgtcggggagtatcgccgggaggctgtgaagcagtacagctcctacaacttcttccgccccgacaatgaggaagccatgaaagtccggaagcaatgtgccttagctgccttgagagatgtcaaaagctacctggcgaaagaagggggacaaattgcggttttcgatgccaccaatactactagagagaggagacacatgatccttcattttgccaaagaaaatgactttaaggcgtttttcatcgagtcggtgtgcgacgaccctacagttgtggcctccaatatcatggaagttaaaatctccagcccggattacaaagactgcaactcggcagaagccatggacgacttcatgaagaggatcagttgctatgaagccagctaccagcccctcgaccccgacaaatgcgacagggacttgtcgctgatcaaggtgattgacgtgggccggaggttcctggtgaaccgggtgcaggaccacatccagagccgcatcgtgtactacctgatgaacatccacgtgcagccgcgtaccatctacctgtgccggcacggcgagaacgagcacaacctccagggccgcatcgggggcgactcaggcctgtccagccggggcaagaagtttgccagtgctctgagcaagttcgtggaggagcagaacctgaaggacctgcgcgtgtggaccagccagctgaagagcaccatccagacggccgaggcgctgcggctgccctacgagcagtggaaggcgctcaatgagatcgacgcgggcgtctgtgaggagctgacctacgaggagatcagggacacctaccctgaggagtatgcgctgcgggagcaggacaagtactattaccgctaccccaccggggagtcctaccaggacctggtccagcgcttggagccagtgatcatggagctggagcggcaggagaatgtgctggtcatctgccaccaggccgtcctgcgctgcctgcttgcctacttcctggataagagtgcagaggagatgccctacctgaaatgccctcttcacaccgtcctgaaactgacgcctgtcgcttatggctgccgtgtggaatccatctacctgaacgtggagtccgtctgcacacaccgggagaggtcagaggatgcaaagaagggacctaacccgctcatgagacgcaatagtgtcaccccgctagccagccccgaacccaccaaaaagcctcgcatcaacagctttgaggagcatgtggcctccacctcggccgccctgcccagctgcctgcccccggaggtgcccacgcagctgcctggacaaaacatgaaaggctcccggagcagcgctgactcctccaggaaacactgaggcagacgtgtcggttccattccatttccatttctgcagcttagcttgtgtcctgccctccgcccgaggcaaaacgtatcctgaggacttcttccggagagggtggggtggagcagcgggggagccttggccgaagagaaccatgcttggcaccgtctgtgtcccctcggccgctggacaccagaaagccacgtgggtccctggcgccctgcctttagccgtggggcccccacctccactctctgggtttcctaggaatgtccagcctcggagaccttcacaaagccttgggagggtgatgagtgctggtcctgacaggaggccgctggggacactgtgctgttttgtttcgtttctgtgatctcccggcacgtttggagctgggaagaccacactggtggcagaatcctaaaattaaaggaggcaggctcctagttgctgaaagttaaggaatgtgtaaaacctccacgtgactgtttggtgcatcttgacctgggaagacgcctcatgggaacgaacttggacaggtgttgggttgaggcctcttctgcaggaagtccctgagctgagacgcaagttggctgggtggtccgcaccctggctctcctgcaggtccacacaccttccaggcctgtggcctgcctccaaagatgtgcaagggcaggctggctgcacggggagagggaagtattttgccgaaatatgagaactggggcctcctgctcccagggagctccagggcccctctctcctcccacctggacttggggggaactgagaaacactttcctggagctgctggcttttgcacttttttgatggcagaagtgtgacctgagagtcccaccttctcttcaggaacgtagatgttggggtgtcttgccctggggggcttggaacctctgaaggtggggagcggaacacctggcatccttccccagcacttgcattaccgtccctgctcttcccaggtggggacagtggcccaagcaaggcctcactcgcagccacttcttcaagagctgcctgcacactgtcttggagcatctgccttgtgcctggcactctgccggtgccttgggaaggtcggaagagtggactttgtcctggccttcccttcatggcgtctatgacacttttgtggtgatggaaagcatgggacctgtcgtctcagcctgttggtttctcctcattgcctcaaaccctggggtaggtgggacggggggtctcgtgcccagatgaaaccatttggaaactcggcagcagagtttgtccaaatgacccttttcaggatgtctcaaagcttgtgccaaaggtcacttttctttcctgccttctgctgtgagccctgagatcctcctcccagctcaagggacaggtcctgggtgagggtgggagatttagacacctgaaactgggcgtggagagaagagccgttgctgtttgttttttgggaagagcttttaaagaatgcatgtttttttcctggttggaattgagtaggaactgaggctgtgcttcaggtatggtacaatcaagtgggggattttcatgctgaaccattcaagccctccccgcccgttgcacccactttggctggcgtctgctggagaggatgtctctgtccgcattcccgtgcagctccaggctcgcgcagttttctctctctccctggatgttgagtctcatcagaatatgtgggtagggggtggacgtgcacgggtgcatgattgtgcttaacttggttgtatttttcgatttgacatggaaggcctgttgctttgctcttgagaatagtttctcgtgtccccctcgcaggcctcattctttgaacatcgactctgaagtttgatacagataggggcttgatagctgtggtcccctctcccctctgactacctaaaatcaatacctaaatacagaagccttggtctaacacgggacttttagtttgcgaagggcctagatagggagagaggtaacatgaatctggacagggagggagatactatagaaaggagaacactgcctactttgcaagccagtgacctgccttttgaggggacattggacgggggccgggggcgggggttgggtttgagctacagtcatgaacttttggcgtctactgattcctccaactctccaccccacaaaataacggggaccaatatttttaactttgcctatttgtttttgggtgagtttcccccctccttattctgtcctgagaccacgggcaaagctcttcattttgagagagaagaaaaactgtttggaaccacaccaatgatatttttctttgtaatacttgaaatttatttttttattattttgatagcagatgtgctatttatttatttaatatgtataaggagcctaaacaatagaaagctgtagagattgggtttcattgttaattggtttgggagcctcctatgtgtgacttatgacttctctgtgttctgtgtatttgtctgaattaatgacctgggatataaagctatgctagctttcaaacaggagatgcctttcagaaatttgtatattttgcagttgccagaccaataaaatacctggttgaaatacatggacgaagtaaa

SEQ ID NO: 102990 - DNA, 1752 bp, Homo sapiens
  Payload ID: 95
  Gene Symbol: PFKFB3
  Gene Name: 6-phosphofructo-2-kinase/fructose-2,6-biphosphatase 3
  ENST ID: ENST00000625260
  CDS Start-End: 385-1752
acgcgtctgcggccagcccggactctttaaaagccggcggtgcgcggggcatcccagccaagccggagaggaggcgagcagcagggcctggtggcgagagcgcggctgtcactgcgcccgagcatcccagagctttccgagcggacgagccggccgtgccgggcatccccagcctcgctaccctcgcagcacacgtcgagccccgcacaggcgagggtccggaacttagcccaaagcacgtttcccctggcagcgcaggaaacgcccggccgcgcgccggcgcacgcccccctctcctcctttgttccgggggtcggcggccgctctcctgccagcgtcgggatctcggccccgggaggcgggccgtcgggcgcagccgcgaagatgccgttggaactgacgcagagccgagtgcagaagatctgggtgcccgtggaccacaggccctcgttgcccagatcctgtgggccaaagctgaccaactcccccaccgtcatcgtcatggtgggcctccccgcccggggcaagacctacatctccaagaagctgactcgctacctcaactggattggcgtccccacaaaagtgttcaacgtcggggagtatcgccgggaggctgtgaagcagtacagctcctacaacttcttccgccccgacaatgaggaagccatgaaagtccggaagcaatgtgccttagctgccttgagagatgtcaaaagctacctggcgaaagaagggggacaaattgcggttttcgatgccaccaatactactagagagaggagacacatgatccttcattttgccaaagaaaatgactttaaggcgtttttcatcgagtcggtgtgcgacgaccctacagttgtggcctccaatatcatggaagttaaaatctccagcccggattacaaagactgcaactcggcagaagccatggacgacttcatgaagaggatcagttgctatgaagccagctaccagcccctcgaccccgacaaatgcgacagggacttgtcgctgatcaaggtgattgacgtgggccggaggttcctggtgaaccgggtgcaggaccacatccagagccgcatcgtgtactacctgatgaacatccacgtgcagccgcgtaccatctacctgtgccggcacggcgagaacgagcacaacctccagggccgcatcgggggcgactcaggcctgtccagccggggcaagaagtttgccagtgctctgagcaagttcgtggaggagcagaacctgaaggacctgcgcgtgtggaccagccagctgaagagcaccatccagacggccgaggcgctgcggctgccctacgagcagtggaaggcgctcaatgagatcgacgcgggcgtctgtgaggagctgacctacgaggagatcagggacacctaccctgaggagtatgcgctgcgggagcaggacaagtactattaccgctaccccaccggggagtcctaccaggacctggtccagcgcttggagccagtgatcatggagctggagcggcaggagaatgtgctggtcatctgccaccaggccgtcctgcgctgcctgcttgcctacttcctggataagagtgcagaggagatgccctacctgaaatgccctcttcacaccgtcctgaaactgacgcctgtcgcttatggctgccgtgtggaatccatctacctgaacgtggagtccgtctgcacacaccgggagaggtcagaggctgccaaaagtacaacactgtgctag

SEQ ID NO: 102991 - DNA, 1965 bp, Homo sapiens
  Payload ID: 95
  Gene Symbol: PFKFB3
  Gene Name: 6-phosphofructo-2-kinase/fructose-2,6-biphosphatase 3
  ENST ID: ENST00000626882
  CDS Start-End: 385-1965
acgcgtctgcggccagcccggactctttaaaagccggcggtgcgcggggcatcccagccaagccggagaggaggcgagcagcagggcctggtggcgagagcgcggctgtcactgcgcccgagcatcccagagctttccgagcggacgagccggccgtgccgggcatccccagcctcgctaccctcgcagcacacgtcgagccccgcacaggcgagggtccggaacttagcccaaagcacgtttcccctggcagcgcaggaaacgcccggccgcgcgccggcgcacgcccccctctcctcctttgttccgggggtcggcggccgctctcctgccagcgtcgggatctcggccccgggaggcgggccgtcgggcgcagccgcgaagatgccgttggaactgacgcagagccgagtgcagaagatctgggtgcccgtggaccacaggccctcgttgcccagatcctgtgggccaaagctgaccaactcccccaccgtcatcgtcatggtgggcctccccgcccggggcaagacctacatctccaagaagctgactcgctacctcaactggattggcgtccccacaaaagtgttcaacgtcggggagtatcgccgggaggctgtgaagcagtacagctcctacaacttcttccgccccgacaatgaggaagccatgaaagtccggaagcaatgtgccttagctgccttgagagatgtcaaaagctacctggcgaaagaagggggacaaattgcggttttcgatgccaccaatactactagagagaggagacacatgatccttcattttgccaaagaaaatgactttaaggcgtttttcatcgagtcggtgtgcgacgaccctacagttgtggcctccaatatcatggaagttaaaatctccagcccggattacaaagactgcaactcggcagaagccatggacgacttcatgaagaggatcagttgctatgaagccagctaccagcccctcgaccccgacaaatgcgacagggacttgtcgctgatcaaggtgattgacgtgggccggaggttcctggtgaaccgggtgcaggaccacatccagagccgcatcgtgtactacctgatgaacatccacgtgcagccgcgtaccatctacctgtgccggcacggcgagaacgagcacaacctccagggccgcatcgggggcgactcaggcctgtccagccggggcaagaagtttgccagtgctctgagcaagttcgtggaggagcagaacctgaaggacctgcgcgtgtggaccagccagctgaagagcaccatccagacggccgaggcgctgcggctgccctacgagcagtggaaggcgctcaatgagatcgacgcgggcgtctgtgaggagctgacctacgaggagatcagggacacctaccctgaggagtatgcgctgcgggagcaggacaagtactattaccgctaccccaccggggagtcctaccaggacctggtccagcgcttggagccagtgatcatggagctggagcggcaggagaatgtgctggtcatctgccaccaggccgtcctgcgctgcctgcttgcctacttcctggataagagtgcagaggagatgccctacctgaaatgccctcttcacaccgtcctgaaactgacgcctgtcgcttatggctgccgtgtggaatccatctacctgaacgtggagtccgtctgcacacaccgggagaggtcagaggatgcaaagaagggacctaacccgctcatgagacgcaatagtgtcaccccgctagccagccccgaacccaccaaaaagcctcgcatcaacagctttgaggagcatgtggcctccacctcggccgccctgcccagctgcctgcccccggaggtgcccacgcagctgcctggacaacctttgctagggcaagcctgtctacgaactgtctgtcacattttctcaaagttttctccttactaa

SEQ ID NO: 102992 - DNA, 3586 bp, Homo sapiens
  Payload ID: 96
  Gene Symbol: PFKFB4
  Gene Name: 6-phosphofructo-2-kinase/fructose-2,6-biphosphatase 4
  Uniprot ID: Q16877
  ENST ID: ENST00000232375
  CDS Start-End: 114-1523
gggctgtcgcggcttgaggaggggcggggcccaaggggcgggacctcgggtggcccgaggtggcccggctgctgggttggaagcggcgcagtccgactcatcccggccccgggatggcgtccccacgggaattgacacagaaccccctgaagaagatctggatgccatacagcaatgggcggcccgctctgcacgcttgccagcgcggtgtgtgcatgaccaactgcccaactctcattgtcatggtgggcctgcccgccaggggcaagacctacatctccaagaagctgactcgatacctgaactggattggtgtgcccactcgggagttcaatgttggccagtatcgccgggacgtggtcaagacctacaaatcttttgaattttttctccccgacaatgaagagggcctgaaaatcaggaagcagtgtgccctggcagccctccgtgacgtccggcggttccttagtgaggaggggggacatgtggcggtttttgatgccacaaacaccacccgagaacggagagcgaccatctttaattttggagaacagaatggctacaagaccttttttgtcgagtccatctgtgtggatcctgaggtcatagctgccaacatcgtgcaagtgaaactgggcagccctgactatgtcaaccgcgacagtgatgaggctacggaggacttcatgaggcgcattgagtgctatgagaactcctacgagtcgctagatgaggacctggatagggacctgtcctatatcaagatcatggatgtgggccagagctacgtggtgaaccgtgtggctgaccacatccagagccgcatcgtatattacctcatgaacatccacgtgaccccccgctccatctacctctgccggcacggggagagcgagctcaacctcaagggccggattggcggggacccaggactgtcccctcggggcagggagtttgccaagagtctagcccagttcatcagtgaccaaaatatcaaggatctgaaggtctggacaagccagatgaagaggacaatccagacggctgaggcactgggtgtgccctatgaacagtggaaggtcctcaacgagatcgatgcgggcgtctgtgaggaaatgacctacgaggaaattcaggataattatccactggagttcgccctgcgggaccaggacaagtaccggtaccggtaccctaaaggggagtcctacgaggacctggtccagagactggagcctgtcatcatggagctggagaggcaagagaatgtgctggtcatctgccaccaggctgtgatgcgctgcctgctggcctacttcctcgacaaggcagcagaacagctgccctacctcaagtgtccgctgcacacagtcctgaagctgactcctgtggcatatggttgtaaagtggagtccatattcctgaacgtggctgctgtgaacacgcaccgggacaggcctcagaacgtggacatctcaagacctccagaggaagcccttgtcacggtgcctgctcaccagtgaccatgttcatccactgtgaccactaggcaggcactgctctctgcagagggggtcattccaggccctccagtgtgtgtgatagtcaccatgccatgcagggatattcttgaagccacacatggctggcggaacccagagcccccaccccagcccacctggctctttgttgacagtcggcgacaaggttgtgcgtggctcctgacctgctgctaagagtcacttgaccagactgcatctgcatgggctgcgcggaggttgcccagccccagtttcttccggcgcagctcttaggtgttcactctcgccagctcagttggctttgtgaagtgtgaaaccctacaatgtgaaaggaaagtgcttgctgtgatgttcctactgtggcccagctgcccagcatggacctggtgactctccacagggcctctaccatcctctctgtggccacttcctgagccagaggccaggtcttcatggggccctgagcttctgctgcctctggtgagagggagagcccttcccatccttacccaccaggaactagagccccaaccacagcagatgcttcctgggcagccactggccaggccgttgtatccatgtcacccttagttgtgggcattcatgaaagcaatgcgcttgcttcagcacattgggatgcacagaaacgtgagggcaggggggcagttgtggtcgcccctccccagttgtgcatgtacccggctacttaggtatgcttaggggagctggtggccaggggtgccccttcaggcctgctctcacagtgaaaccacttcaagacagggcaggaagttaccttcctggtgcacacaccgaagtgctcgagggagaggctgccgccccctctccccttccctggctgtggacactggcagccaatggggaggcggcctctcccctgttgctgcccgtgtccacacaggaatgtacactggtggcagaaacatgcatttgccataaataattcagaaacacttgtatggtcctgtaaaacttctctggtgtttgttgacttctgcctgtgggtctgaggaagggagaaggcagaacccataggcagtccctgggcaagggaggattttcccggccgcagcacagccttccattcatgtgcacgtgagtctggtgaaaatggccttgtgaagtccagtgtctgtcatgcccctgagttcttttggtcccagagaggcagcctgggcagtctgtttacagctggcaaacagactggctggcaagttgtggggctgggtcagaaagtgtctggacttgtaatcgggtgccctgctgtccacaggtggactctggggaagccaggcccctggatcccaagtcctttgtgtccggagcctttcctggcctgtgcctggagggtagcacatctttccagcctcccagggctttgcagcctgcagatgccacctgtccctgagagaagttagcgtccctggccctggccggtggtctctcatccttgtgtgctgctctgctaagagatgtccaaggcggagccggggcaagatccttccagactcatctgtcagagccccaagccctttagacccagagcccaaggaccatgcctttgggacattaggactgcagcctttgcttctgtgtattttggagttttggtgacttttgtcacctggacacactcatttgttagccatagtgggttcccttggtcagcaacagtgcatgtacctctggatgtcatctgaggtgagaccaccgaggccttttctctctgtgtacagaggggagttaggagttgctggactggatgcattacgaggactggggacagggtagagggacatccagggatcagggcatgagtgggggcaaccccccggcctctgccctggcatggtctccgcatgggctgaggtgtagctgattggctgccacatttcggccatgctggctggcgtgcccatgttgcagatattttcccgagttccccagaatggatggtattgaatctcagccacatgcaacactgtgtccagcattctttgcaataaatactttttaaaaaataa

SEQ ID NO: 102993 - DNA, 1491 bp, Homo sapiens
  Payload ID: 96
  Gene Symbol: PFKFB4
  Gene Name: 6-phosphofructo-2-kinase/fructose-2,6-biphosphatase 4
  Uniprot ID: Q16877
  ENST ID: ENST00000383734
  CDS Start-End: 114-1418
gggctgtcgcggcttgaggaggggcggggcccaaggggcgggacctcgggtggcccgaggtggcccggctgctgggttggaagcggcgcagtccgactcatcccggccccgggatggcgtccccacgggaattgacacagaaccccctgaagaagatctggatgccatacagcaatgggcggcccgctctgcacgcttgccagcgcggtgtgtgcatgaccaactgcccaactctcattgtcatggtgggcctgcccgccaggggcaagacctacatctccaagaagctgactcgatacctgaactggattggtgtgcccactcgggagttcaatgttggccagtatcgccgggacgtggtcaagacctacaaatcttttgaattttttctccccgacaatgaagagggcctgaaaatcaggaagcagtgtgccctggcagccctccgtgacgtccggcggttccttagtgaggaggggggacatgtggcggtttttgatgccacaaacaccacccgagaacggagagcgaccatctttaattttggagaacagaatggctacaagaccttttttgtcgagtccatctgtgtggatcctgaggtcatagctgccaacatcgtgcaagtgaaactgggcagccctgactatgtcaaccgcgacagtgatgaggctacggaggacttcatgaggcgcattgagtgctatgagaactcctacgagtcgctagatgaggacctggatagggacctgtcctatatcaagatcatggatgtgggccagagctacgtggtgaaccgtgtggctgaccacatccagagccgcatcgtatattacctcatgaacatccacgtgaccccccgctccatctacctctgccggcacggggagagcgagctcaacctcaagggccggattggcggggacccaggactgtcccctcggggcagggagtttgccaagagtctagcccagttcatcagtgaccaaaatatcaaggatctgaaggtctggacaagccagatgaagaggacaatccagacggctgaggcactgggtgtgccctatgaacagtggaaggtcctcaacgagatcgatgcgtcctacgaggacctggtccagagactggagcctgtcatcatggagctggagaggcaagagaatgtgctggtcatctgccaccaggctgtgatgcgctgcctgctggcctacttcctcgacaaggcagcagaacagctgccctacctcaagtgtccgctgcacacagtcctgaagctgactcctgtggcatatggttgtaaagtggagtccatattcctgaacgtggctgctgtgaacacgcaccgggacaggcctcagaacgtggacatctcaagacctccagaggaagcccttgtcacggtgcctgctcaccagtgaccatgttcatccactgtgaccactaggcaggcactgctctctgcagagggggtcattccaggccctccagtgt

SEQ ID NO: 102994 - DNA, 1575 bp, Homo sapiens
  Payload ID: 96
  Gene Symbol: PFKFB4
  Gene Name: 6-phosphofructo-2-kinase/fructose-2,6-biphosphatase 4
  ENST ID: ENST00000416568
  CDS Start-End: 114-1502
gggctgtcgcggcttgaggaggggcggggcccaaggggcgggacctcgggtggcccgaggtggcccggctgctgggttggaagcggcgcagtccgactcatcccggccccgggatggcgtccccacgggaattgacacagaaccccctgaagaagatctggatgccatacagcaatgggcggcccgctctgcacgcttgccagcgcggtgtgtgcatgaccaactgcccaactctcattgtcatggtgggcctgcccgccaggggcaagacctacatctccaagaagctgactcgatacctgaactggattggtgtgcccactcgggagttcaatgttggccagtatcgccgggacgtggtcaagacctacaaatcttttgaattttttctccccgacaatgaagagggcctgaaaatcaggaagcagtgtgccctggcagccctccgtgacgtccggcggttccttagtgaggaggggggacatgtggcggtttttgatgccacaaacaccacccgagaacggagagcgaccatctttaattttggagaacagaatggctacaagaccttttttgtcgagtccatctgtgtggatcctgaggtcatagctgccaacatcgtgcaagtgaaactgggcagccctgactatgtcaaccgcgacagtgatgaggctacggaggacttcatgaggcgcattgagtgctatgagaactcctacgagtcgctagatgaggacctggatagggacctgtcctatatcaagatcatggatgtgggccagagctacgtggtgaaccgtgtggctgaccacatccagagccgcatcgtatattacctcatgaacatccacgtgaccccccgctccatctacctctgccggcacggggagagcgagctcaacctcaagggccggattggcggggacccaggactgtcccctcggggcagggagtttgccaagagtctagcccagttcatcagtgaccaaaatatcaaggatctgaaggtctggacaagccagatgaagaggacaatccagacggctgaggcactgggtgtgccctatgaacagtggaagggcgtctgtgaggaaatgacctacgaggaaattcaggataattatccactggagttcgccctgcgggaccaggacaagtaccggtaccggtaccctaaaggggagtcctacgaggacctggtccagagactggagcctgtcatcatggagctggagaggcaagagaatgtgctggtcatctgccaccaggctgtgatgcgctgcctgctggcctacttcctcgacaaggcagcagaacagctgccctacctcaagtgtccgctgcacacagtcctgaagctgactcctgtggcatatggttgtaaagtggagtccatattcctgaacgtggctgctgtgaacacgcaccgggacaggcctcagaacgtggacatctcaagacctccagaggaagcccttgtcacggtgcctgctcaccagtgaccatgttcatccactgtgaccactaggcaggcactgctctctgcagagggggtcattccaggccctccagtgt

SEQ ID NO: 102995 - DNA, 1744 bp, Homo sapiens
  Payload ID: 96
  Gene Symbol: PFKFB4
  Gene Name: 6-phosphofructo-2-kinase/fructose-2,6-biphosphatase 4
  ENST ID: ENST00000417753
  CDS Start-End: 114-230
gggctgtcgcggcttgaggaggggcggggcccaaggggcgggacctcgggtggcccgaggtggcccggctgctgggttggaagcggcgcagtccgactcatcccggccccgggatggcgtccccacgggaattgacacagaaccccctgaagaagatctggatgccatacagcaatgggcggcccgctctgcacgcttgccagcgcggtgaactttcaaaggtgggctagttttccaacaggaggaagggtgcctcttggccttaaagctgagcttgggcaggaacttcagcagagatgtgctcaggatagagacagaaaagtatgccgtgtgggcctgtgtctgtgtcccgggacattgtgcatgaccaactgcccaactctcattgtcatggtgggcctgcccgccaggggcaagacctacatctccaagaagctgactcgatacctgaactggattggtgtgcccactcgggagttcaatgttggccagtatcgccgggacgtggtcaagacctacaaatcttttgaattttttctccccgacaatgaagagggcctgaaaatcaggaagcagtgtgccctggcagccctccgtgacgtccggcggttccttagtgaggaggggggacatgtggcggtttttgatgccacaaacaccacccgagaacggagagcgaccatctttaattttggagaacagaatggctacaagaccttttttgtcgagtccatctgtgtggatcctgaggtcatagctgccaacatcgtgcaagtgaaactgggcagccctgactatgtcaaccgcgacagtgatgaggctacggaggacttcatgaggcgcattgagtgctatgagaactcctacgagtcgctagatgaggacctggatagggacctgtcctatatcaagatcatggatgtgggccagagctacgtggtgaaccgtgtggctgaccacatccagagccgcatcgtatattacctcatgaacatccacgtgaccccccgctccatctacctctgccggcacggggagagcgagctcaacctcaagggccggattggcggggacccaggactgtcccctcggggcagggagtttgccaagagtctagcccagttcatcagtgaccaaaatatcaaggatctgaaggtctggacaagccagatgaagaggacaatccagacggctgaggcactgggtgtgccctatgaacagtggaaggtcctcaacgagatcgatgcgggcgtctgtgaggaaatgacctacgaggaaattcaggataattatccactggagttcgccctgcgggaccaggacaagtaccggtaccggtaccctaaaggggagtcctacgaggacctggtccagagactggagcctgtcatcatggagctggagaggcaagagaatgtgctggtcatctgccaccaggctgtgatgcgctgcctgctggcctacttcctcgacaaggcagcagaacagctgccctacctcaagtgtccgctgcacacagtcctgaagctgactcctgtggcatatggttgtaaagtggagtccatattcctgaacgtggctgctgtgaacacgcaccgggacaggcctcagaacgtggacatctcaagacctccagaggaagcccttgtcacggtgcctgctcaccagtgaccatgttcatccactgtgaccactaggcaggcactgctctctgcagagggggtcattccaggccctccagtgt

SEQ ID NO: 102996 - DNA, 567 bp, Homo sapiens
  Payload ID: 96
  Gene Symbol: PFKFB4
  Gene Name: 6-phosphofructo-2-kinase/fructose-2,6-biphosphatase 4
  ENST ID: ENST00000412035
  CDS Start-End: 41-567
gaactgggcccacttgttccaaaacgggcgggtagtgtgcatgaccaactgcccaactctcattgtcatggtgggcctgcccgccaggggcaagacctacatctccaagaagctgactcgatacctgaactggattggtgtgcccactcgggagttcaatgttggccagtatcgccgggacgtggtcaagacctacaaatcttttgaattttttctccccgacaatgaagagggcctgaaaatcaggaagcagtgtgccctggcagccctccgtgacgtccggcggttccttagtgaggaggggggacatgtggcggtttttgatgccacaaacaccacccgagaacggagagcgaccatctttaattttggagaacagaatggctacaagaccttttttgtcgagtccatctgtgtggatcctgaggtcatagctgccaacatcgtgcaagtgaaactgggcagccctgactatgtcaaccgcgacagtgatgaggctacggaggacttcatgaggcgcattgagtgctatgagaactcctacgagtcgctagatgaggacctgga

SEQ ID NO: 102997 - DNA, 1733 bp, Homo sapiens
  Payload ID: 96
  Gene Symbol: PFKFB4
  Gene Name: 6-phosphofructo-2-kinase/fructose-2,6-biphosphatase 4
  ENST ID: ENST00000445633
  CDS Start-End: 114-356
gggctgtcgcggcttgaggaggggcggggcccaaggggcgggacctcgggtggcccgaggtggcccggctgctgggttggaagcggcgcagtccgactcatcccggccccgggatggcgtccccacgggaattgacacagaaccccctgaagaagatctggatgccatacagcaatgggcggcccgctctgcacgcttgccagcgcggtggtgggctagttttccaacaggaggaagggtgcctcttggccttaaagctgagcttgggcaggaacttcagcagagatgtgctcaggatagagacagaaaagtatgccgtgtgggcctgtgtctgtgtcccgggacattgtgcatgaccaactgcccaactctcattgtcatggtgggcctgcccgccaggggcaagacctacatctccaagaagctgactcgatacctgaactggattggtgtgcccactcgggagttcaatgttggccagtatcgccgggacgtggtcaagacctacaaatcttttgaattttttctccccgacaatgaagagggcctgaaaatcaggaagcagtgtgccctggcagccctccgtgacgtccggcggttccttagtgaggaggggggacatgtggcggtttttgatgccacaaacaccacccgagaacggagagcgaccatctttaattttggagaacagaatggctacaagaccttttttgtcgagtccatctgtgtggatcctgaggtcatagctgccaacatcgtgcaagtgaaactgggcagccctgactatgtcaaccgcgacagtgatgaggctacggaggacttcatgaggcgcattgagtgctatgagaactcctacgagtcgctagatgaggacctggatagggacctgtcctatatcaagatcatggatgtgggccagagctacgtggtgaaccgtgtggctgaccacatccagagccgcatcgtatattacctcatgaacatccacgtgaccccccgctccatctacctctgccggcacggggagagcgagctcaacctcaagggccggattggcggggacccaggactgtcccctcggggcagggagtttgccaagagtctagcccagttcatcagtgaccaaaatatcaaggatctgaaggtctggacaagccagatgaagaggacaatccagacggctgaggcactgggtgtgccctatgaacagtggaaggtcctcaacgagatcgatgcgggcgtctgtgaggaaatgacctacgaggaaattcaggataattatccactggagttcgccctgcgggaccaggacaagtaccggtaccggtaccctaaaggggagtcctacgaggacctggtccagagactggagcctgtcatcatggagctggagaggcaagagaatgtgctggtcatctgccaccaggctgtgatgcgctgcctgctggcctacttcctcgacaaggcagcagaacagctgccctacctcaagtgtccgctgcacacagtcctgaagctgactcctgtggcatatggttgtaaagtggagtccatattcctgaacgtggctgctgtgaacacgcaccgggacaggcctcagaacgtggacatctcaagacctccagaggaagcccttgtcacggtgcctgctcaccagtgaccatgttcatccactgtgaccactaggcaggcactgctctctgcagagggggtcattccaggccctccagtgt

SEQ ID NO: 102998 - DNA, 1011 bp, Homo sapiens
  Payload ID: 96
  Gene Symbol: PFKFB4
  Gene Name: 6-phosphofructo-2-kinase/fructose-2,6-biphosphatase 4
  ENST ID: ENST00000452531
  CDS Start-End: 58-1011
gggttaccccactctggagctgcagggggcagtggccctggccagtttggttgcaggatggacagaggctcgttaggaggcagctccctgaccgacctggggccggggagcagcaggcgggtgtgcatgaccaactgcccaactctcattgtcatggtgggcctgcccgccaggggcaagacctacatctccaagaagctgactcgatacctgaactggattggtgtgcccactcgggagttcaatgttggccagtatcgccgggacgtggtcaagacctacaaatcttttgaattttttctccccgacaatgaagagggcctgaaaatcaggaagcagtgtgccctggcagccctccgtgacgtccggcggttccttagtgaggaggggggacatgtggcggtttttgatgccacaaacaccacccgagaacggagagcgaccatctttaattttggagaacagaatggctacaagaccttttttgtcgagtccatctgtgtggatcctgaggtcatagctgccaacatcgtgcaagtgaaactgggcagccctgactatgtcaaccgcgacagtgatgaggctacggaggacttcatgaggcgcattgagtgctatgagaactcctacgagtcgctagatgaggacctggatagggacctgtcctatatcaagatcatggatgtgggccagagctacgtggtgaaccgtgtggctgaccacatccagagccgcatcgtatattacctcatgaacatccacgtgaccccccgctccatctacctctgccggcacggggagagcgagctcaacctcaagggccggattggcggggacccaggactgtcccctcggggcagggagtttgccaagagtctagcccagttcatcagtgaccaaaatatcaaggatctgaaggtctggacaagccagatgaagaggacaatccagacggctgaggcactgggtgtgccctatgaacagtggaaggtcctcaacgagatcgatgcg

SEQ ID NO: 102999 - DNA, 636 bp, Homo sapiens
  Payload ID: 96
  Gene Symbol: PFKFB4
  Gene Name: 6-phosphofructo-2-kinase/fructose-2,6-biphosphatase 4
  ENST ID: ENST00000422701
  CDS Start-End: 250-636
gggactgggaagagtttgagctttgagaactggccaccacatggcttctaggctgggacactgggaggaagtccagtggtcagtgcagagggcaccctgggagccaaccagggtcaggccagccaggttcatggtgggcagaggctgagcagaacatgttcacacgtgtgtacagacatcccagcatacttcccacgcctgggacagaacagctggctcactttcggatatactgaggaggaaaaagccatgagggccagagattctaccgggcatccgctgatgctgagagagcagacgctgggacagcatctccatggagaggacacaggggagtgggagcacacatgtgaagtgtgcatgaccaactgcccaactctcattgtcatggtgggcctgcccgccaggggcaagacctacatctccaagaagctgactcgatacctgaactggattggtgtgcccactcgggagttcaatgttggccagtatcgccgggacgtggtcaagacctacaaatcttttgaattttttctccccgacaatgaagagggcctgaaaatcaggaagcagtgtgccctggcagccctccgtgacgtccggcggttccttagtgaggaggggggacatgtggcg

SEQ ID NO: 103000 - DNA, 1028 bp, Homo sapiens
  Payload ID: 97
  Gene Symbol: PGLS
  Gene Name: 6-phosphogluconolactonase
  Uniprot ID: O95336
  ENST ID: ENST00000252603
  CDS Start-End: 45-821
acggccgtagggagcgcttcctcctccccgccgccgccctcgccatggccgcgccggccccgggcctcatctcggtgttctcgagttcccaggagctgggtgcggcgctagcgcagctggtggcccagcgcgcagcatgctgcctggcaggggcccgcgcccgtttcgcgctcggcctgtcgggcgggagcctcgtctcgatgctagcccgcgagctacccgccgccgtcgcccctgccgggccagctagcttagcgcgctggacgctgggcttctgcgacgagcgcctcgtgcccttcgatcacgccgagagcacgtacggcctctaccggacgcatcttctctccagactgccgatcccagaaagccaggtgatcaccattaaccccgagctgcctgtggaggaggcggctgaggactacgccaagaagctgagacaggcattccaaggggactccatcccggttttcgacctgctgatcctgggggtgggccccgatggtcacacctgctcactcttcccagaccaccccctcctacaggagcgggagaagattgtggctcccatcagtgactccccgaagccaccgccacagcgtgtgaccctcacactacctgtcctgaatgcagcacgaactgtcatctttgtggcaactggagaaggcaaggcagctgttctgaagcgcattttggaggaccaggaggaaaacccgctgcccgccgccctggtccagccccacaccgggaaactgtgctggttcttggacgaggcggccgcccgcctcctgaccgtgcccttcgagaagcattccactttgtagctggccagagggacgccgcagctgggaccaggcacgcggcccatggggctgggcccctgctggccgccactctccgggctctcctttcaaaaagccacgtcgtgctgctgctggaagccaacagcctccggccagcagccctacccggggctcaacacacaggctgtggctctggacatccggatattaaaaggagcgttgctggaa

SEQ ID NO: 103001 - DNA, 880 bp, Homo sapiens
  Payload ID: 97
  Gene Symbol: PGLS
  Gene Name: 6-phosphogluconolactonase
  ENST ID: ENST00000594761
  CDS Start-End: 38-577
tagggagcgcttcctcctccccgccgccgccctcgccatggccgcgccggccccgggcctcatctcggtgttctcgagttcccaggagctgggtgcggcgctagcgcagctggtggcccagcgcgcagcatgctgcctggcaggggcccgcgcccgtttcgcgctcggcctgtcgggcgggagcctcgtctcgatgctagcccgcgagctacccgccgccgtcgcccctgccgggccagctagcttagcgcgctggacgctgggcttctgcgacgagcgcctcgtgcccttcgatcacgccgagagcacgtacggcctctaccggacgcatcttctctccagactgccgatcccagaaagccaggtgatcaccattaaccccgagctgcctgtggaggaggcggctgaggactacgccaagaagctgagacaggaactgccccagggatcactggcagatccctttgaggaatcccctcttcgaggccacagccctgccctggggagcctgaaggccactcggcctctgttgcccaggcattccaaggggactccatcccggttttcgacctgctgatcctgggggtgggccccgatggtcacacctgctcactcttcccagaccaccccctcctacaggagcgggagaagattgtggctcccatcagtgactccccgaagccaccgccacagcgtgtgaccctcacactacctgtcctgaatgcagcacgaactgtcatctttgtggcaactggagaaggcaaggcagctgttctgaagcgcattttggaggaccaggaggaaaacccgctgcccgccgccctggtccagccccacaccgggaaactgtgctggttcttggacgaggcggccgcccgcc

SEQ ID NO: 103002 - DNA, 651 bp, Homo sapiens
  Payload ID: 97
  Gene Symbol: PGLS
  Gene Name: 6-phosphogluconolactonase
  ENST ID: ENST00000595782
  CDS Start-End: 1-444
gccgggccagctagcttagcgcgctggacgctgggcttctgcgacgagcgcctcgtgcccttcgatcacgccgagagcacgtacggcctctaccggacgcatcttctctccagactgccgatcccagaaagccaggtgatcaccattaaccccgagctgcctgtggaggaggcggctgaggactacgccaagaagctgagacaggcattccaaggggactccatcccggttttcgacctgctgatcctgggggtgggccccgatggtcacacctgctcactcttcccagaccaccccctcctacagcgcattttggaggaccaggaggaaaacccgctgcccgccgccctggtccagccccacaccgggaaactgtgctggttcttggacgaggcggccgcccgcctcctgaccgtgcccttcgagaagcattccactttgtagctggccagagggacgccgcagctgggaccaggcacgcggcccatggggctgggcccctgctggccgccactctccgggctctcctttcaaaaagccacgtcgtgctgctgctggaagccaacagcctccggccagcagccctacccggggctcaacacacaggctgtggctctggacatccggatattaaaaggagcgttgctggaa

SEQ ID NO: 103003 - DNA, 651 bp, Homo sapiens
  Payload ID: 97
  Gene Symbol: PGLS
  Gene Name: 6-phosphogluconolactonase
  ENST ID: ENST00000600923
  CDS Start-End: 4-651
gccatggccgcgccggccccgggcctcatctcggtgttctcgagttcccaggagctgggtgcggcgctagcgcagctggtggcccagcgcgcagcatgctgcctggcaggggcccgcgcccgtttcgcgctcggcctgtcgggcgggagcctcgtctcgatgctagcccgcgagctacccgccgccgtcgcccctgccgggccagctagcttagcgcgctggacgctgggcttctgcgacgagcgcctcgtgcccttcgatcacgccgagagcacgtacggcctctaccggatggagaaactgaggccagaagagacgcatcttctctccagactgccgatcccagaaagccaggtgatcaccattaaccccgagctgcctgtggaggaggcggctgaggactacgccaagaagctgagacaggcattccaaggggactccatcccggttttcgacctgctgatcctgggggtgggccccgatggtcacacctgctcactcttcccagaccaccccctcctacaggagcgggagaagattgtggctcccatcagtgactccccgaagccaccgccacagcgtgtgaccctcacactacctgtcctgaatgcagcacgaactgtcatctttgtggcaactggagaaggcaag

SEQ ID NO: 103004 - DNA, 935 bp, Homo sapiens
  Payload ID: 98
  Gene Symbol: PTS
  Gene Name: 6-pyruvoyltetrahydropterin synthase
  Uniprot ID: Q03393
  ENST ID: ENST00000280362
  CDS Start-End: 80-517
gcgcagccgcggtgggaggaggcaccggccgcgcggcgggaggaggtgccggccgagcaccgcagacagcgccgggaagatgagcacggaaggtggtggccgtcgctgccaggcacaagtgtcccgccgcatctccttcagcgcgagccaccgattgtacagtaaatttctaagtgatgaagaaaacttgaaactgtttgggaaatgcaacaatccaaatggccatgggcacaattataaagttgtggtgacagtacatggagagattgaccctgctacgggaatggttatgaatctggctgatctcaaaaaatatatggaggaggcgattatgcagccccttgatcataagaatctggatatggatgtgccatactttgcagatgtggtgagcacgactgaaaatgtagctgtttatatctgggacaacctccagaaagttcttcctgtaggagttctttataaagtaaaagtatacgaaactgacaataatattgtggtttataaaggagaatagctattggggttagcattgcacaaagcccagtttctttctgtgtttgaaaaagattttgatccccttggaatattaagaggtcaacacgtgattgttgtacgtacacattgtgctctggagtgcctatttattgaaatcattgtaagacctgttataaatttaagtctatttaaaactaaacttgtaatatacatcctgaaaatcatttagagagtcttttatttataaattaaaaatcacttcattttcacaaaatgttttggtgtgggattatttgaaagcaaaagaaatctaattttgttttctccattacctcattttagtattaatttttacttggtataatatacatggttaaaatgcttatgtgacttcgagtaggtgaatcttaaagaaataaaattcaagtgaccacaaa

SEQ ID NO: 103005 - DNA, 625 bp, Homo sapiens
  Payload ID: 98
  Gene Symbol: PTS
  Gene Name: 6-pyruvoyltetrahydropterin synthase
  ENST ID: ENST00000525803
  CDS Start-End: 13-198
agcgccgggaagatgagcacggaaggtggtggccgtcgctgccaggcacaagtgtcccgccgcatctccttcagcgcgagccaccgattgtacagtaaatttctaagtgatgaagaaaacttgaaactgtttgggaaatgcaacaatccaaatggccatgggcacaattataaaggaggcgattatgcagccccttgatcataagaatctggatatggatgtgccatactttgcagatgtggtgagcacgactgaaaatgtagctgtttatatctgggacaacctccagaaagttcttcctgtaggagttctttataaagtaaaagtatacgaaactgacaataatattgtggtttataaaggagaatagctattggggttagcattgcacaaagcccagtttctttctgtgtttgaaaaagattttgatccccttggaatattaagaggtcaacacgtgattgttgtacgtacacattgtgctctggagtgcctatttattgaaatcattgtaagacctgttataaatttaagtctatttaaaactaaacttgtaatatacatcctgaaaatcatttagagagtcttttatttataaattaaaaatcacttcattttcacaaaa

SEQ ID NO: 103006 - DNA, 986 bp, Homo sapiens
  Payload ID: 98
  Gene Symbol: PTS
  Gene Name: 6-pyruvoyltetrahydropterin synthase
  ENST ID: ENST00000531673
  CDS Start-End: 57-224
accggccgcgcggcgggaggaggtgccggccgagcaccgcagacagcgccgggaagatgagcacggaaggtggtggccgtcgctgccaggcacaagtgtcccgccgcatctccttcagcgcgagccaccgattgtacagtaaatttctaagtgatgaagaaaacttgaaactgtttgggaaatgcaacaatccaaatggccatgggcacaattataaagattgaccctgctacgggaatggttatgaatctggctgatctcaaaaaatatatggaggaggcgattatgcagccccttgatcataagaatctggatatggatgtgccatactttgcagatgtggtgagttctccctggtctataacaggaatgccccttacccagcagcaggcagatatggccatgggtcaagacatcctgcttcatgaggaaaccttgttcccaccactgattcagactgcgtaacccttccagtgtttacccagagcatcagcagcaacttctgtggccatacacttctcataaacagcaaggcctcttcacagagcatctcccaacatgacggcctgcttcagcagagtgagcaggtactgggaggaggagatgaaccctgctcctgtggaggctatgaggtattgatgtcgtgtacacatccaaggggtggtctaattatttacaactaggctcctgaaaatcagccctgaatccagctttctaccttctcttttcaatatcatttaattaattgagtcacagaaacagcctttaattcatttaattcccttacattcttctaacttctgccatatatctcgtgatctgtgatttttccttttgcactgatttgatactatgtagtagcaactaaatatcgttacttataccatagcagctaatctttcttatcaacaaaaacaaataatgtccacattcctgaaaacaattaggctctatttctagccttgtgaacaaatgcaattttgtca

SEQ ID NO: 103007 - DNA, 696 bp, Homo sapiens
  Payload ID: 98
  Gene Symbol: PTS
  Gene Name: 6-pyruvoyltetrahydropterin synthase
  ENST ID: ENST00000524931
  CDS Start-End: 208-441
attgtaggcactcagtaatgttgaattgaaaagtggaaggcccatgagcagatcagttgctgtggaacaagggggttgaagttaagtaaatttctaagtgatgaagaaaacttgaaactgtttgggaaatgcaacaatccaaatggccatgggcacaattataaagttgtggtgacagtacatggagagattgaccctgctacgggaatggttatgaatctggctgatctcaaaaaatatatggaggaggcgattatgcagccccttgatcataagaatctggatatggatgtgccatactttgcagatgtggtgagcacgactgaaaatgtagctgtttatatctgggacaacctccagaaagttcttcctgtaggagttctttataaagtaaaagtatacgaaactgacaataatattgtggtttataaaggagaatagctattggggttagcattgcacaaagcccagtttctttctgtgtttgaaaaagattttgatccccttggaatattaagaggtcaacacgtgattgttgtacgtacacattgtgctctggagtgcctatttattgaaatcattgtaagacctgttataaatttaagtctatttaaaactaaacttgtaatatacatcctgaaaatcatttagagagtcttttatttataaattaaaaatcacttcattttcacaaaa

SEQ ID NO: 103008 - DNA, 846 bp, Homo sapiens
  Payload ID: 98
  Gene Symbol: PTS
  Gene Name: 6-pyruvoyltetrahydropterin synthase
  ENST ID: ENST00000528679
  CDS Start-End: 78-245
gcagccgcggtgggaggaggcaccggccgcgcggcgggaggaggtgccggccgagcaccgcagacagcgccgggaagatgagcacggaaggtggtggccgtcgctgccaggcacaagtgtcccgccgcatctccttcagcgcgagccaccgattgtacagtaaatttctaagtgatgaagaaaacttgaaactgtttgggaaatgcaacaatccaaatggccatgggcacaattataaagattgaccctgctacgggaatggttatgaatctggctgatctcaaaaaatatatggaggaggcgattatgcagccccttgatcataagaatctggatatggatgtgccatactttgcagatgtggtgagcacgactgaaaatgtagctgtttatatctgggacaacctccagaaagttcttcctgtaggagttctttataaagtaaaagtatacgaaactgacaataatattgtggtttataaaggagaatagctattggggttagcattgcacaaagcccagtttctttctgtgtttgaaaaagattttgatccccttggaatattaagaggtcaacacgtgattgttgtacgtacacattgtgctctggagtgcctatttattgaaatcattgtaagacctgttataaatttaagtctatttaaaactaaacttgtaatatacatcctgaaaatcatttagagagtcttttatttataaattaaaaatcacttcattttcacaaaatgttttggtgtgggattatttgaaagcaaaagaaatctaattttgttttctccattacctcattttagtattaatttttacttggtataatatacatgg

SEQ ID NO: 103009 - DNA, 2666 bp, Homo sapiens
  Payload ID: 99
  Gene Symbol: DHCR7
  Gene Name: 7-dehydrocholesterol reductase
  Uniprot ID: Q9UBM7
  ENST ID: ENST00000355527
  CDS Start-End: 278-1705
aggcaatcgctgacatcatccgggggcgggcgcccctgccctgcgggtgactccgacccctggctagagggtaggcggcgtggagcagcgcgcgcaagcgaggccaggggaaggtgggcgcaggtgaggggccgaggtgtgcgcaggactttagccggttgagaaggatcaagcaggcatttggagcacaggtgtctagaaacttttaaggggccggttcaagaaggaaaagttcccttctgctgtgaaactatttggcaagaggctggagggcccaatggctgcaaaatcgcaacccaacattcccaaagccaagagtctagatggcgtcaccaatgacagaaccgcatctcaagggcagtggggccgtgcctgggaggtggactggttttcactggcgagcgtcatcttcctactgctgttcgcccccttcatcgtctactacttcatcatggcttgtgaccagtacagctgcgccctgactggccctgtggtggacatcgtcaccggacatgctcggctctcggacatctgggccaagactccacctataacgaggaaagccgcccagctctataccttgtgggtcaccttccaggtgcttctgtacacgtctctccctgacttctgccataagtttctacccggctacgtaggaggcatccaggagggggccgtgactcctgcaggggttgtgaacaagtatcagatcaatggcctgcaagcctggctcctcacgcacctgctctggtttgcaaacgctcatctcctgtcctggttctcgcccaccatcatcttcgacaactggatcccactgctgtggtgcgccaacatccttggctatgccgtctccaccttcgccatggtcaagggctacttcttccccaccagcgccagagactgcaaattcacaggcaatttcttttacaactacatgatgggcatcgagtttaaccctcggatcgggaagtggtttgacttcaagctgttcttcaatgggcgccccgggatcgtcgcctggaccctcatcaacctgtccttcgcagcgaagcagcgggagctccacagccatgtgaccaatgccatggtcctggtcaacgtcctgcaggccatctacgtgattgacttcttctggaacgaaacctggtacctgaagaccattgacatctgccatgaccacttcgggtggtacctgggctggggcgactgtgtctggctgccttatctttacacgctgcagggtctgtacttggtgtaccaccccgtgcagctgtccaccccgcacgccgtgggcgtcctgctgctgggcctggtgggctactacatcttccgggtggccaaccaccagaaggacctgttccgccgcacggatgggcgctgcctcatctggggcaggaagcccaaggtcatcgagtgctcctacacatccgccgatgggcagaggcaccacagcaagctgctggtgtcgggcttctggggcgtggcccgccacttcaactacgtcggcgacctgatgggcagcctggcctactgcctggcctgtggcggcggccacctgctgccctacttctacatcatctacatggccatcctgctgacccaccgctgcctccgggacgagcaccgctgcgccagcaagtacggccgggactgggagcgctacaccgccgcagtgccttaccgcctgctgcctggaatcttctaagggcacgccctagggagaagccctgtggggctgtcaagagcgtgttctgccaggtccatgggggctggcatcccagctccaactcgaggagcctcagtttcctcatctgtaaactggagagagcccagcacttggcaggtgtccagtacctaatcacgctctgttccttgcttttgccttcaagggaattccgagtgtccagcactgccgtattgccagcacagacggattttctctaatcagtgtccctggggcaggaggatgacccagtcacctttactagtcctttggagacaatttacctgtattaggagcccaggccacgctacactctgcccacactggtgagcaggaggtcttcccacgccctgtcattaggctgcatttactcttgctaaataaaagtgggagtggggcgtgcgcgttatccatgtattgcctttcagctctagatccccctcccctgcctgctctgcagtcgtgggtggggcccgtgcgccgtttctccttggtagcgtgcacggtgttgaactgggacactggggagaaaggggctttcatgtcgtttccttcctgctcctgctgcacagctgccaggagtgctctgcctggagtctgcagacctcagagaggtcccagcaccggctgtggcctttcaggtgtaggcaggtgggctctgcttcccgattccctgtgagcgcccaccctctcgaaagaattttctgcttgccctatgactgtgcagactctggctcgagcaacccggggaacttcaccctcaggggcctcccacaccttctccagcgaggaggtctcagtcccagcctcgggagggcacctccttttctgtgctttcttccctgaggcattcttcctcatccctagggtgttgtgtagaactctttttaaactctatgctccgagtagagttcatctttatattaaacttcccctgttcaaa

SEQ ID NO: 103010 - DNA, 2601 bp, Homo sapiens
  Payload ID: 99
  Gene Symbol: DHCR7
  Gene Name: 7-dehydrocholesterol reductase
  Uniprot ID: Q9UBM7
  ENST ID: ENST00000407721
  CDS Start-End: 213-1640
gcgggtgactccgacccctggctagagggtaggcggcgtggagcagcgcgcgcaagcgaggccaggggaaggtgggcgcaggactttagccggttgagaaggatcaagcaggcatttggagcacaggtgtctagaaacttttaaggggccggttcaagaaggaaaagttcccttctgctgtgaaactatttggcaagaggctggagggcccaatggctgcaaaatcgcaacccaacattcccaaagccaagagtctagatggcgtcaccaatgacagaaccgcatctcaagggcagtggggccgtgcctgggaggtggactggttttcactggcgagcgtcatcttcctactgctgttcgcccccttcatcgtctactacttcatcatggcttgtgaccagtacagctgcgccctgactggccctgtggtggacatcgtcaccggacatgctcggctctcggacatctgggccaagactccacctataacgaggaaagccgcccagctctataccttgtgggtcaccttccaggtgcttctgtacacgtctctccctgacttctgccataagtttctacccggctacgtaggaggcatccaggagggggccgtgactcctgcaggggttgtgaacaagtatcagatcaatggcctgcaagcctggctcctcacgcacctgctctggtttgcaaacgctcatctcctgtcctggttctcgcccaccatcatcttcgacaactggatcccactgctgtggtgcgccaacatccttggctatgccgtctccaccttcgccatggtcaagggctacttcttccccaccagcgccagagactgcaaattcacaggcaatttcttttacaactacatgatgggcatcgagtttaaccctcggatcgggaagtggtttgacttcaagctgttcttcaatgggcgccccgggatcgtcgcctggaccctcatcaacctgtccttcgcagcgaagcagcgggagctccacagccatgtgaccaatgccatggtcctggtcaacgtcctgcaggccatctacgtgattgacttcttctggaacgaaacctggtacctgaagaccattgacatctgccatgaccacttcgggtggtacctgggctggggcgactgtgtctggctgccttatctttacacgctgcagggtctgtacttggtgtaccaccccgtgcagctgtccaccccgcacgccgtgggcgtcctgctgctgggcctggtgggctactacatcttccgggtggccaaccaccagaaggacctgttccgccgcacggatgggcgctgcctcatctggggcaggaagcccaaggtcatcgagtgctcctacacatccgccgatgggcagaggcaccacagcaagctgctggtgtcgggcttctggggcgtggcccgccacttcaactacgtcggcgacctgatgggcagcctggcctactgcctggcctgtggcggcggccacctgctgccctacttctacatcatctacatggccatcctgctgacccaccgctgcctccgggacgagcaccgctgcgccagcaagtacggccgggactgggagcgctacaccgccgcagtgccttaccgcctgctgcctggaatcttctaagggcacgccctagggagaagccctgtggggctgtcaagagcgtgttctgccaggtccatgggggctggcatcccagctccaactcgaggagcctcagtttcctcatctgtaaactggagagagcccagcacttggcaggtgtccagtacctaatcacgctctgttccttgcttttgccttcaagggaattccgagtgtccagcactgccgtattgccagcacagacggattttctctaatcagtgtccctggggcaggaggatgacccagtcacctttactagtcctttggagacaatttacctgtattaggagcccaggccacgctacactctgcccacactggtgagcaggaggtcttcccacgccctgtcattaggctgcatttactcttgctaaataaaagtgggagtggggcgtgcgcgttatccatgtattgcctttcagctctagatccccctcccctgcctgctctgcagtcgtgggtggggcccgtgcgccgtttctccttggtagcgtgcacggtgttgaactgggacactggggagaaaggggctttcatgtcgtttccttcctgctcctgctgcacagctgccaggagtgctctgcctggagtctgcagacctcagagaggtcccagcaccggctgtggcctttcaggtgtaggcaggtgggctctgcttcccgattccctgtgagcgcccaccctctcgaaagaattttctgcttgccctatgactgtgcagactctggctcgagcaacccggggaacttcaccctcaggggcctcccacaccttctccagcgaggaggtctcagtcccagcctcgggagggcacctccttttctgtgctttcttccctgaggcattcttcctcatccctagggtgttgtgtagaactctttttaaactctatgctccgagtagagttcatctttatattaaacttcccctgttcaaa

SEQ ID NO: 103011 - DNA, 979 bp, Homo sapiens
  Payload ID: 99
  Gene Symbol: DHCR7
  Gene Name: 7-dehydrocholesterol reductase
  ENST ID: ENST00000534795
  CDS Start-End: 1-349
cttttacaactacatgatgggcatcgagtttaaccctcggatcgggaagtggtttgacttcaagctgttcttcaatgggcgccccgggatcgtcgcctggaccctcatcaacctgtccttcgcagcgaagcagcgggagctccacagccatgtgaccaatgccatggtcctggtcaacgtcctgcaggccatctacgtgattgacttcttctggaacgaaacctggtacctgaagaccattgacatctgccatgaccacttcgggtggtacctgggctggggcgactgtgtctggctgccttatctttacacgctgcagatgagaaatgctgctgtggaggctgagtagaggcaggaagagctgccttccctttaagacttggagatgaccctggggagggcagcaaaggcgtctgcagaaccatctgggctgtttccccctggacaggactgcagggagctgcagggagctgcagggaggttcaccacggccctctgtaccttggaatacactaagatctccagggtgtggtggtcctatgcccacacatcccactgttaggagtgtcctcacagttatatcctgccatgtgcgaaatggctgcaagttcaaggctgtgcattgcagtgtcctgtgcaaaaaaaccgtgaaaagatcgggaacaagttatgcaaatcaagaggtgactgtttaattaagtgcatccacatgatggaatgttataaagctctcaaaaagaataggacagtcaactgatgatgaatcacattaacttaataaggaagaaaaaccactttattatatgaaatagatggagaaaaaaggacactaattcataataaaaacgcaaagacatccatagaaaacctacagctaacttcatatttaatgatgagatattggattctctcatcataagatcaagaacatggcaagaattttcactgccacttcttccaaattacattagagatccta

SEQ ID NO: 103012 - DNA, 507 bp, Homo sapiens
  Payload ID: 99
  Gene Symbol: DHCR7
  Gene Name: 7-dehydrocholesterol reductase
  ENST ID: ENST00000531364
  CDS Start-End: 191-507
gtggagcagcgcgcgcaagcgaggccaggggaaggtgggcgcaggtgaggggccgaggtgtgcgcagccggttgagaaggatcaagcaggcatttggagcacaggtgtctagaaacttttaaggggccggttcaagaaggaaaagttcccttctgctgtgaaactatttggcaagaggctggagggcccaatggctgcaaaatcgcaacccaacattcccaaagccaagagtctagatggcgtcaccaatgacagaaccgcatctcaagggcagtggggccgtgcctgggaggtggactggttttcactggcgagcgtcatcttcctactgctgttcgcccccttcatcgtctactacttcatcatggcttgtgaccagtacagctgcgccctgactggccctgtggtggacatcgtcaccggacatgctcggctctcggacatctgggccaagactccacctataacgaggaaagccgcccagctctataccttgtgggtcacctt

SEQ ID NO: 103013 - DNA, 837 bp, Homo sapiens
  Payload ID: 99
  Gene Symbol: DHCR7
  Gene Name: 7-dehydrocholesterol reductase
  ENST ID: ENST00000533800
  CDS Start-End: 1-666
atcaacctgtccttcgcagcgaagcagcgggagctccacagccatgtgaccaatgccatggtcctggtcaacgtcctgcaggccatctacgtgattgacttcttctggaacgaaacctggtacctgaagaccattgacatctgccatgaccacttcgggtggtacctgggctggggcgactgtgtctggctgccttatctttacacgctgcagggtctgtacttggtgtaccaccccgtgcagctgtccaccccgcacgccgtgggcgtcctgctgctgggcctggtgggctactacatcttccgggtggccaaccaccagaaggacctgttccgccgcacggatgggcgctgcctcatctggggcaggaagcccaaggtcatcgagtgctcctacacatccgccgatgggcagaggcaccacagcaagctgctggtgtcgggcttctggggcgtggcccgccacttcaactacgtcggcgacctgatgggcagcctggcctactgcctggcctgtggcggcggccacctgctgccctacttctacatcatctacatggccatcctgctgacccaccgctgcctccgggacgagcaccgctgcgccagcaaggaattccgagtgtccagcactgccgtattgccagcacagacggattttctctaatcagtgtccctggggcaggaggatgacccagtcacctttactagtcctttggagacaatttacctgtattaggagcccaggccacgctacactctgcccacactggtgagcaggaggtcttcccacgccctgtcattaggctgcatttactcttgctaaataaaagtggga

SEQ ID NO: 103014 - DNA, 1005 bp, Homo sapiens
  Payload ID: 99
  Gene Symbol: DHCR7
  Gene Name: 7-dehydrocholesterol reductase
  ENST ID: ENST00000527316
  CDS Start-End: 230-1005
gactccgacccctggctagagggtaggcggcgtggagcagcgcgcgcaagcgaggccaggggaaggtgggcgcaggtgaggggccgaggtgtgcgcaggactttagccggttgagaaggatcaagcaggcatttggagcacaggtgtctagaaacttttaaggggccggttcaagaaggaaaagttcccttctgctgtgaaactatttggcaagaggctggagggcccaatggctgcaaaatcgcaacccaacattcccaaagccaagagtctagatggcgtcaccaatgacagaaccgcatctcaagggcagtggggccgtgcctgctgcgccctgactggccctgtggtggacatcgtcaccggacatgctcggctctcggacatctgggccaagactccacctataacgaggaaagccgcccagctctataccttgtgggtcaccttccaggtgcttctgtacacgtctctccctgacttctgccataagtttctacccggctacgtaggaggcatccaggagggggccgtgactcctgcaggggttgtgaacaagtatcagatcaatggcctgcaagcctggctcctcacgcacctgctctggtttgcaaacgctcatctcctgtcctggttctcgcccaccatcatcttcgacaactggatcccactgctgtggtgcgccaacatccttggctatgccgtctccaccttcgccatggtcaagggctacttcttccccaccagcgccagagactgcaaattcacaggcaatttcttttacaactacatgatgggcatcgagtttaaccctcggatcgggaagtggtttgacttcaagctgttcttcaatgggcgccccgggatcgtcgcctggaccctcatcaacctgtccttcgcagcgaagcagcgggagctccacagccatgtgaccaatgccatggtcctggtcaacgtcctgcaggccatctacgtgattgacttcttctggaacgaaacctggta

SEQ ID NO: 103015 - DNA, 525 bp, Homo sapiens
  Payload ID: 99
  Gene Symbol: DHCR7
  Gene Name: 7-dehydrocholesterol reductase
  ENST ID: ENST00000529990
  CDS Start-End: 306-525
gtaggcggcgtggagcagcgcgcgcaagcgaggccaggggaaggtgggcgcaggtgaggggccgaggtgtgcgcaggactttagccggttgagaaggatcaagcaggcatttggagcacaggtgtctagaaacttttaaggggccggttcaagaaggaaaagttcccttctgctgtgaaactatttggcaagaggctggagggcccaatggctgcaaaatcgcaacccaacattcccaaagccaagagtctagatggcgtcaccaatgacagaaccgcatctcaagggcagtggggccgtgcctgatgggccccagtgtgactgcctgcatccgtcctcgcagggaggtggactggttttcactggcgagcgtcatcttcctactgctgttcgcccccttcatcgtctactacttcatcatggcttgtgaccagtacagctgcgccctgactggccctgtggtggacatcgtcaccggacatgctcggctctcggacatctgggccaagactccacctataacga

SEQ ID NO: 103016 - DNA, 968 bp, Homo sapiens
  Payload ID: 99
  Gene Symbol: DHCR7
  Gene Name: 7-dehydrocholesterol reductase
  ENST ID: ENST00000526780
  CDS Start-End: 476-968
acgagccggcgtctgagggatgctctgtccccgcgctgtctggagcttccccgggcgaaggctgcctggctccggggtcggctcctggccccatgccgcgctccgcggcggctctttctcctgccccacctgttgttcgcctccctctttgtcagtgctgagccaggcacagcagctttgcgatgggactggcttgtccgccgtcctccctgacatgcggctgttgaagccctgagcactggaccttctgcctcttgcttgactcctactgtgggccttgagcttctgccctctcctgaaatgtcagctgcctgcggtcttattcatttttgtgttccttgcaggactttagccggttgagaaggatcaagcaggcatttggagcacaggtgtctagaaacttttaaggggccggttcaagaaggaaaagttcccttctgctgtgaaactatttggcaagaggctggagggcccaatggctgcaaaatcgcaacccaacattcccaaagccaagagtctagatggcgtcaccaatgacagaaccgcatctcaagggcagtggggccgtgcctgggaggtggactggttttcactggcgagcgtcatcttcctactgctgttcgcccccttcatcgtctactacttcatcatggcttgtgaccagtacagctgcgccctgactggccctgtggtggacatcgtcaccggacatgctcggctctcggacatctgggccaagactccacctataacgaggaaagccgcccagctctataccttgtgggtcaccttccaggtgcttctgtacacgtctctccctgacttctgccataagtttctacccggctacgtaggaggcatccaggagggggccgtgactcctgcaggggttgtgaacaagtatcagatcaatggcctgcaagcctggctcctcacgcacctgctctggtttgcaaacgctcatctcc

SEQ ID NO: 103017 - DNA, 520 bp, Homo sapiens
  Payload ID: 99
  Gene Symbol: DHCR7
  Gene Name: 7-dehydrocholesterol reductase
  ENST ID: ENST00000525346
  CDS Start-End: 200-520
gcgcaagcgaggccaggggaaggtgggcgcaggtgaggggccgaggtgtgcgcaggtgagtggccaaggactttagccggttgagaaggatcaagcaggcatttggagcacaggtgtctagaaacttttaaggggccggttcaagaaggaaaagttcccttctgctgtgaaactatttggcaagaggctggagggcccaatggctgcaaaatcgcaacccaacattcccaaagccaagagtctagatggcgtcaccaatgacagaaccgcatctcaagggcagtggggccgtgcctgggaggtggactggttttcactggcgagcgtcatcttcctactgctgttcgcccccttcatcgtctactacttcatcatggcttgtgaccagtacagctgcgccctgactggccctgtggtggacatcgtcaccggacatgctcggctctcggacatctgggccaagactccacctataacgaggaaagccgcccagctctataccttgtgggtcaccttccag

SEQ ID NO: 103018 - DNA, 996 bp, Homo sapiens
  Payload ID: 99
  Gene Symbol: DHCR7
  Gene Name: 7-dehydrocholesterol reductase
  ENST ID: ENST00000525137
  CDS Start-End: 1-738
acaggcaatttcttttacaactacatgatgggcatcgagtttaaccctcggatcgggaagtggtttgacttcaagctgttcttcaatgggcgccccgggatcgtcgcctggaccctcatcaacctgtccttcgcagcgaagcagcgggagctccacagccatgtgaccaatgccatggtcctggtcaacgtcctgcaggccatctacgtgattgacttcttctggaacgaaacctggtacctgaagaccattgacatctgccatgaccacttcgggtggtacctgggctggggcgactgtgtctggctgccttatctttacacgctgcagaagagaacacggaggcaaggcgtgtgtcagaggcagagctggggtttgaccccaggccgctgggcccccgagcccacactcctgtcctctccctgggcaaagcaccgcttgaccccttccccctcgccccccagggtctgtacttggtgtaccaccccgtgcagctgtccaccccgcacgccgtgggcgtcctgctgctgggcctggtgggctactacatcttccgggtggccaaccaccagaaggacctgttccgccgcacggatgggcgctgcctcatctggggcaggaagcccaaggtcatcgagtgctcctacacatccgccgatgggcagaggcaccacagcaagctgctggtgtcgggcttctggggcgtggcccgccacttcaactacgtcggcgacctgatgggcagcctggcctactgcctggcctgtggcggcggccacctgctgccctacttctacatcatctacatggccatcctgctgacccaccgctgcctccgggacgagcaccgctgcgccagcaagtacggccgggactgggagcgctacaccgccgcagtgccttaccgcctgctgcctggaatcttctaagggcacgccctagggagaagccctgtggggctgtcaagagcgtgttctgccaggtccatgggggctg

SEQ ID NO: 103019 - DNA, 579 bp, Homo sapiens
  Payload ID: 99
  Gene Symbol: DHCR7
  Gene Name: 7-dehydrocholesterol reductase
  ENST ID: ENST00000527452
  CDS Start-End: 307-579
atgaaacgttccaaatacaccaaaagtggagagtacggtaggagcgctccatcgtgcccgcgggacagcagacgatagcaatcgattctccgtgctgggaatcccgccaccctgggcggatggcgctgaattcttgggaaccctctcctgcccctttcactcctgtaccacgtgtgactttagccggttgagaaggatcaagcaggcatttggagcacaggtgtctagaaacttttaaggggccggttcaagaaggaaaagttcccttctgctgtgaaactatttggcaagaggctggagggcccaatggctgcaaaatcgcaacccaacattcccaaagccaagagtctagatggcgtcaccaatgacagaaccgcatctcaagggcagtggggccgtgcctgggaggtggactggttttcactggcgagcgtcatcttcctactgctgttcgcccccttcatcgtctactacttcatcatggcttgtgaccagtacagctgcgccctgactggccctgtggtggacatcgtcaccggacatgctcggctctcggacatctgggccaagactccacct

SEQ ID NO: 103020 - DNA, 1950 bp, Homo sapiens
  Payload ID: 100
  Gene Symbol: OGG1
  Gene Name: 8-oxoguanine DNA glycosylase
  Uniprot ID: O15527
  ENST ID: ENST00000349503
  CDS Start-End: 344-1417
ctacttccggtggtgctgtggtctgcccctggagaacccagaagaacacagctgtgcgcgcccacaggctctgggggcgggagaagataagtcgcaaggagggggcgggacctacacctcaggaaagccggagaattggggcacgaagcggggctttgatgacccgcaaagggcgaggcatgcaggaggtggaggaattaagtgaaacagggaaggttgttaaacagcaccgtgtgggcgaggccttaagggtcgtggtccttgtctgggcggggtctttgggcgtcgacgaggcctggttctgggtaggcggggctactacggggcggtgcctgctgtggaaatgcctgcccgcgcgcttctgcccaggcgcatggggcatcgtactctagcctccactcctgccctgtgggcctccatcccgtgccctcgctctgagctgcgcctggacctggttctgccttctggacaatctttccggtggagggagcaaagtcctgcacactggagtggtgtactagcggatcaagtatggacactgactcagactgaggagcagctccactgcactgtgtaccgaggagacaagagccaggctagcaggcccacaccagacgagctggaggccgtgcgcaagtacttccagctagatgttaccctggctcaactgtatcaccactggggttccgtggactcccacttccaagaggtggctcagaaattccaaggtgtgcgactgctgcgacaagaccccatcgaatgccttttctcttttatctgttcctccaacaacaacatcgcccgcatcactggcatggtggagcggctgtgccaggcttttggacctcggctcatccagcttgatgatgtcacctaccatggcttccccagcctgcaggccctggctgggccagaggtggaggctcatctcaggaagctgggcctgggctatcgtgcccgttacgtgagtgccagtgcccgagccatcctggaagaacagggcgggctagcctggctgcagcagctacgagagtcctcatatgaggaggcccacaaggccctctgcatcctgcctggagtgggcaccaagggcctccttggcaatgcatttgatggccaccagcttctgcgtcctcttatcttctgccaggatcacctccgagaaggcccccctatcgggagaggggattcacaaggtgaagaactggaaccccagcttccctccagcctctcctccattccctatgggttctgtgaccactgctggaccaaggacgtggatgaccctcccctagtcactcatccatcccctggctccagagatggtcacatgacccaggcctggccagtcaaagtagtctctcccctggccacagtaattggtcatgtgatgcaagccagcttactagcactttgagaatgagtctcctgttgagctggtaggatgtaagcctggagctaatggcgatcatctttgccaccacctggggagagcctgcttgggaatgaaattaacacaaaggaagtccaacctgagaaatggccaaatatatttcctgataacattatgtggccctctggatccagccatgcctgaggtctacccctgggcttttggattatgtgtacagttggttcatccctttttctgctaattcgagtcatggctaatttaacaccctttagaaccttaaagaaccatcagcatcacccgggaacttttttagaaatgcaaaatctctactgctttggatcctgggtcaaaaaaaagaaaaaaaaaagaaatgcaaaactttaggccctgccccagatttactaaatcaatctgcagtttaacaaaatcctcaggtgatttgtatgctcattgaactttaagaagcagtgttttagaacaggttcttaaaaaggaacaaataaactcatttaactaaagttaactgattaaagagg

SEQ ID NO: 103021 - DNA, 2191 bp, Homo sapiens
  Payload ID: 100
  Gene Symbol: OGG1
  Gene Name: 8-oxoguanine DNA glycosylase
  Uniprot ID: O15527
  ENST ID: ENST00000302008
  CDS Start-End: 215-1285
ggagaattggggcacgaagcggggctttgatgacccgcaaagggcgaggcatgcaggaggtggaggaattaagtgaaacagggaaggttgttaaacagcaccgtgtgggcgaggccttaagggtcgtggtccttgtctgggcggggtctttgggcgtcgacgaggcctggttctgggtaggcggggctactacggggcggtgcctgctgtggaaatgcctgcccgcgcgcttctgcccaggcgcatggggcatcgtactctagcctccactcctgccctgtgggcctccatcccgtgccctcgctctgagctgcgcctggacctggttctgccttctggacaatctttccggtggagggagcaaagtcctgcacactggagtggtgtactagcggatcaagtatggacactgactcagactgaggagcagctccactgcactgtgtaccgaggagacaagagccaggctagcaggcccacaccagacgagctggaggccgtgcgcaagtacttccagctagatgttaccctggctcaactgtatcaccactggggttccgtggactcccacttccaagaggtggctcagaaattccaaggtgtgcgactgctgcgacaagaccccatcgaatgccttttctcttttatctgttcctccaacaacaacatcgcccgcatcactggcatggtggagcggctgtgccaggcttttggacctcggctcatccagcttgatgatgtcacctaccatggcttccccagcctgcaggccctggctgggccagaggtggaggctcatctcaggaagctgggcctgggctatcgtgcccgttacgtgagtgccagtgcccgagccatcctggaagaacagggcgggctagcctggctgcagcagctacgagagtcctcatatgaggaggcccacaaggccctctgcatcctgcctggagtgggcaccaaggtggctgactgcatctgcctgatggccctagacaagccccaggctgtgcccgtggatgtccatatgtggcacattgcccaacgtgactacagctggcaccctaccacgtcccaggcgaagggaccgagcccccagaccaacaaggaactgggaaactttttccggagcctgtggggaccttatgctggctgggcccaagcgctctgtcaggtcatcaccacttttatgacctttctcggaccccataggctggatcagatgcctcctgaagaattacagacttcttcctctagacttggagggcctccttggcaatgcatttgatggccaccagcttctgcgtcctcttatcttctgccaggatcacctccgagaaggcccccctatcgggagaggggattcacaaggtgaagaactggaaccccagcttccctccagcctctcctccattccctatgggttctgtgaccactgctggaccaaggacgtggatgaccctcccctagtcactcatccatcccctggctccagagatggtcacatgacccaggcctggccagtcaaagtagtctctcccctggccacagtaattggtcatgtgatgcaagccagcttactagcactttgagaatgagtctcctgttgagctggtaggatgtaagcctggagctaatggcgatcatctttgccaccacctggggagagcctgcttgggaatgaaattaacacaaaggaagtccaacctgagaaatggccaaatatatttcctgataacattatgtggccctctggatccagccatgcctgaggtctacccctgggcttttggattatgtgtacagttggttcatccctttttctgctaattcgagtcatggctaatttaacaccctttagaaccttaaagaaccatcagcatcacccgggaacttttttagaaatgcaaaatctctactgctttggatcctgggtcaaaaaaaagaaaaaaaaaagaaatgcaaaactttaggccctgccccagatttactaaatcaatctgcagtttaacaaaatcctcaggtgatttgtatgctcattgaactttaagaagcagtgttttagaacaggttcttaaaaaggaacaaataaactcatttaactaaagttaactgattaaagaggatttgctagggtattctttccacatctgtttgctttctctgggagaataagaagtcataagtcaaagaa

SEQ ID NO: 103022 - DNA, 1655 bp, Homo sapiens
  Payload ID: 100
  Gene Symbol: OGG1
  Gene Name: 8-oxoguanine DNA glycosylase
  Uniprot ID: O15527
  ENST ID: ENST00000302003
  CDS Start-End: 344-1576
ctacttccggtggtgctgtggtctgcccctggagaacccagaagaacacagctgtgcgcgcccacaggctctgggggcgggagaagataagtcgcaaggagggggcgggacctacacctcaggaaagccggagaattggggcacgaagcggggctttgatgacccgcaaagggcgaggcatgcaggaggtggaggaattaagtgaaacagggaaggttgttaaacagcaccgtgtgggcgaggccttaagggtcgtggtccttgtctgggcggggtctttgggcgtcgacgaggcctggttctgggtaggcggggctactacggggcggtgcctgctgtggaaatgcctgcccgcgcgcttctgcccaggcgcatggggcatcgtactctagcctccactcctgccctgtgggcctccatcccgtgccctcgctctgagctgcgcctggacctggttctgccttctggacaatctttccggtggagggagcaaagtcctgcacactggagtggtgtactagcggatcaagtatggacactgactcagactgaggagcagctccactgcactgtgtaccgaggagacaagagccaggctagcaggcccacaccagacgagctggaggccgtgcgcaagtacttccagctagatgttaccctggctcaactgtatcaccactggggttccgtggactcccacttccaagaggtggctcagaaattccaaggtgtgcgactgctgcgacaagaccccatcgaatgccttttctcttttatctgttcctccaacaacaacatcgcccgcatcactggcatggtggagcggctgtgccaggcttttggacctcggctcatccagcttgatgatgtcacctaccatggcttccccagcctgcaggccctggctgggccagaggtggaggctcatctcaggaagctgggcctgggctatcgtgcccgttacgtgagtgccagtgcccgagccatcctggaagaacagggcgggctagcctggctgcagcagctacgagagtcctcatatgaggaggcccacaaggccctctgcatcctgcctggagtgggcaccaaggtggctgactgcatctgcctgatggccctagacaagccccaggctgtgcccgtggatgtccatatgtggcacattgcccaacgtgactacagctggcaccctaccacgtcccaggcgaagggaccgagcccccagaccaacaaggaactgggaaactttttccggagcctgtggggaccttatgctggctgggcccaagcgactccaccctcctacaggtgctgttcagtgccgacctgcgccaatcccgccatgctcaggagccaccagcaaagcgcagaaagggttccaaagggccggaaggctagatggggcaccctggacaaagaaattccccaagcaccttcccctccattccccacttctctctccccatccccacccagtctcatgttggggaggggcctccctgtgactacctcaaaggccaggcacccccaaatcaagcagtcagtttgcacaacaagatggggtgggggatattgagggagacagcgctaaggatggttttatcttccctttattacaagaaggaacaataaaatagaaacatttgtatggaaaa

SEQ ID NO: 103023 - DNA, 2220 bp, Homo sapiens
  Payload ID: 100
  Gene Symbol: OGG1
  Gene Name: 8-oxoguanine DNA glycosylase
  Uniprot ID: O15527
  ENST ID: ENST00000302036
  CDS Start-End: 344-1618
ctacttccggtggtgctgtggtctgcccctggagaacccagaagaacacagctgtgcgcgcccacaggctctgggggcgggagaagataagtcgcaaggagggggcgggacctacacctcaggaaagccggagaattggggcacgaagcggggctttgatgacccgcaaagggcgaggcatgcaggaggtggaggaattaagtgaaacagggaaggttgttaaacagcaccgtgtgggcgaggccttaagggtcgtggtccttgtctgggcggggtctttgggcgtcgacgaggcctggttctgggtaggcggggctactacggggcggtgcctgctgtggaaatgcctgcccgcgcgcttctgcccaggcgcatggggcatcgtactctagcctccactcctgccctgtgggcctccatcccgtgccctcgctctgagctgcgcctggacctggttctgccttctggacaatctttccggtggagggagcaaagtcctgcacactggagtggtgtactagcggatcaagtatggacactgactcagactgaggagcagctccactgcactgtgtaccgaggagacaagagccaggctagcaggcccacaccagacgagctggaggccgtgcgcaagtacttccagctagatgttaccctggctcaactgtatcaccactggggttccgtggactcccacttccaagaggtggctcagaaattccaaggtgtgcgactgctgcgacaagaccccatcgaatgccttttctcttttatctgttcctccaacaacaacatcgcccgcatcactggcatggtggagcggctgtgccaggcttttggacctcggctcatccagcttgatgatgtcacctaccatggcttccccagcctgcaggccctggctgggccagaggtggaggctcatctcaggaagctgggcctgggctatcgtgcccgttacgtgagtgccagtgcccgagccatcctggaagaacagggcgggctagcctggctgcagcagctacgagagtcctcatatgaggaggcccacaaggccctctgcatcctgcctggagtgggcaccaaggtggctgactgcatctgcctgatggccctagacaagccccaggctgtgcccgtggatgtccatatgtggcacattgcccaacgtgactacagctggcaccctaccacgtcccaggcgaagggaccgagcccccagaccaacaaggaactgggaaactttttccggagcctgtggggaccttatgctggctgggcccaagcgggcctccttggcaatgcatttgatggccaccagcttctgcgtcctcttatcttctgccaggatcacctccgagaaggcccccctatcgggagaggggattcacaaggtgaagaactggaaccccagcttccctccagcctctcctccattccctatgggttctgtgaccactgctggaccaaggacgtggatgaccctcccctagtcactcatccatcccctggctccagagatggtcacatgacccaggcctggccagtcaaagtagtctctcccctggccacagtaattggtcatgtgatgcaagccagcttactagcactttgagaatgagtctcctgttgagctggtaggatgtaagcctggagctaatggcgatcatctttgccaccacctggggagagcctgcttgggaatgaaattaacacaaaggaagtccaacctgagaaatggccaaatatatttcctgataacattatgtggccctctggatccagccatgcctgaggtctacccctgggcttttggattatgtgtacagttggttcatccctttttctgctaattcgagtcatggctaatttaacaccctttagaaccttaaagaaccatcagcatcacccgggaacttttttagaaatgcaaaatctctactgctttggatcctgggtcaaaaaaaagaaaaaaaaaagaaatgcaaaactttaggccctgccccagatttactaaatcaatctgcagtttaacaaaatcctcaggtgatttgtatgctcattgaactttaagaagcagtgttttagaacaggttcttaaaaaggaacaaataaactcatttaactaaagttaactgattaaagaggatttgctagggtattctttccacatctgtttgctttctctgggagaataagaagtcataagtcaaagaa

SEQ ID NO: 103024 - DNA, 1744 bp, Homo sapiens
  Payload ID: 100
  Gene Symbol: OGG1
  Gene Name: 8-oxoguanine DNA glycosylase
  Uniprot ID: O15527
  ENST ID: ENST00000344629
  CDS Start-End: 344-1381
ctacttccggtggtgctgtggtctgcccctggagaacccagaagaacacagctgtgcgcgcccacaggctctgggggcgggagaagataagtcgcaaggagggggcgggacctacacctcaggaaagccggagaattggggcacgaagcggggctttgatgacccgcaaagggcgaggcatgcaggaggtggaggaattaagtgaaacagggaaggttgttaaacagcaccgtgtgggcgaggccttaagggtcgtggtccttgtctgggcggggtctttgggcgtcgacgaggcctggttctgggtaggcggggctactacggggcggtgcctgctgtggaaatgcctgcccgcgcgcttctgcccaggcgcatggggcatcgtactctagcctccactcctgccctgtgggcctccatcccgtgccctcgctctgagctgcgcctggacctggttctgccttctggacaatctttccggtggagggagcaaagtcctgcacactggagtggtgtactagcggatcaagtatggacactgactcagactgaggagcagctccactgcactgtgtaccgaggagacaagagccaggctagcaggcccacaccagacgagctggaggccgtgcgcaagtacttccagctagatgttaccctggctcaactgtatcaccactggggttccgtggactcccacttccaagaggtggctcagaaattccaaggtgtgcgactgctgcgacaagaccccatcgaatgccttttctcttttatctgttcctccaacaacaacatcgcccgcatcactggcatggtggagcggctgtgccaggcttttggacctcggctcatccagcttgatgatgtcacctaccatggcttccccagcctgcaggccctggctgggccagaggtggaggctcatctcaggaagctgggcctgggctatcgtgcccgttacgtgagtgccagtgcccgagccatcctggaagaacagggcgggctagcctggctgcagcagctacgagagtcctcatatgaggaggcccacaaggccctctgcatcctgcctggagtgggcaccaaggtggctgactgcatctgcctgatggccctagacaagccccaggctgtgcccgtggatgtccatatgtggcacattgcccaacgtgactacagctggcaccctaccacgtcccaggcgaagggaccgagcccccagaccaacaaggaactgggaaactttttccggagcctgtggggaccttatgctggctgggcccaagcggtgctgttcagtgccgacctgcgccaatcccgccatgctcaggagccaccagcaaagcgcagaaagggttccaaagggccggaaggctagatggggcaccctggacaaagaaattccccaagcaccttcccctccattccccacttctctctccccatccccacccagtctcatgttggggaggggcctccctgtgactacctcaaaggccaggcacccccaaatcaagcagtcagtttgcacaacaagatggggtgggggatattgagggagacagcgctaaggatggttttatcttccctttattacaagaaggaacaataaaatagaaacatttgtatggaaaatgcagtgaggagtggtagggaagcaggtgaggaggggacagggcagagaaactcccggttcagggagggaaggggagcaggctgcccccaagccctcccacgcaga

SEQ ID NO: 103025 - DNA, 1392 bp, Homo sapiens
  Payload ID: 100
  Gene Symbol: OGG1
  Gene Name: 8-oxoguanine DNA glycosylase
  ENST ID: ENST00000352937
  CDS Start-End: 1-790
cgtgcgcaagtacttccagctagatgttaccctggctcaactgtatcaccactggggttccgtggactcccacttccaagaggtggctcagaaattccaaggtgtgcgactgctgcgacaagaccccatcgaatgccttttctcttttatctgttcctccaacaacaacatcgcccgcatcactggcatggtggagcggctgtgccaggcttttggacctcggctcatccagcttgatgatgtcacctaccatggcttccccagcctgcaggccctggctgggccagaggtggaggctcatctcaggaagctgggcctgggctatcgtgcccgttacgtgagtgccagtgcccgagccatcctggaagaacagggcgggctagcctggctgcagcagctacgagagtcctcatatgaggaggcccacaaggccctctgcatcctgcctggagtgggcaccaagggcctccttggcaatgcatttgatggccaccagcttctgcgtcctcttatcttctgccaggatcacctccgagaaggcccccctatcgggagaggggattcacaaggtgaagaactggaaccccagcttccctccagcctctcctccattccctatgggttctgtgaccactgctggaccaaggacgtggatgaccctcccctagtcactcatccatcccctggctccagagatggtcacatgacccaggcctggccagtcaaagtagtctctcccctggccacagtaattggtcatgtgatgcaagccagcttactagcactttgagaatgagtctcctgttgagctggtaggatgtaagcctggagctaatggcgatcatctttgccaccacctggggagagcctgcttgggaatgaaattaacacaaaggaagtccaacctgagaaatggccaaatatatttcctgataacattatgtggccctctggatccagccatgcctgaggtctacccctgggcttttggattatgtgtacagttggttcatccctttttctgctaattcgagtcatggctaatttaacaccctttagaaccttaaagaaccatcagcatcacccgggaacttttttagaaatgcaaaatctctactgctttggatcctgggtcaaaaaaaagaaaaaaaaaagaaatgcaaaactttaggccctgccccagatttactaaatcaatctgcagtttaacaaaatcctcaggtgatttgtatgctcattgaactttaagaagcagtgttttagaacaggttcttaaaaaggaacaaataaactcatttaactaaagttaactgattaaagaggatttgctagggtattctttccacatctgtttgctttctctgggagaataagaagtcataagtcaaagaa

SEQ ID NO: 103026 - DNA, 1815 bp, Homo sapiens
  Payload ID: 100
  Gene Symbol: OGG1
  Gene Name: 8-oxoguanine DNA glycosylase
  Uniprot ID: O15527
  ENST ID: ENST00000339511
  CDS Start-End: 307-1281
ccagaagaacacagctgtgcgcgcccacaggctctgggggcgggagaagataagtcgcaaggagggggcgggacctacacctcaggaaagccggagaattggggcacgaagcggggctttgatgacccgcaaagggcgaggcatgcaggaggtggaggaattaagtgaaacagggaaggttgttaaacagcaccgtgtgggcgaggccttaagggtcgtggtccttgtctgggcggggtctttgggcgtcgacgaggcctggttctgggtaggcggggctactacggggcggtgcctgctgtggaaatgcctgcccgcgcgcttctgcccaggcgcatggggcatcgtactctagcctccactcctgccctgtgggcctccatcccgtgccctcgctctgagctgcgcctggacctggttctgccttctggacaatctttccggtggagggagcaaagtcctgcacactggagtggtgtactagcggatcaagtatggacactgactcagactgaggagcagctccactgcactgtgtaccgaggagacaagagccaggctagcaggcccacaccagacgagctggaggccgtgcgcaagtacttccagctagatgttaccctggctcaactgtatcaccactggggttccgtggactcccacttccaagaggtggctcagaaattccaaggtgtgcgactgctgcgacaagaccccatcgaatgccttttctcttttatctgttcctccaacaacaacatcgcccgcatcactggcatggtggagcggctgtgccaggcttttggacctcggctcatccagcttgatgatgtcacctaccatggcttccccagcctgcaggccctggctgggccagaggtggaggctcatctcaggaagctgggcctgggctatcgtgcccgttacgtgagtgccagtgcccgagccatcctggaagaacagggcgggctagcctggctgcagcagctacgagagtcctcatatgaggaggcccacaaggccctctgcatcctgcctggagtgggcaccaaggtggctgactgcatctgcctgatggccctagacaagccccaggctgtgcccgtggatgtccatatgtggcacattgcccaacgtgactacagctggcaccctaccacgtcccaggcgaagggaccgagcccccagaccaacaaggaactgggaaactttttccggagcctgtggggaccttatgctggctgggcccaagcggtgagtgtacctaggtgtcctccctaggtttcctctcctccagcccagacccagtggactcttccaccaccgccccaggtggccctaaaggactctccagccacccctgtcccaaccccagtggattctcattgccttcggccctgttccccaaggactcttccacctcccaacactgtcactagtctcaccagccctgaccccagtgtaccctcctccccacacagactccaccctcctacaggtgctgttcagtgccgacctgcgccaatcccgccatgctcaggagccaccagcaaagcgcagaaagggttccaaagggccggaaggctagatggggcaccctggacaaagaaattccccaagcaccttcccctccattccccacttctctctccccatccccacccagtctcatgttggggaggggcctccctgtgactacctcaaaggccaggcacccccaaatcaagcagtcagtttgcacaacaagatggggtgggggatattgagggagacagcgctaaggatggttttatcttccctttattacaagaagga

SEQ ID NO: 103027 - DNA, 1069 bp, Homo sapiens
  Payload ID: 100
  Gene Symbol: OGG1
  Gene Name: 8-oxoguanine DNA glycosylase
  Uniprot ID: O15527
  ENST ID: ENST00000383826
  CDS Start-End: 201-788
cgaagcggggctttgatgacccgcaaagggcgaggcatgcaggaggtggaggaattaagtgaaacagggaaggttgttaaacagcaccgtgtgggcgaggccttaagggtcgtggtccttgtctgggcggggtctttgggcgtcgacgaggcctggttctgggtaggcggggctactacggggcggtgcctgctgtggaaatgcctgcccgcgcgcttctgcccaggcgcatggggcatcgtactctagcctccactcctgccctgtgggcctccatcccgtgccctcgctctgagctgcgcctggacctggttctgccttctggacaatctttccggtggagggagcaaagtcctgcacactggagtggtgtactagcggatcaagtatggacactgactcagactgaggagcagctccactgcactgtgtaccgaggagacaagagccaggctagcaggcccacaccagacgagctggaggccgtgcgcaagtacttccagctagatgttaccctggctcaactgtatcaccactggggttccgtggactcccacttccaagaggtggctcagaaattccaaggtgtgcgactgctgcgacaagaccccatcgaatgccttttctcttttatctgttcctccaacaacaacatcgcccgcatcactggcatggtggagcggctgtgccaggcttttggacctcggctcatccagcttgatgatgtcacctaccatggcttccccagcctgcaggccctggctgggcctccttggcaatgcatttgatggccaccagcttctgcgtcctcttatcttctgccaggatcacctccgagaaggcccccctatcgggagaggggattcacaaggtgaagaactggaaccccagcttccctccagcctctcctccattccctatgggttctgtgaccactgctggaccaaggacgtggatgaccctcccctagtcactcatccatcccctggctccagagatggtcacatgacccaggcctggccagtcaaagtagtctctcccctggccacagtaattggtcatgtgatgc

SEQ ID NO: 103028 - DNA, 860 bp, Homo sapiens
  Payload ID: 100
  Gene Symbol: OGG1
  Gene Name: 8-oxoguanine DNA glycosylase
  ENST ID: ENST00000441094
  CDS Start-End: 1-668
tgccctgtgggcctccatcccgtgccctcgctctgagctgcgcctggacctggttctgccttctggacaatctttccggtgtgcgactgctgcgacaagaccccatcgaatgccttttctcttttatctgttcctccaacaacaacatcgcccgcatcactggcatggtggagcggctgtgccaggcttttggacctcggctcatccagcttgatgatgtcacctaccatggcttccccagcctgcaggccctggctgggccagaggtggaggctcatctcaggaagctgggcctgggctatcgtgcccgttacgtgagtgccagtgcccgagccatcctggaagaacagggcgggctagcctggctgcagcagctacgagagtcctcatatgaggaggcccacaaggccctctgcatcctgcctggagtgggcaccaaggtggctgactgcatctgcctgatggccctagacaagccccaggctgtgcccgtggatgtccatatgtggcacattgcccaacgtgactacagctggcaccctaccacgtcccaggcgaagggaccgagcccccagaccaacaaggaactgggaaactttttccggagcctgtggggaccttatgctggctgggcccaagcggtgagtgtacctaggtgtcctccctaggtttcctctcctccagcccagacccagtggactcttccaccaccgccccaggtggccctaaaggactctccagccacccctgtcccaaccccagtggattctcattgccttcggccctgttccccaaggactcttccacctcccaacactgtcactagtctcaccagccctgaccccagtgtaccctcctcc

SEQ ID NO: 103029 - DNA, 747 bp, Homo sapiens
  Payload ID: 100
  Gene Symbol: OGG1
  Gene Name: 8-oxoguanine DNA glycosylase
  ENST ID: ENST00000429146
  CDS Start-End: 1-505
ggcctccatcccgtgccctcgctctgagctgcgcctggacctggttctgccttctggacaatctttccggtggagggagcaaagtcctgcacactggagtggtgtactagcggatcaagtatggacactgactcagactgaggagcagctccactgcactgtgtaccgaggagacaagagccaggctagcaggcccacaccagacgagctggaggccgtgcgcaagtacttccagctagatgttaccctggctcaactgtatcaccactggggttccgtggactcccacttccaagaggtggctcagaaattccaaggtgtgcgactgctgcgacaagaccccatcgaatgccttttctcttttatctgttcctccaacaacaacatcgcccgcatcactggcatggtggagcggctgtgccaggcttttggacctcggctcatccagcttgatgatgtcacctaccatggcttccccagcctgcaggccctggctggtggctgactgcatctgcctgatggccctagacaagccccaggctgtgcccgtggatgtccatatgtggcacattgcccaacgtgactacagctggcaccctaccacgtcccaggcgaagggaccgagcccccagaccaacaaggaactgggaaactttttccggagcctgtggggaccttatgctggctgggcccaagcggtgagtgtacctaggtgtcctccctaggtttcctctcctccagcccaga

SEQ ID NO: 103030 - DNA, 930 bp, Homo sapiens
  Payload ID: 100
  Gene Symbol: OGG1
  Gene Name: 8-oxoguanine DNA glycosylase
  ENST ID: ENST00000425665
  CDS Start-End: 205-363
ggcacgaagcggggctttgatgacccgcaaagggcgaggcatgcaggaggtggaggaattaagtgaaacagggaaggttgttaaacagcaccgtgtgggcgaggccttaagggtcgtggtccttgtctgggcggggtctttgggcgtcgacgaggcctggttctgggtaggcggggctactacggggcggtgcctgctgtggaaatgcctgcccgcgcgcttctgcccaggcgcatggggcatcgtactctagcctccactcctgccctgtgggcctccatcccgtgccctcgctctgagctgcgcctggacctggttctgccttctggacaatctttccggtggctgactgcatctgcctgatggccctagacaagccccaggctgtgcccgtggatgtccatatgtggcacattgcccaacgtgactacagctggcaccctaccacgtcccaggcgaagggaccgagcccccagaccaacaaggaactgggaaactttttccggagcctgtggggaccttatgctggctgggcccaagcggtgagtgtacctaggtgtcctccctaggtttcctctcctccagcccagacccagtggactcttccaccaccgccccaggtggccctaaaggactctccagccacccctgtcccaaccccagtggattctcattgccttcggccctgttccccaaggactcttccacctcccaacactgtcactagtctcaccagccctgaccccagtgtaccctcctccccacacagactccaccctcctacaggtgctgttcagtgccgacctgcgccaatcccgccatgctcaggagccaccagcaaagcgcagaaagggttccaaagggccggaaggctagatggggcaccctggacaaagaaattccccaagcaccttcccctccattccccac

SEQ ID NO: 103031 - DNA, 874 bp, Homo sapiens
  Payload ID: 100
  Gene Symbol: OGG1
  Gene Name: 8-oxoguanine DNA glycosylase
  ENST ID: ENST00000426518
  CDS Start-End: 1-386
acgagctggaggccgtgcgcaagtacttccagctagatgttaccctggctcaactgtatcaccactggggttccgtggactcccacttccaagaggtggctcagaaattccaaggtgtgcgactgctgcgacaagaccccatcgaatgccttttctcttttatctgttcctccaacaacaacatcgcccgcatcactggcatggtggagcggctgtgccaggcttttggacctcggctcatccagcttgatgatgtcacctaccatggcttccccagcctgcaggccctggctggtgttccggtgccagcagaaggcctgcttacgtcggcatctgcattccagagccccctaaggtctaggcagcctgaggctgacaggagataaatttttaagaaatcagataagtgaagtgaaagagagagatcaaagtgttgtggcagcacaaaggagagactgactaactttctgctggggaatctgaaagagtgctttggtggaggtaacatgagatcagggccttgaagggtgagtcaagtctgtcaaggagacaagagggagagaagagcttgccagaggcccagagaccagcgaggaggctgtggtgtcctggaatgagggcgagatacttggtgggactggtcaacacggcaatgaagagggatatggccgaggaaaatggagaggggcactggagctgtgccagcaaggactgggatgcgtggacttgatcctgtagataacgggaggaagaaaggcctggatgcagcgccatgtcatgagcacatctgatcatgacagctcacctatgggaggattctccctcaacatttttctgtattttctaaattttctttaatggagcatgttttatt

SEQ ID NO: 103032 - DNA, 396 bp, Homo sapiens
  Payload ID: 100
  Gene Symbol: OGG1
  Gene Name: 8-oxoguanine DNA glycosylase
  ENST ID: ENST00000416333
  CDS Start-End: 1-396
tgatgatgtcacctaccatggcttccccagcctgcaggccctggctggtggctgactgcatctgcctgatggccctagacaagccccaggctgtgcccgtggatgtccatatgtggcacattgcccaacgtgactacagctggcaccctaccacgtcccaggcgaagggaccgagcccccagaccaacaaggaactgggaaactttttccggagcctgtggggaccttatgctggctgggcccaagcgactccaccctcctacaggtgctgttcagtgccgacctgcgccaatcccgccatgctcaggagccaccagcaaagcgcagaaagggttccaaagggccggaaggctagatggggcaccctggacaaagaaattccccaagcaccttccc

SEQ ID NO: 103033 - DNA, 1948 bp, Homo sapiens
  Payload ID: 100
  Gene Symbol: OGG1
  Gene Name: 8-oxoguanine DNA glycosylase
  Uniprot ID: O15527
  ENST ID: ENST00000449570
  CDS Start-End: 216-1184
cggagaattggggcacgaagcggggctttgatgacccgcaaagggcgaggcatgcaggaggtggaggaattaagtgaaacagggaaggttgttaaacagcaccgtgtgggcgaggccttaagggtcgtggtccttgtctgggcggggtctttgggcgtcgacgaggcctggttctgggtaggcggggctactacggggcggtgcctgctgtggaaatgcctgcccgcgcgcttctgcccaggcgcatggggcatcgtactctagcctccactcctgccctgtgggcctccatcccgtgccctcgctctgagctgcgcctggacctggttctgccttctggacaatctttccggtggagggagcaaagtcctgcacactggagtggtgtactagcggatcaagtatggacactgactcagactgaggagcagctccactgcactgtgtaccgaggagacaagagccaggctagcaggcccacaccagacgagctggaggccgtgcgcaagtacttccagctagatgttaccctggctcaactgtatcaccactggggttccgtggactcccacttccaagaggtggctcagaaattccaaggtgtgcgactgctgcgacaagaccccatcgaatgccttttctcttttatctgttcctccaacaacaacatcgcccgcatcactggcatggtggagcggctgtgccaggcttttggacctcggctcatccagcttgatgatgtcacctaccatggcttccccagcctgcaggccctggctgggccagaggtggaggctcatctcaggaagctgggcctgggctatcgtgcccgttacgtgagtgccagtgcccgagccatcctggaagaacagggcgggctagcctggctgcagcagctacgagagtcctcatatgaggaggcccacaaggccctctgcatcctgcctggagtgggcaccaaggtggctgactgcatctgcctgatggccctagacaagccccaggctgtgcccgtggatgtccatatgtggcacattgcccaacgtgactacagctggcaccctaccacgtcccaggcgaagggaccgagcccccagaccaacaaggaactgggaaactttttccggagcctgtggggaccttatgctggctgggcccaagcggctggatcagatgcctcctgaagaattacagacttcttcctctagacttggagggcctccttggcaatgcatttgatggccaccagcttctgcgtcctcttatcttctgccaggatcacctccgagaaggcccccctatcgggagaggggattcacaaggtgaagaactggaaccccagcttccctccagcctctcctccattccctatgggttctgtgaccactgctggaccaaggacgtggatgaccctcccctagtcactcatccatcccctggctccagagatggtcacatgacccaggcctggccagtcaaagtagtctctcccctggccacagtaattggtcatgtgatgcaagccagcttactagcactttgagaatgagtctcctgttgagctggtaggatgtaagcctggagctaatggcgatcatctttgccaccacctggggagagcctgcttgggaatgaaattaacacaaaggaagtccaacctgagaaatggccaaatatatttcctgataacattatgtggccctctggatccagccatgcctgaggtctacccctgggcttttggattatgtgtacagttggttcatccctttttctgctaattcgagtcatggctaatttaacaccctttagaaccttaaagaaccatcagcatcacccgggaacttttttagaaatgcaaaatctctactgctttggatcctgggtcaaaaaaaagaaaaaaaaaagaaatgcaaaactttaggccctgccccagatttactaaatc

SEQ ID NO: 103034 - DNA, 2380 bp, Homo sapiens
  Payload ID: 101
  Gene Symbol: AKAP1
  Gene Name: A kinase (PRKA) anchor protein 1
  Uniprot ID: Q92667
  ENST ID: ENST00000314126
  CDS Start-End: 63-1844
cccacccttggtggcagaaccgagcactacccagcaaggtgtaattacttcaagcctccaggatggcaatccagttccgttcgctcttccccttggcattgcctgggatgctggcgctcctcggctggtggtggtttttctctcgtaaaaaaggccatgtcagcagccatgatgagcagcaggtggaggctggtgctgtgcagctgagggctgaccctgccatcaaggaacctctccccgtggaagacgtctgtcccaaagtagtgtccacaccccccagtgtcacagagcctccagaaaaggaactgtccaccgtgagcaagctgcctgcagagcccccagcattgctccagacacacccaccttgccgaagatcagagtcctcgggcattcttcctaacaccacagacatgagattgcgaccaggaacacgcagagatgacagtacaaagctggagctagccctgacaggtggtgaagccaaatcgattcctctagagtgccccctttcatccccaaagggtgtactattctccagcaaatcagctgaggtgtgtaagcaagattcccccttcagcagggtgccaaggaaggtccagccaggctaccccgtagtccccgcagagaagcgtagctctggggagagggcaagagagacaggtggggccgaagggactggtgatgccgtgttgggggaaaaggtgcttgaagaagctctgttgtctcgggagcatgtcttggaattggagaacagcaagggccccagcctggcctctttagagggggaagaagataaggggaagagcagctcatcccaggtggtggggccagtgcaggaggaagagtatgtagcagagaagttgccaagtaggttcatcgagtcggctcacacagagctggcaaaggacgatgcggcgccagcacccccagtcgcagacgccaaagcccaggatagaggtgtcgagggagaactgggcaatgaggagagcttggatagaaatgaggagggcttggatagaaatgaggagggcttggatagaaatgaggagagcttggatagaaatgaggagggcttggatagaaatgaggagattaagcgggctgccttccagataatctcccaagtgatctcagaagcaaccgaacaggtgctggccaccacggttggcaaggttgcaggtcgtgtgtgtcaggccagtcagctccaagggcagaaggaagagagctgtgtcccagttcaccagaaaactgtcttgggcccagacactgcggagcctgccacagcagaggcagctgttgccccgccggatgctggcctccccttgccaggcctaccagcagagggctcaccaccaccaaagacctacgtgagctgcctgaagagccttctgtccagccccaccaaggacagtaagccaaatatctctgcacaccacatctccctggcctcctgcctggcactgaccacccccagtgaagagttgccggaccgggcaggcatcctggtggaagatgccacctgtgtcacctgcatgtcagacagcagccaaagtgtccctttggtggcttctccaggacactgctcagattctttcagcacttcagggcttgaagactcttgcacagagaccagctcgagccccagggacaaggccatcaccccgccactgccagaaagtactgtgcccttcagcaatggggtgctgaagggggagttgtcagacttgggggctgaggatggatggaccatggatgcggaagcagatcattcaggagttgcagctccacccccgggaaagcggggcactttgataacgaggtgtcctgggtttttcgagtgctgaccccagcgtagacagttcagaccgctaacttacaggttctgacaggaacagcatggattccgtggatagctgttgcagtctcaagaagactgagagcttccaaaatgcccaggcaggctccaaccctaagaaggtcgacctcatcatctgggagatcgaggtgccaaagcacttagtcggtcggctaattggcaagcaggggcgctatgtgagttttctgaagcaaacatctggtgccaagatctacatttcaaccctgccttacacccagagcgtccagatctgccacatagaaggctctcaacatcatgtagacaaagcgctgaacttgattgggaagaagttcaaagagctgaacctcaccaatatctacgctcccccattgccttcactggcactgccttctctgccgatgacatcctggctcatgctgcctgatggcatcaccgtggaggtcattgtggtcaaccaggtcaatgccgggcacctgttcgtgcagcagcacacacaccctaccttccacgcgctgcgcagcc

SEQ ID NO: 103035 - DNA, 3970 bp, Homo sapiens
  Payload ID: 101
  Gene Symbol: AKAP1
  Gene Name: A kinase (PRKA) anchor protein 1
  Uniprot ID: Q92667
  ENST ID: ENST00000337714
  CDS Start-End: 234-2945
acaagggcgaggggcggggcctgcgtcgcgctgcgggcacgtcgccgcgcgtcttcagtatttaatgtctctgtgttccacccgcctgggctagcacgtgggggagctgcggaagcgcggcgctgcgggccgggccgcggggcacagccgggggccggcggcggcgcgcggactccgcatcccgcaccccgatggtagccgaggagctggtgtaattacttcaagcctccaggatggcaatccagttccgttcgctcttccccttggcattgcctgggatgctggcgctcctcggctggtggtggtttttctctcgtaaaaaaggccatgtcagcagccatgatgagcagcaggtggaggctggtgctgtgcagctgagggctgaccctgccatcaaggaacctctccccgtggaagacgtctgtcccaaagtagtgtccacaccccccagtgtcacagagcctccagaaaaggaactgtccaccgtgagcaagctgcctgcagagcccccagcattgctccagacacacccaccttgccgaagatcagagtcctcgggcattcttcctaacaccacagacatgagattgcgaccaggaacacgcagagatgacagtacaaagctggagctagccctgacaggtggtgaagccaaatcgattcctctagagtgccccctttcatccccaaagggtgtactattctccagcaaatcagctgaggtgtgtaagcaagattcccccttcagcagggtgccaaggaaggtccagccaggctaccccgtagtccccgcagagaagcgtagctctggggagagggcaagagagacaggtggggccgaagggactggtgatgccgtgttgggggaaaaggtgcttgaagaagctctgttgtctcgggagcatgtcttggaattggagaacagcaagggccccagcctggcctctttagagggggaagaagataaggggaagagcagctcatcccaggtggtggggccagtgcaggaggaagagtatgtagcagagaagttgccaagtaggttcatcgagtcggctcacacagagctggcaaaggacgatgcggcgccagcacccccagtcgcagacgccaaagcccaggatagaggtgtcgagggagaactgggcaatgaggagagcttggatagaaatgaggagggcttggatagaaatgaggagggcttggatagaaatgaggagagcttggatagaaatgaggagggcttggatagaaatgaggagattaagcgggctgccttccagataatctcccaagtgatctcagaagcaaccgaacaggtgctggccaccacggttggcaaggttgcaggtcgtgtgtgtcaggccagtcagctccaagggcagaaggaagagagctgtgtcccagttcaccagaaaactgtcttgggcccagacactgcggagcctgccacagcagaggcagctgttgccccgccggatgctggcctccccttgccaggcctaccagcagagggctcaccaccaccaaagacctacgtgagctgcctgaagagccttctgtccagccccaccaaggacagtaagccaaatatctctgcacaccacatctccctggcctcctgcctggcactgaccacccccagtgaagagttgccggaccgggcaggcatcctggtggaagatgccacctgtgtcacctgcatgtcagacagcagccaaagtgtccctttggtggcttctccaggacactgctcagattctttcagcacttcagggcttgaagactcttgcacagagaccagctcgagccccagggacaaggccatcaccccgccactgccagaaagtactgtgcccttcagcaatggggtgctgaagggggagttgtcagacttgggggctgaggatggatggaccatggatgcggaagcagatcattcaggaggttctgacaggaacagcatggattccgtggatagctgttgcagtctcaagaagactgagagcttccaaaatgcccaggcaggctccaaccctaagaaggtcgacctcatcatctgggagatcgaggtgccaaagcacttagtcggtcggctaattggcaagcaggggcgctatgtgagttttctgaagcaaacatctggtgccaagatctacatttcaaccctgccttacacccagagcgtccagatctgccacatagaaggctctcaacatcatgtagacaaagcgctgaacttgattgggaagaagttcaaagagctgaacctcaccaatatctacgctcccccattgccttcactggcactgccttctctgccgatgacatcctggctcatgctgcctgatggcatcaccgtggaggtcattgtggtcaaccaggtcaatgccgggcacctgttcgtgcagcagcacacacaccctaccttccacgcgctgcgcagcctcgaccagcagatgtacctctgttactctcagcctggaatccccaccttgcccaccccagtggaaataacggtcatctgtgccgcccctggtgcggacggggcctggtggcgagcccaagtggttgcctcctacgaggagaccaacgaagtggagattcgatacgtggactacggcggatataagagggtgaaagtagacgtgctccggcaaatcaggtctgactttgtcaccctgccgtttcagggagcagaagtccttctggacagtgtgatgcccctgtcagacgatgaccagttttcaccggaagcagatgccgccatgagcgagatgacggggaatacagcactgcttgctcaggtgacaagttacagtccaactggtcttcctctgattcagctgtggagtgtggttggagatgaagtggtgttgataaaccggtccctggtggagcgaggccttgcccagtgggtagacagctactacacaagcctttgacccccatgctgcttcctgagagtctttttttgcactgttgaaattgggcttggcactcaagtcaaagatgaacatcggaataacaaacattgtcctctccagaaagtcctttctttctccatactgtagtcctattgagaagacatttcgtctctgagaaaaaaggatggaactatgggttctcttcgcaaagccaaaggatagtgtttaacaagccagctggcttatgctggttctcagctgtttaaaaaaaaaaaaaaaaaggaatagaaacagtttcaaccagattgtcctattccccctgttccattcccctcttcttccttctatctccttccccggcaaaaaccaaacaaactggcagacaggccagggatgtatgttgcttgcttgagagggtttcttttacttcaaaatctttcttcagggagcaagacatgaactgactaattggtatccactacttgtacagcttacataaatgagttgatgatatttaaccagtttttataaacttcatttaggtctctaaacacagactttttaaattgcaactgtaaatatgaaatggtcatcacatctgaccttggtcagtggggaggggaactggtatcctgccaagcctggttgtaatttgtaaccattttctatttgtgcaaactctgtaaatatgtgtttaaacaaatgtaatattttgtacaagatacactggagaacaaagggaactcaagattcttccagccacatgtcacctgtaggtagaagtaaactctgcagtgcagcttctgctcttggcccctctggccagggcccctgtggcttcctgcacactggacaggtgactgtatggtagagactgtgatctgggaactttttgctgtacaaatctgtttaaaaaaaaaaaaaagtaactcattgaattaacttgcagtggtgtgtttgattcttttttagactggcttcagcattgtgcagtttaaaaataagtaagtaacttacataaatcttcaattgtatgaactgca

SEQ ID NO: 103036 - DNA, 4089 bp, Homo sapiens
  Payload ID: 101
  Gene Symbol: AKAP1
  Gene Name: A kinase (PRKA) anchor protein 1
  Uniprot ID: Q92667
  ENST ID: ENST00000481416
  CDS Start-End: 253-2034
atttgggatctctagggtacccacatgaagtcatagcttactgtgacttacacaggcccctgaggatgaaggtaacagtcctgtgagcactgaggctgggctgggaccaacacctgagccatggctccagcactctgattcctggcccagccatgctgctgagggtgcacagcccaggcctaccatcgcccccacccttggtggcagaaccgagcactacccagcaaggtgtaattacttcaagcctccaggatggcaatccagttccgttcgctcttccccttggcattgcctgggatgctggcgctcctcggctggtggtggtttttctctcgtaaaaaaggccatgtcagcagccatgatgagcagcaggtggaggctggtgctgtgcagctgagggctgaccctgccatcaaggaacctctccccgtggaagacgtctgtcccaaagtagtgtccacaccccccagtgtcacagagcctccagaaaaggaactgtccaccgtgagcaagctgcctgcagagcccccagcattgctccagacacacccaccttgccgaagatcagagtcctcgggcattcttcctaacaccacagacatgagattgcgaccaggaacacgcagagatgacagtacaaagctggagctagccctgacaggtggtgaagccaaatcgattcctctagagtgccccctttcatccccaaagggtgtactattctccagcaaatcagctgaggtgtgtaagcaagattcccccttcagcagggtgccaaggaaggtccagccaggctaccccgtagtccccgcagagaagcgtagctctggggagagggcaagagagacaggtggggccgaagggactggtgatgccgtgttgggggaaaaggtgcttgaagaagctctgttgtctcgggagcatgtcttggaattggagaacagcaagggccccagcctggcctctttagagggggaagaagataaggggaagagcagctcatcccaggtggtggggccagtgcaggaggaagagtatgtagcagagaagttgccaagtaggttcatcgagtcggctcacacagagctggcaaaggacgatgcggcgccagcacccccagtcgcagacgccaaagcccaggatagaggtgtcgagggagaactgggcaatgaggagagcttggatagaaatgaggagggcttggatagaaatgaggagggcttggatagaaatgaggagagcttggatagaaatgaggagggcttggatagaaatgaggagattaagcgggctgccttccagataatctcccaagtgatctcagaagcaaccgaacaggtgctggccaccacggttggcaaggttgcaggtcgtgtgtgtcaggccagtcagctccaagggcagaaggaagagagctgtgtcccagttcaccagaaaactgtcttgggcccagacactgcggagcctgccacagcagaggcagctgttgccccgccggatgctggcctccccttgccaggcctaccagcagagggctcaccaccaccaaagacctacgtgagctgcctgaagagccttctgtccagccccaccaaggacagtaagccaaatatctctgcacaccacatctccctggcctcctgcctggcactgaccacccccagtgaagagttgccggaccgggcaggcatcctggtggaagatgccacctgtgtcacctgcatgtcagacagcagccaaagtgtccctttggtggcttctccaggacactgctcagattctttcagcacttcagggcttgaagactcttgcacagagaccagctcgagccccagggacaaggccatcaccccgccactgccagaaagtactgtgcccttcagcaatggggtgctgaagggggagttgtcagacttgggggctgaggatggatggaccatggatgcggaagcagatcattcaggagttgcagctccacccccgggaaagcggggcactttgataacgaggtgtcctgggtttttcgagtgctgaccccagcgtagacagttcagaccgctaacttacaggttctgacaggaacagcatggattccgtggatagctgttgcagtctcaagaagactgagagcttccaaaatgcccaggcaggctccaaccctaagaaggtcgacctcatcatctgggagatcgaggtgccaaagcacttagtcggtcggctaattggcaagcaggggcgctatgtgagttttctgaagcaaacatctggtgccaagatctacatttcaaccctgccttacacccagagcgtccagatctgccacatagaaggctctcaacatcatgtagacaaagcgctgaacttgattgggaagaagttcaaagagctgaacctcaccaatatctacgctcccccattgccttcactggcactgccttctctgccgatgacatcctggctcatgctgcctgatggcatcaccgtggaggtcattgtggtcaaccaggtcaatgccgggcacctgttcgtgcagcagcacacacaccctaccttccacgcgctgcgcagcctcgaccagcagatgtacctctgttactctcagcctggaatccccaccttgcccaccccagtggaaataacggtcatctgtgccgcccctggtgcggacggggcctggtggcgagcccaagtggttgcctcctacgaggagaccaacgaagtggagattcgatacgtggactacggcggatataagagggtgaaagtagacgtgctccggcaaatcaggtctgactttgtcaccctgccgtttcagggagcagaagtccttctggacagtgtgatgcccctgtcagacgatgaccagttttcaccggaagcagatgccgccatgagcgagatgacggggaatacagcactgcttgctcaggtgacaagttacagtccaactggtcttcctctgattcagctgtggagtgtggttggagatgaagtggtgttgataaaccggtccctggtggagcgaggccttgcccagtgggtagacagctactacacaagcctttgacccccatgctgcttcctgagagtctttttttgcactgttgaaattgggcttggcactcaagtcaaagatgaacatcggaataacaaacattgtcctctccagaaagtcctttctttctccatactgtagtcctattgagaagacatttcgtctctgagaaaaaaggatggaactatgggttctcttcgcaaagccaaaggatagtgtttaacaagccagctggcttatgctggttctcagctgtttaaaaaaaaaaaaaaaaaggaatagaaacagtttcaaccagattgtcctattccccctgttccattcccctcttcttccttctatctccttccccggcaaaaaccaaacaaactggcagacaggccagggatgtatgttgcttgcttgagagggtttcttttacttcaaaatctttcttcagggagcaagacatgaactgactaattggtatccactacttgtacagcttacataaatgagttgatgatatttaaccagtttttataaacttcatttaggtctctaaacacagactttttaaattgcaactgtaaatatgaaatggtcatcacatctgaccttggtcagtggggaggggaactggtatcctgccaagcctggttgtaatttgtaaccattttctatttgtgcaaactctgtaaatatgtgtttaaacaaatgtaatattttgtacaagatacactggagaacaaagggaactcaagattcttccagccacatgtcacctgtaggtagaagtaaactctgcagtgcagcttctgctcttggcccctctggccagggcccctgtggcttcctgcacactggacaggtgactgtatggtagagactgtgatctgggaactttttgctgtacaaatctgtttaaaaaaaaaaaaaagtaactcattgaattaacttgcagtggtgtgtttgattcttttttagactggcttcagcattgtgcagtttaaaaataagtaagtaacttacataaatcttcaattgtatgaact

SEQ ID NO: 103037 - DNA, 3153 bp, Homo sapiens
  Payload ID: 101
  Gene Symbol: AKAP1
  Gene Name: A kinase (PRKA) anchor protein 1
  Uniprot ID: Q92667
  ENST ID: ENST00000539273
  CDS Start-End: 211-2922
gtgacttacacaggcccctgaggatgaaggtaacagtcctgtgagcactgaggctgggctgggaccaacacctgagccatggctccagcactctgattcctggcccagccatgctgctgagggtgcacagcccaggcctaccatcgcccccacccttggtggcagaaccgagcactacccagcaaggtgtaattacttcaagcctccaggatggcaatccagttccgttcgctcttccccttggcattgcctgggatgctggcgctcctcggctggtggtggtttttctctcgtaaaaaaggccatgtcagcagccatgatgagcagcaggtggaggctggtgctgtgcagctgagggctgaccctgccatcaaggaacctctccccgtggaagacgtctgtcccaaagtagtgtccacaccccccagtgtcacagagcctccagaaaaggaactgtccaccgtgagcaagctgcctgcagagcccccagcattgctccagacacacccaccttgccgaagatcagagtcctcgggcattcttcctaacaccacagacatgagattgcgaccaggaacacgcagagatgacagtacaaagctggagctagccctgacaggtggtgaagccaaatcgattcctctagagtgccccctttcatccccaaagggtgtactattctccagcaaatcagctgaggtgtgtaagcaagattcccccttcagcagggtgccaaggaaggtccagccaggctaccccgtagtccccgcagagaagcgtagctctggggagagggcaagagagacaggtggggccgaagggactggtgatgccgtgttgggggaaaaggtgcttgaagaagctctgttgtctcgggagcatgtcttggaattggagaacagcaagggccccagcctggcctctttagagggggaagaagataaggggaagagcagctcatcccaggtggtggggccagtgcaggaggaagagtatgtagcagagaagttgccaagtaggttcatcgagtcggctcacacagagctggcaaaggacgatgcggcgccagcacccccagtcgcagacgccaaagcccaggatagaggtgtcgagggagaactgggcaatgaggagagcttggatagaaatgaggagggcttggatagaaatgaggagggcttggatagaaatgaggagagcttggatagaaatgaggagggcttggatagaaatgaggagattaagcgggctgccttccagataatctcccaagtgatctcagaagcaaccgaacaggtgctggccaccacggttggcaaggttgcaggtcgtgtgtgtcaggccagtcagctccaagggcagaaggaagagagctgtgtcccagttcaccagaaaactgtcttgggcccagacactgcggagcctgccacagcagaggcagctgttgccccgccggatgctggcctccccttgccaggcctaccagcagagggctcaccaccaccaaagacctacgtgagctgcctgaagagccttctgtccagccccaccaaggacagtaagccaaatatctctgcacaccacatctccctggcctcctgcctggcactgaccacccccagtgaagagttgccggaccgggcaggcatcctggtggaagatgccacctgtgtcacctgcatgtcagacagcagccaaagtgtccctttggtggcttctccaggacactgctcagattctttcagcacttcagggcttgaagactcttgcacagagaccagctcgagccccagggacaaggccatcaccccgccactgccagaaagtactgtgcccttcagcaatggggtgctgaagggggagttgtcagacttgggggctgaggatggatggaccatggatgcggaagcagatcattcaggaggttctgacaggaacagcatggattccgtggatagctgttgcagtctcaagaagactgagagcttccaaaatgcccaggcaggctccaaccctaagaaggtcgacctcatcatctgggagatcgaggtgccaaagcacttagtcggtcggctaattggcaagcaggggcgctatgtgagttttctgaagcaaacatctggtgccaagatctacatttcaaccctgccttacacccagagcgtccagatctgccacatagaaggctctcaacatcatgtagacaaagcgctgaacttgattgggaagaagttcaaagagctgaacctcaccaatatctacgctcccccattgccttcactggcactgccttctctgccgatgacatcctggctcatgctgcctgatggcatcaccgtggaggtcattgtggtcaaccaggtcaatgccgggcacctgttcgtgcagcagcacacacaccctaccttccacgcgctgcgcagcctcgaccagcagatgtacctctgttactctcagcctggaatccccaccttgcccaccccagtggaaataacggtcatctgtgccgcccctggtgcggacggggcctggtggcgagcccaagtggttgcctcctacgaggagaccaacgaagtggagattcgatacgtggactacggcggatataagagggtgaaagtagacgtgctccggcaaatcaggtctgactttgtcaccctgccgtttcagggagcagaagtccttctggacagtgtgatgcccctgtcagacgatgaccagttttcaccggaagcagatgccgccatgagcgagatgacggggaatacagcactgcttgctcaggtgacaagttacagtccaactggtcttcctctgattcagctgtggagtgtggttggagatgaagtggtgttgataaaccggtccctggtggagcgaggccttgcccagtgggtagacagctactacacaagcctttgacccccatgctgcttcctgagagtctttttttgcactgttgaaattgggcttggcactcaagtcaaagatgaacatcggaataacaaacattgtcctctccagaaagtcctttctttctccatactgtagtcctattgagaagacatttcgtctctgagaaaaaaggatggaactatgggttctcttcgcaaagccaaaggatagtgtttaacaagccagctggcttatgct

SEQ ID NO: 103038 - DNA, 532 bp, Homo sapiens
  Payload ID: 101
  Gene Symbol: AKAP1
  Gene Name: A kinase (PRKA) anchor protein 1
  ENST ID: ENST00000572814
  CDS Start-End: 121-532
aacttaaccggagcgtgcacacccgcctgcgaggctgacccgagcgcgtcccacccaaggtcgcccagccccgcgggcgtttacttttcaaaggtcgtgtaattacttcaagcctccaggatggcaatccagttccgttcgctcttccccttggcattgcctgggatgctggcgctcctcggctggtggtggtttttctctcgtaaaaaaggccatgtcagcagccatgatgagcagcaggtggaggctggtgctgtgcagctgagggctgaccctgccatcaaggaacctctccccgtggaagacgtctgtcccaaagtagtgtccacaccccccagtgtcacagagcctccagaaaaggaactgtccaccgtgagcaagctgcctgcagagcccccagcattgctccagacacacccaccttgccgaagatcagagtcctcgggcattcttcctaacaccacagacatgagattgcgaccaggaacacgcagagatgacagtacaaagctggagctagccctgacaggtg

SEQ ID NO: 103039 - DNA, 442 bp, Homo sapiens
  Payload ID: 101
  Gene Symbol: AKAP1
  Gene Name: A kinase (PRKA) anchor protein 1
  ENST ID: ENST00000572560
  CDS Start-End: 1-418
tggtgcggacggggcctggtggcgagcccaagtggttgcctcctacgaggagaccaacgaagtggagattcgatacgtggactacggcggatataagagggtgaaagtagacgtgctccggcaaatcaggtctgactttgtcaccctgccgtttcagggagcagaagtccttctggacagtgtgatgcccctgtcagacgatgaccagttttcaccggaagcagatgccgccatgagcgagatgacggggaatacagcactgcttgctcaggtgacaagttacagtccaactggtcttcctctgattcagctgtggagtgtggttggagatgaagtggtgttgataaaccggtccctggtggagcgaggccttgcccaactggcttcagcattgtgcagtttaaaaataagtaagtaacttacataaatcttcaattgtatg

SEQ ID NO: 103040 - DNA, 614 bp, Homo sapiens
  Payload ID: 101
  Gene Symbol: AKAP1
  Gene Name: A kinase (PRKA) anchor protein 1
  ENST ID: ENST00000576295
  CDS Start-End: 1-614
gcagagaagcgtagctctggggagagggcaagagagacaggtggggccgaagggactggtgatgccgtgttgggggaaaaggtgcttgaagaagctctgttgtctcgggagcatgtcttggaattggagaacagcaagggccccagcctggcctctttagagggggaagaagataaggggaagagcagctcatcccaggtggtggggccagtgcaggaggaagagtatgtagcagagaagttgccaagtaggttcatcgagtcggctcacacagagctggcaaaggacgatgcggcgccagcacccccagtcgcagacgccaaagcccaggatagaggtgtcgagggagaactgggcaatgaggagagcttggatagaaatgaggaggacttgggggctgaggatggatggaccatggatgcggaagcagatcattcaggaggttctgacaggaacagcatggattccgtggatagctgttgcagtctcaagaagactgagagcttccaaaatgcccaggcaggctccaaccctaagaaggtcgacctcatcatctgggagatcgaggtgccaaagcacttagtcggtcggctaattggcaagcaggggcgcta

SEQ ID NO: 103041 - DNA, 568 bp, Homo sapiens
  Payload ID: 101
  Gene Symbol: AKAP1
  Gene Name: A kinase (PRKA) anchor protein 1
  ENST ID: ENST00000570423
  CDS Start-End: 548-568
actgtcctcgggggcggggggcgagggcgcgacgcccgggtcgcctctctgcacctcaacttaaccggagcgtgcacacccgcctgcgaggctgacccgagcgcgtcccacccaaggtcgcccagccccgcgggcgtttacttttcaaaggtcgtgtgtacacagtctgagccggagctgccccttcacttctggagcctcgcccaacttctcaccctcggctcgcccgccggcgcagcccctgggagttccgtgcggcgagccaggggaactgggaagatgggccgggacatcggccggttgtgatccaaccgtgtttcgggctgagggaccgttcgaaccgaattggggtctggagggagggataggagaagaaaggtgctgatcgtggtaggcggtgctgtggcgactcggaacggcatgggagccctgggcgtttcgggatcttcctctcctgggggatgtcctgggtggcggcgccttcctgccgccgttaacacaaacccggtggacttcgctccaggtgtaattacttcaagcctccaggatggcaatccagttccgttcg

SEQ ID NO: 103042 - DNA, 710 bp, Homo sapiens
  Payload ID: 101
  Gene Symbol: AKAP1
  Gene Name: A kinase (PRKA) anchor protein 1
  ENST ID: ENST00000572156
  CDS Start-End: 163-710
ggactactgtgataccacttaaatgttgagaagttcaggtttacaaaaaaaaacacctcagggcaaagagagcaactccgaagagtctggcccagtgcaggaaggaagatgtcagaagagccttgtaaggctaaaggggtgtaattacttcaagcctccaggatggcaatccagttccgttcgctcttccccttggcattgcctgggatgctggcgctcctcggctggtggtggtttttctctcgtaaaaaaggccatgtcagcagccatgatgagcagcaggtggaggctggtgctgtgcagctgagggctgaccctgccatcaaggaacctctccccgtggaagacgtctgtcccaaagtagtgtccacaccccccagtgtcacagagcctccagaaaaggaactgtccaccgtgagcaagctgcctgcagagcccccagcattgctccagacacacccaccttgccgaagatcagagtcctcgggcattcttcctaacaccacagacatgagattgcgaccaggaacacgcagagatgacagtacaaagctggagctagccctgacaggtggtgaagccaaatcgattcctctagagtgccccctttcatccccaaagggtgtactattctccagcaaatcagctgaggtgtgtaagcaagattcccccttcagcagggtgccaaggaaggtccagccaggctaccc

SEQ ID NO: 103043 - DNA, 650 bp, Homo sapiens
  Payload ID: 101
  Gene Symbol: AKAP1
  Gene Name: A kinase (PRKA) anchor protein 1
  ENST ID: ENST00000575322
  CDS Start-End: 92-650
ctctggcgcagctgggagaggcgcggcggaggcactgccgggagcggccggcggcgcgcacgcgcaggtgtaattacttcaagcctccaggatggcaatccagttccgttcgctcttccccttggcattgcctgggatgctggcgctcctcggctggtggtggtttttctctcgtaaaaaaggccatgtcagcagccatgatgagcagcaggtggaggctggtgctgtgcagctgagggctgaccctgccatcaaggaacctctccccgtggaagacgtctgtcccaaagtagtgtccacaccccccagtgtcacagagcctccagaaaaggaactgtccaccgtgagcaagctgcctgcagagcccccagcattgctccagacacacccaccttgccgaagatcagagtcctcgggcattcttcctaacaccacagacatgagattgcgaccaggaacacgcagagatgacagtacaaagctggagctagccctgacaggtggtgaagccaaatcgattcctctagagtgccccctttcatccccaaagggtgtactattctccagcaaatcagctgaggtgtgtaagcaagattcccccttcagcagggtgccaaggaaggtccagccaggctaccccgtagtccccg

SEQ ID NO: 103044 - DNA, 3098 bp, Homo sapiens
  Payload ID: 101
  Gene Symbol: AKAP1
  Gene Name: A kinase (PRKA) anchor protein 1
  Uniprot ID: Q92667
  ENST ID: ENST00000572557
  CDS Start-End: 141-2852
gaactccatgtacccaggaaggcattcctggcacctgtgttgtgaccatctttagaaacctggcggaattcacttgtaaagcaagatggttgtcaaggccagaggtgaggggcaaggtgtaattacttcaagcctccaggatggcaatccagttccgttcgctcttccccttggcattgcctgggatgctggcgctcctcggctggtggtggtttttctctcgtaaaaaaggccatgtcagcagccatgatgagcagcaggtggaggctggtgctgtgcagctgagggctgaccctgccatcaaggaacctctccccgtggaagacgtctgtcccaaagtagtgtccacaccccccagtgtcacagagcctccagaaaaggaactgtccaccgtgagcaagctgcctgcagagcccccagcattgctccagacacacccaccttgccgaagatcagagtcctcgggcattcttcctaacaccacagacatgagattgcgaccaggaacacgcagagatgacagtacaaagctggagctagccctgacaggtggtgaagccaaatcgattcctctagagtgccccctttcatccccaaagggtgtactattctccagcaaatcagctgaggtgtgtaagcaagattcccccttcagcagggtgccaaggaaggtccagccaggctaccccgtagtccccgcagagaagcgtagctctggggagagggcaagagagacaggtggggccgaagggactggtgatgccgtgttgggggaaaaggtgcttgaagaagctctgttgtctcgggagcatgtcttggaattggagaacagcaagggccccagcctggcctctttagagggggaagaagataaggggaagagcagctcatcccaggtggtggggccagtgcaggaggaagagtatgtagcagagaagttgccaagtaggttcatcgagtcggctcacacagagctggcaaaggacgatgcggcgccagcacccccagtcgcagacgccaaagcccaggatagaggtgtcgagggagaactgggcaatgaggagagcttggatagaaatgaggagggcttggatagaaatgaggagggcttggatagaaatgaggagagcttggatagaaatgaggagggcttggatagaaatgaggagattaagcgggctgccttccagataatctcccaagtgatctcagaagcaaccgaacaggtgctggccaccacggttggcaaggttgcaggtcgtgtgtgtcaggccagtcagctccaagggcagaaggaagagagctgtgtcccagttcaccagaaaactgtcttgggcccagacactgcggagcctgccacagcagaggcagctgttgccccgccggatgctggcctccccttgccaggcctaccagcagagggctcaccaccaccaaagacctacgtgagctgcctgaagagccttctgtccagccccaccaaggacagtaagccaaatatctctgcacaccacatctccctggcctcctgcctggcactgaccacccccagtgaagagttgccggaccgggcaggcatcctggtggaagatgccacctgtgtcacctgcatgtcagacagcagccaaagtgtccctttggtggcttctccaggacactgctcagattctttcagcacttcagggcttgaagactcttgcacagagaccagctcgagccccagggacaaggccatcaccccgccactgccagaaagtactgtgcccttcagcaatggggtgctgaagggggagttgtcagacttgggggctgaggatggatggaccatggatgcggaagcagatcattcaggaggttctgacaggaacagcatggattccgtggatagctgttgcagtctcaagaagactgagagcttccaaaatgcccaggcaggctccaaccctaagaaggtcgacctcatcatctgggagatcgaggtgccaaagcacttagtcggtcggctaattggcaagcaggggcgctatgtgagttttctgaagcaaacatctggtgccaagatctacatttcaaccctgccttacacccagagcgtccagatctgccacatagaaggctctcaacatcatgtagacaaagcgctgaacttgattgggaagaagttcaaagagctgaacctcaccaatatctacgctcccccattgccttcactggcactgccttctctgccgatgacatcctggctcatgctgcctgatggcatcaccgtggaggtcattgtggtcaaccaggtcaatgccgggcacctgttcgtgcagcagcacacacaccctaccttccacgcgctgcgcagcctcgaccagcagatgtacctctgttactctcagcctggaatccccaccttgcccaccccagtggaaataacggtcatctgtgccgcccctggtgcggacggggcctggtggcgagcccaagtggttgcctcctacgaggagaccaacgaagtggagattcgatacgtggactacggcggatataagagggtgaaagtagacgtgctccggcaaatcaggtctgactttgtcaccctgccgtttcagggagcagaagtccttctggacagtgtgatgcccctgtcagacgatgaccagttttcaccggaagcagatgccgccatgagcgagatgacggggaatacagcactgcttgctcaggtgacaagttacagtccaactggtcttcctctgattcagctgtggagtgtggttggagatgaagtggtgttgataaaccggtccctggtggagcgaggccttgcccagtgggtagacagctactacacaagcctttgacccccatgctgcttcctgagagtctttttttgcactgttgaaattgggcttggcactcaagtcaaagatgaacatcggaataacaaacattgtcctctccagaaagtcctttctttctccatactgtagtcctattgagaagacatttcgtctctgagaaaaaaggatggaactatgggttctcttcgcaaagccaaaggatagtgtttaacaagccagctggcttatgctggttctcagctgttt

SEQ ID NO: 103045 - DNA, 3105 bp, Homo sapiens
  Payload ID: 101
  Gene Symbol: AKAP1
  Gene Name: A kinase (PRKA) anchor protein 1
  Uniprot ID: Q92667
  ENST ID: ENST00000571629
  CDS Start-End: 343-3054
gtcactgtcctcgggggcggggggcgagggcgcgacgcccgggtcgcctctctgcacctcaacttaaccggagcgtgcacacccgcctgcgaggctgacccgagcgcgtcccacccaaggtcgcccagccccgcgggcgtttacttttcaaagggagggataggagaagaaaggtgctgatcgtggtaggcggtgctgtggcgactcggaacggcatgggagccctgggcgtttcgggatcttcctctcctgggggatgtcctgggtggcggcgccttcctgccgccgttaacacaaacccggtggacttcgctccaggtgtaattacttcaagcctccaggatggcaatccagttccgttcgctcttccccttggcattgcctgggatgctggcgctcctcggctggtggtggtttttctctcgtaaaaaaggccatgtcagcagccatgatgagcagcaggtggaggctggtgctgtgcagctgagggctgaccctgccatcaaggaacctctccccgtggaagacgtctgtcccaaagtagtgtccacaccccccagtgtcacagagcctccagaaaaggaactgtccaccgtgagcaagctgcctgcagagcccccagcattgctccagacacacccaccttgccgaagatcagagtcctcgggcattcttcctaacaccacagacatgagattgcgaccaggaacacgcagagatgacagtacaaagctggagctagccctgacaggtggtgaagccaaatcgattcctctagagtgccccctttcatccccaaagggtgtactattctccagcaaatcagctgaggtgtgtaagcaagattcccccttcagcagggtgccaaggaaggtccagccaggctaccccgtagtccccgcagagaagcgtagctctggggagagggcaagagagacaggtggggccgaagggactggtgatgccgtgttgggggaaaaggtgcttgaagaagctctgttgtctcgggagcatgtcttggaattggagaacagcaagggccccagcctggcctctttagagggggaagaagataaggggaagagcagctcatcccaggtggtggggccagtgcaggaggaagagtatgtagcagagaagttgccaagtaggttcatcgagtcggctcacacagagctggcaaaggacgatgcggcgccagcacccccagtcgcagacgccaaagcccaggatagaggtgtcgagggagaactgggcaatgaggagagcttggatagaaatgaggagggcttggatagaaatgaggagggcttggatagaaatgaggagagcttggatagaaatgaggagggcttggatagaaatgaggagattaagcgggctgccttccagataatctcccaagtgatctcagaagcaaccgaacaggtgctggccaccacggttggcaaggttgcaggtcgtgtgtgtcaggccagtcagctccaagggcagaaggaagagagctgtgtcccagttcaccagaaaactgtcttgggcccagacactgcggagcctgccacagcagaggcagctgttgccccgccggatgctggcctccccttgccaggcctaccagcagagggctcaccaccaccaaagacctacgtgagctgcctgaagagccttctgtccagccccaccaaggacagtaagccaaatatctctgcacaccacatctccctggcctcctgcctggcactgaccacccccagtgaagagttgccggaccgggcaggcatcctggtggaagatgccacctgtgtcacctgcatgtcagacagcagccaaagtgtccctttggtggcttctccaggacactgctcagattctttcagcacttcagggcttgaagactcttgcacagagaccagctcgagccccagggacaaggccatcaccccgccactgccagaaagtactgtgcccttcagcaatggggtgctgaagggggagttgtcagacttgggggctgaggatggatggaccatggatgcggaagcagatcattcaggaggttctgacaggaacagcatggattccgtggatagctgttgcagtctcaagaagactgagagcttccaaaatgcccaggcaggctccaaccctaagaaggtcgacctcatcatctgggagatcgaggtgccaaagcacttagtcggtcggctaattggcaagcaggggcgctatgtgagttttctgaagcaaacatctggtgccaagatctacatttcaaccctgccttacacccagagcgtccagatctgccacatagaaggctctcaacatcatgtagacaaagcgctgaacttgattgggaagaagttcaaagagctgaacctcaccaatatctacgctcccccattgccttcactggcactgccttctctgccgatgacatcctggctcatgctgcctgatggcatcaccgtggaggtcattgtggtcaaccaggtcaatgccgggcacctgttcgtgcagcagcacacacaccctaccttccacgcgctgcgcagcctcgaccagcagatgtacctctgttactctcagcctggaatccccaccttgcccaccccagtggaaataacggtcatctgtgccgcccctggtgcggacggggcctggtggcgagcccaagtggttgcctcctacgaggagaccaacgaagtggagattcgatacgtggactacggcggatataagagggtgaaagtagacgtgctccggcaaatcaggtctgactttgtcaccctgccgtttcagggagcagaagtccttctggacagtgtgatgcccctgtcagacgatgaccagttttcaccggaagcagatgccgccatgagcgagatgacggggaatacagcactgcttgctcaggtgacaagttacagtccaactggtcttcctctgattcagctgtggagtgtggttggagatgaagtggtgttgataaaccggtccctggtggagcgaggccttgcccagtgggtagacagctactacacaagcctttgacccccatgctgcttcctgagagtctttttttgcactgttgaaattgggctt

SEQ ID NO: 103046 - DNA, 588 bp, Homo sapiens
  Payload ID: 101
  Gene Symbol: AKAP1
  Gene Name: A kinase (PRKA) anchor protein 1
  ENST ID: ENST00000574683
  CDS Start-End: 304-588
agttttggggttacgatgtgctaggagaggcagtggctggatgcctcgaacgcgggctttctggcgttcaactcttttgtgccctagctgaaggtcttcctgtttcccttccagggagggataggagaagaaaggtgctgatcgtggtaggcggtgctgtggcgactcggaacggcatgggagccctgggcgtttcgggatcttcctctcctgggggatgtcctgggtggcggcgccttcctgccgccgttaacacaaacccggtggacttcgctccaggtgtaattacttcaagcctccaggatggcaatccagttccgttcgctcttccccttggcattgcctgggatgctggcgctcctcggctggtggtggtttttctctcgtaaaaaaggccatgtcagcagccatgatgagcagcaggtggaggctggtgctgtgcagctgagggctgaccctgccatcaaggaacctctccccgtggaagacgtctgtcccaaagtagtgtccacaccccccagtgtcacagagcctccagaaaaggaactgtccaccgtgagcaagctgcctgcagagcccccagcattg

SEQ ID NO: 103047 - DNA, 565 bp, Homo sapiens
  Payload ID: 101
  Gene Symbol: AKAP1
  Gene Name: A kinase (PRKA) anchor protein 1
  ENST ID: ENST00000576591
  CDS Start-End: 317-565
aacagtcctgtgagcactgaggctgggctgggaccaacacctgagccatggctccagcactctgattcctggcccagccatgctgctgagggtgcacagcccaggcctaccatcgcccccacccttggtggcagaaccgagcactacccagcaagggctggtgctgccttggccttgggcttttaaaagcttaccagatgatgctaatgtgaagccaagttggagaaccggttgtgaaagaaattaaaaatctctcctcccaaaaggaggaagtaagactctttatctgtaggtgtaattacttcaagcctccaggatggcaatccagttccgttcgctcttccccttggcattgcctgggatgctggcgctcctcggctggtggtggtttttctctcgtaaaaaaggccatgtcagcagccatgatgagcagcaggtggaggctggtgctgtgcagctgagggctgaccctgccatcaaggaacctctccccgtggaagacgtctgtcccaaagtagtgtccacaccccccagtgtcacagagcctccagaaaaggaactgtcc

SEQ ID NO: 103048 - DNA, 484 bp, Homo sapiens
  Payload ID: 101
  Gene Symbol: AKAP1
  Gene Name: A kinase (PRKA) anchor protein 1
  ENST ID: ENST00000573085
  CDS Start-End: 344-484
gtcgcctctctgcacctcaacttaaccggagcgtgcacacccgcctgcgaggctgacccgagcgcgtcccacccaaggtcgcccagccccgcgggcgtttacttttcaaaggtcgtgtgtacacagtctgagccggagctgccccttcacttctggagcctcgcccaacttctcaccctcggctcgcccgccggcgcagcccctgggagttccgtgcggcgagccaggggaactgggaagatgggccgggacatcggccggttgtgatccaaccgtgtttcgggctgagggaccgttcgaaccgaattggggtctggaggtgtaattacttcaagcctccaggatggcaatccagttccgttcgctcttccccttggcattgcctgggatgctggcgctcctcggctggtggtggtttttctctcgtaaaaaaggccatgtcagcagccatgatgagcagcaggtggaggctggtgctgtgcag

SEQ ID NO: 103049 - DNA, 570 bp, Homo sapiens
  Payload ID: 101
  Gene Symbol: AKAP1
  Gene Name: A kinase (PRKA) anchor protein 1
  ENST ID: ENST00000575032
  CDS Start-End: 1-540
gtcattgtggtcaaccaggtcaatgccgggcacctgttcgtgcagcagcacacacaccctaccttccacgcgctgcgcagcctcgaccagcagatgtacctctgttactctcagcctggaatccccaccttgcccaccccagtggaaataacggtcatctgtgccgcccctggtgcggacggggcctggtggcgagcccaagtggttgcctcctacgaggagaccaacgaagtggagattcgatacgtggactacggcggatataagagggtgaaagtagacgtgctccggcaaatcaggtctgactttgtcaccctgccgtttcagggagcagaagtccttctggacagtgtgatgcccctgtcagacgatgaccagttttcaccggaagcagatgccgccatgagcgagatgacggggaatacagcactgcttgctcaggtgacaagttacagtccaactggtcttcctctgattcagctgtggagtgtggttggagatgaaactggcttcagcattgtgcagtttaaaaataagtaagtaacttacataaatcttcaattgtatgaa

SEQ ID NO: 103050 - DNA, 578 bp, Homo sapiens
  Payload ID: 101
  Gene Symbol: AKAP1
  Gene Name: A kinase (PRKA) anchor protein 1
  ENST ID: ENST00000575186
  CDS Start-End: 556-578
actgtcctcgggggcggggggcgagggcgcgacgcccgggtcgcctctctgcacctcaacttaaccggagcgtgcacacccgcctgcgaggctgacccgagcgcgtcccacccaaggtcgcccagccccgcgggcgtttacttttcaaaggtcgtgtgtacacagtctgagccggagctgccccttcacttctggagcctcgcccaacttctcaccctcggctcgcccgccggcgcagcccctgggagttccgtgcggcgagccaggggaactgggaagatgggccgggacatcggccggttgtgatccaaccgtgtttcgggctgagggaccgttcgaaccgaattggggtctggaggcccctgaggatgaaggtaacagtcctgtgagcactgaggctgggctgggaccaacacctgagccatggctccagcactctgattcctggcccagccatgctgctgagggtgcacagcccaggcctaccatcgcccccacccttggtggcagaaccgagcactacccagcaaggtgtaattacttcaagcctccaggatggcaatccagttccgttcgct

SEQ ID NO: 103051 - DNA, 1580 bp, Homo sapiens
  Payload ID: 101
  Gene Symbol: AKAP1
  Gene Name: A kinase (PRKA) anchor protein 1
  ENST ID: ENST00000573326
  CDS Start-End: 1-1083
ctccccttgccaggcctaccagcagagggctcaccaccaccaaagacctacgtgagctgcctgaagagccttctgtccagccccaccaaggacagtaagccaaatatctctgcacaccacatctccctggcctcctgcctggcactgaccacccccagtgaagagttgccggaccgggcaggcatcctggtggaagatgccacctgtgtcacctgcatgtcagacagcagccaaagtgtccctttggtggcttctccaggacactgctcagattctttcagcacttcagggcttgaagactcttgcacagagaccagctcgagccccagggacaaggccatcaccccgccactgccagaaagtactgtgcccttcagcaatggggtgctgaagggggagttgtcagacttgggggctgaggatggatggaccatggatgcggaagcagatcattcaggaggttctgacaggaacagcatggattccgtggatagctgttgcagtctcaagaagactgagagcttccaaaatgcccaggcaggctccaaccctaagaaggtcgacctcatcatctgggagatcgaggtgccaaagcacttagtcggtcggctaattggcaagcaggggcgctatgtgagttttctgaagcaaacatctggtgccaagatctacatttcaaccctgccttacacccagagcgtccagatctgccacatagaaggctctcaacatcatgtagacaaagcgctgaacttgattgggaagaagttcaaagagctgaacctcaccaatatctacgctcccccattgccttcactggcactgccttctctgccgatgacatcctggctcatgctgcctgatggcatcaccgtggaggtcattgtggtcaaccaggtcaatgccgggcacctgttcgtgcagcagcacacacaccctaccttccacgcgctgcgcagcctcgaccagcagatgtacctctgttactctcagcctggaatccccaccttgcccaccccagtggaaagtctgactttgtcaccctgccgtttcagggagcagaagtccttctggacagtgtgatgcccctgtcagacgatgaccagttttcaccggaagcagatgccgccatgagcgagatgacggggaatacagcactgcttgctcaggtgacaagttacagtccaactggtcttcctctgattcagctgtggagtgtggttggagatgaagtggtgttgataaaccggtccctggtggagcgaggccttgcccagtgggtagacagctactacacaagcctttgacccccatgctgcttcctgagagtctttttttgcactgttgaaattgggcttggcactcaagtcaaagatgaacatcggaataacaaacattgtcctctccagaaagtcctttctttctccatactgtagtcctattgagaagacatttcgtctctgagaaaaaaggatggaactatgggttctcttcgcaaagccaaaggatagtgtttaacaagccagctggcttatgctggttctcagctgtttaaaaaaaaaaaaaaaaaggaatagaaa

SEQ ID NO: 103052 - DNA, 4285 bp, Homo sapiens
  Payload ID: 101
  Gene Symbol: AKAP1
  Gene Name: A kinase (PRKA) anchor protein 1
  Uniprot ID: Q92667
  ENST ID: ENST00000621116
  CDS Start-End: 556-3267
actgtcctcgggggcggggggcgagggcgcgacgcccgggtcgcctctctgcacctcaacttaaccggagcgtgcacacccgcctgcgaggctgacccgagcgcgtcccacccaaggtcgcccagccccgcgggcgtttacttttcaaaggtcgtgtgtacacagtctgagccggagctgccccttcacttctggagcctcgcccaacttctcaccctcggctcgcccgccggcgcagcccctgggagttccgtgcggcgagccaggggaactgggaagatgggccgggacatcggccggttgtgatccaaccgtgtttcgggctgagggaccgttcgaaccgaattggggtctggaggcccctgaggatgaaggtaacagtcctgtgagcactgaggctgggctgggaccaacacctgagccatggctccagcactctgattcctggcccagccatgctgctgagggtgcacagcccaggcctaccatcgcccccacccttggtggcagaaccgagcactacccagcaaggtgtaattacttcaagcctccaggatggcaatccagttccgttcgctcttccccttggcattgcctgggatgctggcgctcctcggctggtggtggtttttctctcgtaaaaaaggccatgtcagcagccatgatgagcagcaggtggaggctggtgctgtgcagctgagggctgaccctgccatcaaggaacctctccccgtggaagacgtctgtcccaaagtagtgtccacaccccccagtgtcacagagcctccagaaaaggaactgtccaccgtgagcaagctgcctgcagagcccccagcattgctccagacacacccaccttgccgaagatcagagtcctcgggcattcttcctaacaccacagacatgagattgcgaccaggaacacgcagagatgacagtacaaagctggagctagccctgacaggtggtgaagccaaatcgattcctctagagtgccccctttcatccccaaagggtgtactattctccagcaaatcagctgaggtgtgtaagcaagattcccccttcagcagggtgccaaggaaggtccagccaggctaccccgtagtccccgcagagaagcgtagctctggggagagggcaagagagacaggtggggccgaagggactggtgatgccgtgttgggggaaaaggtgcttgaagaagctctgttgtctcgggagcatgtcttggaattggagaacagcaagggccccagcctggcctctttagagggggaagaagataaggggaagagcagctcatcccaggtggtggggccagtgcaggaggaagagtatgtagcagagaagttgccaagtaggttcatcgagtcggctcacacagagctggcaaaggacgatgcggcgccagcacccccagtcgcagacgccaaagcccaggatagaggtgtcgagggagaactgggcaatgaggagagcttggatagaaatgaggagggcttggatagaaatgaggagggcttggatagaaatgaggagagcttggatagaaatgaggagggcttggatagaaatgaggagattaagcgggctgccttccagataatctcccaagtgatctcagaagcaaccgaacaggtgctggccaccacggttggcaaggttgcaggtcgtgtgtgtcaggccagtcagctccaagggcagaaggaagagagctgtgtcccagttcaccagaaaactgtcttgggcccagacactgcggagcctgccacagcagaggcagctgttgccccgccggatgctggcctccccttgccaggcctaccagcagagggctcaccaccaccaaagacctacgtgagctgcctgaagagccttctgtccagccccaccaaggacagtaagccaaatatctctgcacaccacatctccctggcctcctgcctggcactgaccacccccagtgaagagttgccggaccgggcaggcatcctggtggaagatgccacctgtgtcacctgcatgtcagacagcagccaaagtgtccctttggtggcttctccaggacactgctcagattctttcagcacttcagggcttgaagactcttgcacagagaccagctcgagccccagggacaaggccatcaccccgccactgccagaaagtactgtgcccttcagcaatggggtgctgaagggggagttgtcagacttgggggctgaggatggatggaccatggatgcggaagcagatcattcaggaggttctgacaggaacagcatggattccgtggatagctgttgcagtctcaagaagactgagagcttccaaaatgcccaggcaggctccaaccctaagaaggtcgacctcatcatctgggagatcgaggtgccaaagcacttagtcggtcggctaattggcaagcaggggcgctatgtgagttttctgaagcaaacatctggtgccaagatctacatttcaaccctgccttacacccagagcgtccagatctgccacatagaaggctctcaacatcatgtagacaaagcgctgaacttgattgggaagaagttcaaagagctgaacctcaccaatatctacgctcccccattgccttcactggcactgccttctctgccgatgacatcctggctcatgctgcctgatggcatcaccgtggaggtcattgtggtcaaccaggtcaatgccgggcacctgttcgtgcagcagcacacacaccctaccttccacgcgctgcgcagcctcgaccagcagatgtacctctgttactctcagcctggaatccccaccttgcccaccccagtggaaataacggtcatctgtgccgcccctggtgcggacggggcctggtggcgagcccaagtggttgcctcctacgaggagaccaacgaagtggagattcgatacgtggactacggcggatataagagggtgaaagtagacgtgctccggcaaatcaggtctgactttgtcaccctgccgtttcagggagcagaagtccttctggacagtgtgatgcccctgtcagacgatgaccagttttcaccggaagcagatgccgccatgagcgagatgacggggaatacagcactgcttgctcaggtgacaagttacagtccaactggtcttcctctgattcagctgtggagtgtggttggagatgaagtggtgttgataaaccggtccctggtggagcgaggccttgcccagtgggtagacagctactacacaagcctttgacccccatgctgcttcctgagagtctttttttgcactgttgaaattgggcttggcactcaagtcaaagatgaacatcggaataacaaacattgtcctctccagaaagtcctttctttctccatactgtagtcctattgagaagacatttcgtctctgagaaaaaaggatggaactatgggttctcttcgcaaagccaaaggatagtgtttaacaagccagctggcttatgctggttctcagctgtttaaaaaaaaaaaaaaaaaggaatagaaacagtttcaaccagattgtcctattccccctgttccattcccctcttcttccttctatctccttccccggcaaaaaccaaacaaactggcagacaggccagggatgtatgttgcttgcttgagagggtttcttttacttcaaaatctttcttcagggagcaagacatgaactgactaattggtatccactacttgtacagcttacataaatgagttgatgatatttaaccagtttttataaacttcatttaggtctctaaacacagactttttaaattgcaactgtaaatatgaaatggtcatcacatctgaccttggtcagtggggaggggaactggtatcctgccaagcctggttgtaatttgtaaccattttctatttgtgcaaactctgtaaatatgtgtttaaacaaatgtaatattttgtacaagatacactggagaacaaagggaactcaagattcttccagccacatgtcacctgtaggtagaagtaaactctgcagtgcagcttctgctcttggcccctctggccagggcccctgtggcttcctgcacactggacaggtgactgtatggtagagactgtgatctgggaactttttgctgtacaaatctgtttaaaaaaaaaaaaaagtaactcattgaattaacttgcagtggtgtgtttgattcttttttagactggcttcagcattgtgcagtttaaaaataagtaagtaacttacataaatcttcaattgtatg

SEQ ID NO: 103053 - DNA, 4072 bp, Homo sapiens
  Payload ID: 102
  Gene Symbol: AKAP10
  Gene Name: A kinase (PRKA) anchor protein 10
  Uniprot ID: O43572
  ENST ID: ENST00000225737
  CDS Start-End: 159-2147
aaggaccggaactccgggcgggcggcttgttgataatatggcggctggagctgcctgggcatcccgaggaggcggtggggcccactcccggaagaagggtcccttttcgcgctagtgcagcggcccctctggacccggaagtccgggccggttgctgaatgaggggagccgggccctccccgcgccagtccccccgcaccctccgtcccgacccgggccccgccatgtccttcttccggcggaaagtgaaaggcaaagaacaagagaagacctcagatgtgaagtccattaaagcttcaatatccgtacattccccacaaaaaagcactaaaaatcatgccttgctggaggctgcaggaccaagtcatgttgcaatcaatgccatttctgccaacatggactccttttcaagtagcaggacagccacacttaagaagcagccaagccacatggaggccgctcattttggtgacctgggcagatcttgtctggactaccagactcaagagaccaaatcaagcctttctaagacccttgaacaagtcttgcacgacactattgtcctcccttacttcattcaattcatggaacttcggcgaatggagcatttggtgaaattttggttagaggctgaaagttttcattcaacaacttggtcgcgaataagagcacacagtctaaacacagtgaagcagagctcactggctgagcctgtctctccatctaaaaagcatgaaactacagcgtcttttttaactgattctcttgataagagattggaggattctggctcagcacagttgtttatgactcattcagaaggaattgacctgaataatagaactaacagcactcagaatcacttgctgctttcccaggaatgtgacagtgcccattctctccgtcttgaaatggccagagcaggaactcaccaagtttccatggaaacccaagaatcttcctctacacttacagtagccagtagaaatagtcccgcttctccactaaaagaattgtcaggaaaactaatgaaaagtatagaacaagatgcagtgaatacttttaccaaatatatatctccagatgctgctaaaccaataccaattacagaagcaatgagaaatgacatcatagcaaggatttgtggagaagatggacaggtggatcccaactgtttcgttttggcacagtccatagtctttagtgcaatggagcaagagcactttagtgagtttctgcgaagtcaccatttctgtaaataccagattgaagtgctgaccagtggaactgtttacctggctgacattctcttctgtgagtcagccctcttttatttctctgagtacatggaaaaagaggatgcagtgaatatcttacaattctggttggcagcagataacttccagtctcagcttgctgccaaaaagggccaatatgatggacaggaggcacagaatgatgccatgattttatatgacaagtacttctccctccaagccacacatcctcttggatttgatgatgttgtacgattagaaattgaatccaatatctgcagggaaggtgggccactccccaactgtttcacaactccattacgtcaggcctggacaaccatggagaaggtctttttgcctggctttttgtccagcaatctttattataaatatttgaatgatctcatccattcggttcgaggagatgaatttctgggcgggaacgtgtcgctgactgctcctggctctgttggccctcctgatgagtctcacccagggagttctgacagctctgcgtctcagtccagtgtgaaaaaagccagtattaaaatactgaaaaattttgatgaagcgataattgtggatgcggcaagtctggatccagaatctttatatcaacggacatatgccgggaagatgacatttggaagagtcagtgacttggggcaattcatccgagaatctgagcctgaacctgatgtaaggaaatcaaaaggatccatgttctcacaagctatgaagaaatgggtgcaaggaaatactgatgaggcccaggaagagctagcttggaagattgctaaaatgatagtcagtgacattatgcagcaggctcagtatgatcaaccgttagagaaatctacaaagttatgactcaaaacttgagataaaggaaatctgcttgtgaaaaataagagaacttttttcccttggttggattcttcaacacagccaatgaaaacagcactatatttctgatctgtcactgttgtttccaggagagaatgggagacaatcctagacttccaccataatgcagttacctgtaggcataattgatgcacatgatgttcacacagtgagagtcttaaagatacaaaatggtattgtttacattactagaaaattattagttttccaatggcaataacccatttatgagagtgttttagcctactggaatagacagggaccacatcctctgggaagcagataagcatagaactgatacttgatgcacactcgtagtggtaactcatccctaatcagcattgtaaagcaggtgccagaggtggtttgctttgtccttccaaagcaggtgagtcagccccaccgagagccaggcagctttgagtggcagcgtggtgctagcagcttcagcggaacagggtgagagttaattatgcagtcttcttgacagcggcattaatttggaaggaaactgacaagtcatgggtcaagtttcagtgacttcctccttcctctgatggcagtatatagttttcacattttaattcctcctcctgagatgcactatacttaaaaccattctctcccctgctaacagaagggtgtgaatctggtttactttgagcattaggatttgcccctttggaattctgcactccagttacttaactttcccttcagaatacatgtggaaagaaagaaagaaatagcgatgactccacttttgcccctgtggcaccttgaacaaagcagttcttcccaaattatactttttttttttttaaataaggtgagcaggatgactggggagagagaaacatttgactttgactgcctcccccattctttgctgtgagctggaaagtgtgcagttggtcgtctttcttctcctttctttaggatagtaagagactcactcactgcacttctgctcagttggcttctgcatcgggatcacacagccatcagcaggactgcccagttggtgagcacactccattgaccacgtggcgccagcgcttcctcaatgcacatgattgagaggaaagaaagttctcttagatgttactgcttttgctcagactttgcaaaaaaaaaaatatatatatatatgtataaatatataattattaatcacttttgtccttgagaaagtcttgaatgaacagagaatttattccattgcaatatttgattgtatagaggcacactgtttcatcgacagaagaagcaaaaaggctttgtgtaagtttttggtactatgtaccacctctgttattcttttaaagctgaagtattcatgtacttaaaccatattatatttaattgtgtttgattttaaaatatatatatatgaattctatttaaaattgtgtcaactttctgctttcagggcatttatggctcttctgttgaaatatattgatctttccaaatattttcatttgctttctaaaaacccagaacatgagccactactggactttgccttgtgtttgaagtgtatggcataaacccaaggtttttattagtcatctatgctgtgattaattcattttgttcttttaacaaaatatttccatccacttcacattgcttcaatctttaacagaaaagcaatataaaggttatagaataaaatgtggttttgggcaactcttgctgcctctgcatgttttggaataacaatttctacaagactctaggctgtttaaactagtgctttcagttaagataaattctaatcatttctttgtatatacattttgtgcttctgagctagagatgccaagtagttgtaaactgcttataaagagaatagcagcaaa

SEQ ID NO: 103054 - DNA, 1815 bp, Homo sapiens
  Payload ID: 102
  Gene Symbol: AKAP10
  Gene Name: A kinase (PRKA) anchor protein 10
  ENST ID: ENST00000395536
  CDS Start-End: 1-1815
atgaggggagccgggccctccccgcgccagtccccccgcaccctccgtcccgacccgggccccgccatgtccttcttccggcggaaagtgaaaggcaaagaacaagagaagacctcagatgtgaagtccattaaagcttcaatatccgtacattccccacaaaaaagcactaaaaatcatgccttgctggaggctgcaggaccaagtcatgttgcaatcaatgccatttctgccaacatggactccttttcaagtagcaggacagccacacttaagaagcagccaagccacatggaggccgctcattttggtgacctgggcagatcttgtctggactaccagactcaagagaccaaatcaagcctttctaagacccttgaacaagtcttgcacgacactattgtcctcccttacttcattcaattcatggaacttcggcgaatggagcatttggtgaaattttggttagaggctgaaagttttcattcaacaacttggtcgcgaataagagcacacagtctaaacacagtgaagcagagctcactggctgagcctgtctctccatctaaaaagcatgaaactacagcgtcttttttaactgattctcttgataagagattggaggattctggctcagcacagttgtttatgactcattcagaaggaattgacctgaataatagaactaacagcactcagaatcacttgctgctttcccaggaatgtgacagtgcccattctctccgtcttgaaatggccagagcaggaactcaccaagtttccatggaaacccaagaatcttcctctacacttacagtagccagtagaaatagtcccgcttctccactaaaagaattgtcaggaaaactaatgaaaagtatagaacaagatgcagtgaatacttttaccaaatatatatctccagatgctgctaaaccaataccaattacagaagcaatgagaaatgacatcatagcaaggatttgtggagaagatggacaggtggatcccaactgtttcgttttggcacagtccatagtctttagtgcaatggagcaagagcactttagtgagtttctgcgaagtcaccatttctgtaaataccagattgaagtgctgaccagtggaactgtttacctggctgacattctcttctgtgagtcagccctcttttatttctctgagtacatggaaaaagaggatgcagtgaatatcttacaattctggttggcagcagataacttccagtctcagcttgctgccaaaaagggccaatatgatggacaggaggcacagaatgatgccatgattttatatgacaagtacttctccctccaagccacacatcctcttggatttgatgatgttgtacgattagaaattgaatccaatatctgcagggaaggtgggccactccccaactgtttcacaactccattacgtcaggcctggacaaccatggagaagtccagtgtgaaaaaagccagtattaaaatactgaaaaattttgatgaagcgataattgtggatgcggcaagtctggatccagaatctttatatcaacggacatatgccgggaagatgacatttggaagagtcagtgacttggggcaattcatccgagaatctgagcctgaacctgatgtaaggaaatcaaaaggatccatgttctcacaagctatgaagaaatgggtgcaaggaaatactgatgaggcccaggaagagctagcttggaagattgctaaaatgatagtcagtgacattatgcagcaggctcagtatgatcaaccgttagagaaatctacaaagttatga

SEQ ID NO: 103055 - DNA, 565 bp, Homo sapiens
  Payload ID: 102
  Gene Symbol: AKAP10
  Gene Name: A kinase (PRKA) anchor protein 10
  ENST ID: ENST00000576896
  CDS Start-End: 150-565
aactccgggcgggcggcttgttgataatatggcggctggagctgcctgggcatcccgaggaggcggtggggcccactcccggaagaagggtcccttttcgcgctagtgcagcggcccctctggacccggaagtccgggccggttgctgaatgaggggagccgggccctccccgcgccagtccccccgcaccctccgtcccgacccgggccccgccatgtccttcttccggcggaaagtgaaaggcaaagaacaagagaagacctcagatgtgaagtccattaaagcactaaaaatcatgccttgctggaggctgcaggaccaagtcatgttgcaatcaatgccatttctgccaacatggactccttttcaagtagcaggacagccacacttaagaagcagccaagccacatggaggccgctcattttggtgacctgggcagatcttgtctggactaccagactcaagagaccaaatcaagcctttctaagacccttgaacaagtcttgcacgacactattgtcctcccttacttcattcaattcatggaacttcggcgaatggag

SEQ ID NO: 103056 - DNA, 559 bp, Homo sapiens
  Payload ID: 102
  Gene Symbol: AKAP10
  Gene Name: A kinase (PRKA) anchor protein 10
  ENST ID: ENST00000572341
  CDS Start-End: 150-350
aactccgggcgggcggcttgttgataatatggcggctggagctgcctgggcatcccgaggaggcggtggggcccactcccggaagaagggtcccttttcgcgctagtgcagcggcccctctggacccggaagtccgggccggttgctgaatgaggggagccgggccctccccgcgccagtccccccgcaccctccgtcccgacccgggccccgccatgtccttcttccggcggaaagtgaaaggcaaagaacaagagaagacctcagatgtgaagtccattaaaggctgcaggaccaagtcatgttgcaatcaatgccatttctgccaacatggactccttttcaagtagcaggacagccacacttaagaagcagccaagccacatggaggccgctcattttggtgacctgggcagatcttgtctggactaccagactcaagagaccaaatcaagcctttctaagacccttgaacaagtcttgcacgacactattgtcctcccttacttcattcaattcatggaacttcggcgaatggagcatttggtgaaattttggt

SEQ ID NO: 103057 - DNA, 564 bp, Homo sapiens
  Payload ID: 102
  Gene Symbol: AKAP10
  Gene Name: A kinase (PRKA) anchor protein 10
  ENST ID: ENST00000571858
  CDS Start-End: 150-341
aactccgggcgggcggcttgttgataatatggcggctggagctgcctgggcatcccgaggaggcggtggggcccactcccggaagaagggtcccttttcgcgctagtgcagcggcccctctggacccggaagtccgggccggttgctgaatgaggggagccgggccctccccgcgccagtccccccgcaccctccgtcccgacccgggccccgccatgtccttcttccggcggaaagtgaaaggcaaagaacaagagaagacctcagatgtgaagtccattaaagtagagacagagtttcaccatgttagccagtatggtctcgatctcctgaccttgtgatccgcccgcctcggcctcccaaagtgctgggattacaagcgtgagccaccgcacccggcccttcaatatccgtacattccccacaaaaaagcactaaaaatcatgccttgctggaggctgcaggaccaagtcatgttgcaatcaatgccatttctgccaacatggactccttttcaagtagcaggacagccacacttaagaagcagccaagccacatggaggc

SEQ ID NO: 103058 - DNA, 236 bp, Homo sapiens
  Payload ID: 102
  Gene Symbol: AKAP10
  Gene Name: A kinase (PRKA) anchor protein 10
  ENST ID: ENST00000583951
  CDS Start-End: 1-236
ctggctctgttggccctcctgatgagtctcacccagggagttctgacagctctgcgtctcaggaagatgacatttggaagagtcagtgacttggggcaattcatccgagaatctgagcctgaacctgatgtaaggaaatcaaaaggatccatgttctcacaagctatgaagaaatgggtgcaaggaaatactgatgaggcccaggaagagctagcttggaagattgctaaaatgat

SEQ ID NO: 103059 - DNA, 1319 bp, Homo sapiens
  Payload ID: 102
  Gene Symbol: AKAP10
  Gene Name: A kinase (PRKA) anchor protein 10
  ENST ID: ENST00000582611
  CDS Start-End: 150-602
aactccgggcgggcggcttgttgataatatggcggctggagctgcctgggcatcccgaggaggcggtggggcccactcccggaagaagggtcccttttcgcgctagtgcagcggcccctctggacccggaagtccgggccggttgctgaatgaggggagccgggccctccccgcgccagtccccccgcaccctccgtcccgacccgggccccgccatgtccttcttccggcggaaagtgaaaggcaaagaacaagagaagacctcagatgtgaagtccattaaagcttcaatatccgtacattccccacaaaaaagcactaaaaatcatgccttgctggaggctgcaggaccaagtcatgttgcaatcaatgccatttctgccaacatggactccttttcaagtagcaggacagccacacttaagaagcagccaagccacatggaggccgctcattttggtgacctggatcttgtctggactaccagactcaagagaccaaatcaagcctttctaagacccttgaacaagtcttgcacgacactattgtcctcccttacttcattcaattcatggaacttcggcgaatggagcatttggtgaaattttggttagaggctgaaagttttcattcaacaacttggtcgcgaataagagcacacagtctaaacacagtgaagcagagctcactggctgagcctgtctctccatctaaaaagcatgaaactacagcgtcttttttaactgattctcttgataagagattggaggattctggctcagcacagttgtttatgactcattcagaaggaattgacctgaataatagaactaacagcactcagaatcacttgctgctttcccaggaatgtgacagtgcccattctctccgtcttgaaatggccagagcaggaactcaccaagtttccatggaaacccaagaatcttcctctacacttacagtagccagtagaaatagtcccgcttctccactaaaagaattgtcaggaaaactaatgaaaagtatagaacaagatgcagtgaatacttttaccaaatatatatctccagatgctgctaaaccaataccaattacagaagcaatgagaaatgacatcatagcaaggatttgtggagaagatggacaggtggatcccaactgtttcgttttggcacagtccatagtctttagtgcaatggagcaagagcactttagtgagtttctgcgaagtcaccatttctgtaaataccagattgaagtgctgaccagtggaactgtttacctggctgacattctcttctgtgagtcagccctctttt

SEQ ID NO: 103060 - DNA, 720 bp, Homo sapiens
  Payload ID: 102
  Gene Symbol: AKAP10
  Gene Name: A kinase (PRKA) anchor protein 10
  ENST ID: ENST00000460046
  CDS Start-End: 1-179
ccaaatatatatctccagatgctgctaaaccaataccaattacagaagcaatgagaaatgacatcatagcaaggatttgtggagaagatggacaggtggatcccaactgtttcgttttggcacagtccatagtctttagtgcaatggagcaagatacatggaaaaagaggatgcagtgaatatcttacaattctggttggcagcagataacttccagtctcagcttgctgccaaaaagggccaatatgatggacaggaggcacagaatgatgccatgattttatatgacaagtacttctccctccaagccacacatcctcttggatttgatgatgttgtacgattagaaattgaatccaatatctgcagggaaggtgggccactccccaactgtttcacaactccattacgtcaggcctggacaaccatggagaaggtaacccagaacttcaaacgtatcaaactacaagaagttttattggtagaactcataaaatataaggtgggaaaaccaagcagaatagcacagtggaaattgaagcagtccagcaaagtgattaagagcagaggccttgagtctggcctggtatgtacagtcacgtgccacataacattttagtcaacagtggactgcgtgtacgatggtcctgtacgattataatggatcaaagctggtagtgcaataataacaaaagttagaaaaaataaattttaataagt

SEQ ID NO: 103061 - DNA, 475 bp, Homo sapiens
  Payload ID: 102
  Gene Symbol: AKAP10
  Gene Name: A kinase (PRKA) anchor protein 10
  ENST ID: ENST00000578898
  CDS Start-End: 1-94
gctgactgctcctggctctgttggccctcctgatgagtctcacccagggagttctgacagctctgcgtctcagtgtgaaaaaagccagtattaaaatactgaaaaattttgatgaagcgataattgtggatgcggcaagtctggatccagaatctttatatcaacggacatatgccgggaagatgacatttggaagagtcagtgacttggggcaattcatccgagaatctgagcctgaacctgatgtaaggaaatcaaaaggatccatgttctcacaagctatgaagaaatgggtgcaaggaaatactgatgaggcccaggaagagctagcttggaagattgctaaaatgatagtcagtgacattatgcagcaggctcagtatgatcaaccgttagagaaatctacaaagttatgactcaaaacttgagataaaggaaatctgcttgtgaaaaataagagaacttttttcccttg

SEQ ID NO: 103062 - DNA, 9920 bp, Homo sapiens
  Payload ID: 103
  Gene Symbol: AKAP11
  Gene Name: A kinase (PRKA) anchor protein 11
  Uniprot ID: Q9UKA4
  ENST ID: ENST00000025301
  CDS Start-End: 176-5881
gcttgcttgcccggctcgctcacgggtcgttgaggccggtgacatgtctgtgagctgcggaggctgcggcccccagatctttctctttgacactttgcaataaaaaagggcagtgagattgaataggtgttttgtggattaactcttcattgattatatacaacaaaaaatagttatggcgactttcagaaacaatcacatgaagactaaagcatctgtcagaaaaagcttcagtgaagatgtgttccagtctgtaaagtctttattgcagagtcagaaggaactatgcagtgtaacagcagaggactgtttacagcaggatgagcatgccaatttaactgaggtcacatttctgggttttaatgaagagacagatgctgctcatatacaggatttagctgcagtttctttggaacttccagatattctgaattcactccacttctgcagtctaaatgaaaatgaaattatttgtatgaagaatataaataaaccattagatataagcagtgatcctctaaatcagagtcatccttctggaatgctttgtgtcatgagagtgtcacctacatcaccaagacttaggattgattttatctttagtctcctaagtaaatatgctactggtataaggtacaccttggacacattcttgcatcagaagcaccaacttgagaccactgatgaagatgatgatgatactaaccagtctgtgtcatccatagaggatgactttgtcactgcttttgagcacttagaagaggaagagacttcaaagccatacaatgatggaatgaacattactgtgctaaggagccagtgtgatgctgcttcccagacggttactggtcatcatttagaaacccatgatttaaagattctcattagctctggacagcagaagtcattggctaaaccctcaacttcctcagtgaatgtcctgggacataaagaactaccttctgtgaaaacttcagtcacaacatcaatttcagagccttggacccaaaggagtttctataggtcatctaatgcttcagataaagatagtgatttacagaaaacatttttttcgtcttctcctgcctactcatctgaatcagaatgttcaagtccaagtcctgttattttcttggatgaagagggatatcaaaaaagcttaaaagcaaaacttgagctgcctaaaattcctgtgatgaaagatgatatagaggattcagactcagaagtaagtgaattttttgatagttttgatcagtttgatgaactagaacaaactttagagacttgcctgtttaacaaagatcccgtcatagggaagtcatcgcagaggaaagggcacaaacatggaaagtcatgtatgaatcctcaaaaattcaagtttgatcgtccagctctcccagctaatgttagaaagccaactcctcgtaaaccagaatctccatatggtaacctgtgtgatgctccggattctcctcgcccagtgaaggcatcaagggaagatagtggtttatttagtcctattcgatcctctgcttttagtcctcttggaggctgtactccagctgaatgtttttgccaaacagatattggtggagataggattcatgaaaatcatgattctgtttattacacctatgaagactatgcaaaaagcatttcatgtgaagtactaggctcagttcttcgtacccaccatactaataccctatcaaatattaacagtattaaacatggagaaaataaaactgtaacttttaagcatggaaaccttgatcaaaaaaataaatctaaaaataaatccttaatgattaaagatagcattcaaaaatttgcagcagatcttgtggaaaaaagttttggcagtgcatttaaagacttacagaaaggagtctcttcatgtaccaatgctttgtaccacttagccatcaaattgacatcatctgttttgcagatggcatttgatgagctgagaaggcagcgtgcattttcactaaaagaacgtgccattagtggcctggctaactttttggtgagtgaagctttatcaaatgccttaaaagatttacagtatgtaaagaagcagatattcacaaacacagttgctaggtttgctgcagatcttgctgaagagcttgtttttgaaggcatcatggaggtgtgtcagttttcatatcctcaaacgcctgcatctccacagtgtgggtcgtttgactttgaagacaaagtagtgaagttgtatgcaaaagatttgtctgaatctgtaatacaggaagcattcattgagctatcacaagttgatgtgacctttacaacaaaggcagcagttagtgtctctacggataatatcaagtatgtgagtgcagaaagtgtagtgccatcgacacaggctgtcacgttttccccttcttttcacaatcaagcaattatggtgacaaaaccagtgcaggaatataaaaaggaatacacagtgcagcaggccttgttttgtacttctggaattgttacttctataccggtgcccttggcaggaagtgcccttctcccatatcatatttcatctactgcatgtcaggccaaggctcatctgtcatctgatgatagtaattcaaatggtgattctgcccaagtgcatattgccacaaaaaacagagaagaaaaagcagcttgtctcagaaatatttgtttaccttcagaacacaatccaggtaatcagaatgattttaaaccaactaatgacgatattgaaatgcagagttcctcaaaattaccaaatgatcctgcaattattagcaacttttctgcagcagtggtgcatacgatagtaaatgaaactttagagtcaatgacatcattggaagttacaaaaatggttgatgaacgtacagattatttaactaaatctttaaaggagaaaacccctccattttcccactgtgatcaggcagtgctgcaatgcagtgaagctagtagcaataaggacatgtttgctgaccggttatctaaatctattattaaacattccatagataagagcaaatcagtgatcccaaatatagataaaaatgcagtatacaaggaaagcttgcctgtttctggagaagaatcacagttgacaccagaaaagtctcccaaatttcctgactctcagaatcagttaactcactgctcactttcagctgcaaaggattgtgttccagaatgtaaagtttctatggttcatggatcctccctagagacactgccatcttgtccagctgtgacaggtcagaaatctgacttgaaggaatctgctaaggatcaaccactgaaaaagcataacttgaatagtacatcacttgaggccttgtcttttggacaggaaaacccctttcctcattcacatactttctcatctacagcacttacctgtgtagatggtttgcatgtggaagataaacagaaagtcagagacagaaatgtaatacctgatactcctccatcaactcctctagtaccatcccgggctagttctgaatgggatatcaagaagttaactaaaaagctcaagggagaattagccaaagagtttgcacctgctacaccaccttctactccacacaactcatctgttggtagtttgtctgagaatgaacaaaatactatagaaaaagaagagttcatgttgaaactcatgcgatctctttctgaagaagttgagagtagtgaaagtggagagctcccagaagtggatgtgaagtcggagcactcagggaagaaggttcagtttgcagaagcattagctacacacatcctttctcttgcaactgaaatggcagcttcccatttagataacaaaataattcaagaacccaaggttaaaaacccttgcttaaatgtgcaaagtcaaagaagtgtgtcgcctacttttttaaacccctcagacgaaaatttgaaaacattatgcaattttgcgggtgatctggcagcagaagtcattacagaagctgagaaaatagcaaaagtccgaaattgtatgcttttcaagcaaaagaagaacagttgttatgctgatggtgacgaagattataaagtagaagagaagttggatatagaggctgtagtgcacccaagagaagtggatccgtttattctttcattaccaccaagttcttgtatgtcaggtctgatgtataagtatcccagctgtgaaagtgtgacagatgaatatgcaggtcaccttattcagatactaaaacaggaaggtggtaatagtgagttgataatggatcagtatgccaataggcttgcctaccgatctgttaaatcaggattacaggaagcagctaagacaaccaaagtgcagtgcaactcaagaatgttccctgtgccaagttcacaagtgaaaacaaacaaggaactgttaatgttttcaaacaaagagcaccaccaagaagcagacaaaaagagacaaagtaaaagaaatgaaggttacttttgtaaaaatcaaacttgtgaaaggaccctggatccatatagaaatgaggtctcccaactgtatagtttttcaacctctctggttcacagcataacaaaagatgctaaggaagagttgacagcctctctagttggcctaccaaaatccttaacagattcttgcttgtttgaaaaatctggatatgaagaagataatgagtgtcacgttacaccagaattgcctaagtctcttcagccttcctcacaaaatcacaggttttaccacagcactggcagtttaaatggatatggttgtggagacaatgttgttcaagctgtagaacagtatgccaaaaaagtagtggatgacactctagagctaactctaggatctacagtgttccgagtgtctgagaccacaaaatcagcagacagggtcacttatgcagaaaagttgtcacctcttacaggtcaagcttgcagatactgtgaccttaaagaactccacaattgcactggaaattcatctcagcactttttcagacagggttctctcgccagtagtaagccagcttctaatccaaaatttagcagccgctatcagaaatctaggatttttcatctcagtgtccctcagattcatgttaatcttgataagaaggcagtgcttgctgagaagatagttgctgaagccattgaaaaagctgagcgagagctgagcagtaccagcctggcagccgacagtgggatcggacaggagggtgccagctttgctgaaagccttgccacagaaaccatgacagcagctgtcacaaatgttgggcatgctgttagcagttcaaaagaaatagaagactttcagtcaaccgagtctgtcagtagccagcagatgaacctcagtattggtgatgacagcactggtagctggtccaatttaagttttgaagatgaacaccaagatgaaagcagcagttttcatcatctaagtgaaagtaatggtaacagcagtagctggagcagtcttggtttagaaggagatttgtatgaggacaatttatcctttccaacatcagacagtgatggaccagatgataaagatgaagagcatgaggacgaagtagaaggtttggggcaagatggaaagacactgctaattacgaatattgacatggagccatgcacggtagacccccagctaaggattattcttcagtggctcattgcctctgaggctgaagttgcagaactttattttcatgactctgcaaataaggagtttatgctactttcaaaacaattacaagagaaaggatggaaagtgggagacctcctgcaggctgtgcttcaatactatgaagtgatggaaaaagcttccagtgaggagagatgcaagtcgctgtttgattggctcttggaaaatgcatagagcaaaccccaaaccagtatattttagtatttgtttggggaggggaacaagccaataaagatgtttaggataaaatttgaatagtgaatattaacatcgtaagtcagttgggaggcaagtaaatatagctttctgagcgctttgtgttatcactcggtgtatatagttcatacttttgtaatctgtcaaaatactaccttcatttattcttctatacacatgtgtagtgtgtcaagaccctaagaacatgtatttgaaggaaggtctaaccagggggttttcaggggcattgtctgaccacattctttttgtatccaaatagtgctgctagaaactgcactgaagtggctgaggataggttccagtgatagagttataattttgctcctttgcaaacaaatggtatctaattaataactagtctgacatcagaaaataaaattgaggctgatttttaaaaatttctagtagatttttggcctttcctgtttttaaaaatcagtttcattttcatatttcatagatcagctattggtagctttttgatttccccaaactatttaatttcttagcagaaacattagtattttaggtttctataaacactataagtgatagtttcccccatcctttcattgacattatttgccaatgctgccagtcattctggcatgaaaggtgtgtgtgtgtgtgtgtgtgtgtgtgtgtgtgtgtgtgtgtgtaagggagtactttaaccttgccagtttgttccctcttttattttactgttttctttttagaaacccactgttaaaatttaaaaaggtgctttaaaataaaacgcctataaagattgtgcagtaagaatttttattgacaataattaaaattttttttgacaattttgggttcccaacttatcttacaagtgaaaacttaaattgtaaaacatgttgaaattttaaaaattaatgttaatatggaaatgcatttagagaagcccagtagtttttattgttggatttttgaaaaaacctctaccaagaatgtggtgttttttttgtttgtttgtttgtttgttttagaaaaattgggatttccccccaccccgccccacccagataaactatatctacactgtctcgtcaagttctctgacacgatctttctgggctctacatttcctactagtttgtgtccagaaactgcaagttgacatgaatagaggacaaaggttgtgtcttgcttttgtctctctcttccctccctgcaactctctctcccctcctcccactctcttccccctcccccctcctcccactgtctctcacctcccccaccccccactctctctcatctctcgctgtgtcctgtgtatgtgtgggtgtgtgtgtatttgggtgtgtaaatgttggttcttccactactggattttgtaatctaggataaatcactttttttggggactttgattttgctccattacgttttcattttttctgagcactgactgttctgaaagctgcacaaaacgtagaaagaagacatagcgcctgccagggaataggaaatgagggcacttacacattaatgtgaattagtaattgtggtatagaaatgttttatagtgaaagattcaaatttgcttttcaagaaaaatgccaaaagctatttaaataattcgaggttacatcgtaggttttgatttttctcaatttaagatacagaaatacagcaagccttaatataaagtttcctaaagtttcttcaagtattttttaaggtggagaaatgcaggaattgtataaccagaattgttcctgcctttagcttttcagaacttgagatgtggcagcactggactgggtttttttaaatgttaggactaggaatgtttgctcttgttaattatgaattaattgattattaagtttagaatgcatttttacaagtatctaactatcaaattgtgtttagtaacttgagtgtatgcacaagtttgatcaacagcaaaatagagttctgaatttcttttaaagtgatgatatattattttgtgaaactttgtgtttgaaaatgtttatttctgtttatggtgtaatcattctgaggtgaggcttttcttatttcctttgcattttgctagagctgtgctgagttcagcatttgcttatttaaccactacataatgacagaccagttattaggtattagcatgtgtggtaataataatagtggaacttcacacttacatcaattcagtgcaggggcatagaataaaatattaaatattggcagatgtatgaaaagaagtgtgagttaaaaatattgaatattggcaggtgtgaaaacaagtgtcaaaattcctcatatagagaaaataattttgagtttagagtattatcttttaattaagtgtagtctaaacttaactttctgtaaaggcactttgtggtttttccaaagatgttctagatctatttggttgctctatagtcaaacagctcttttgaagacaactgtcttattttattacaaattggcttgacatatttatactgtaacattgtaatattgctgtgctgtacattttggcccttacgaaatacgtctttttcagaactgttaaagttttgatgtacatcgagctgaattctgtttttaccagtttcaaaaccttcaagtgatatgtggaaaaaagtgaatgagacctctgatagggggttttcagaaccttgttcacaccaaaatgtgacagttctttcatgttttcctaaaccaagttaaaattacatgtatattttggtgttaaggttgatttttaagatacttctgatttgtacaaaaggaatgtttcctttataaatcacagaagaaaatgacaatatctgttggatatttgatataatttaatggtgttataaaacctttaagaggattcatggtgaatatatgtgataacatctttatactttgaaaaatgttccacttacccttcagatatttgttgtaagttaattcaattcttaatactttaattttgctccaacaagggctttatgttgctggtaagagaatttatttactaaatgcactatgtataaagtgaaagatagtttacttatctgactttgatattagatggctgacattagtgcacataatgcagagtttaaccttgattcttcaacagagtccagatttaaatgtctacttagttaattagttagctgatattcttccacaattaatatattcaatttcccatcagtatatcactttaaattttatgtttttctaaggaaactttccacagaattttaaacaactgatgcatccatactcagggtgtagggagaatactttgcatttaaaaaccctgtccacctgtcaccagcacaagagaattagagcttcagtgagaatttagaaaaattatactaaagtgagatgcattttttctcattttcagcaagactcctctaagcatttactcatttactgtattcctgctctgaagatgtggatacagaattagtcactcttgtcactttatttatttattggtttttttttaaccatctgtgtacattcctttcatagggtagagttctagttctagaagttcttattttgtttttgttgtaatgtttgaatactatttaatatccggttttaatattgctggatttgctacctttggttacttgtgcagtgttaaaagtaatccactttcttgtttaatataccagatacatagcaaaagcagcttggaataattatagctgtttatttggctgtgctcagttactatattaagatcttgtactgtgtaacagtaactcttttttgcttttcagtaatttaatatgttcacttaacaaaatacgaactttgagatgcactaaagttttgtttcagcagtggctcaaaaaatttcagaaattacttttgtaattatttgcaattaattgttcttttatcttacaattgtttaagcctgtgatctttcttctcccagctaagagttcttcaataaatttaagaaatacctggt

SEQ ID NO: 103063 - DNA, 6597 bp, Homo sapiens
  Payload ID: 104
  Gene Symbol: AKAP12
  Gene Name: A kinase (PRKA) anchor protein 12
  Uniprot ID: Q02952
  ENST ID: ENST00000253332
  CDS Start-End: 190-5538
ttcttttaaggagtttgccgcgagcgcgtctccttcattcgcaggctgggcgcgttcgcagtcggctggcggcgaaggaaggcgctctcgggacctcgcgggcgcgcgtcttttggctcttgcccctgtccctgcggcttggggaaggcgtaacccggcggctaggcgcgggagaagtgcggaggagccatgggcgccgggagctccaccgagcagcgcagcccggagcagccgcccgaggggagctccacgccggctgagcccgagcccagcggcggcggcccctcggccgaggcggcgccagacaccaccgcggaccccgccatcgctgcctcggaccccgccaccaagctcctacagaagaatggtcagctgtccaccatcaatggcgtagctgagcaagatgagctcagcctccaggagggtgacctaaatggccagaaaggagccctgaacggtcaaggagccctaaacagccaggaggaagaagaagtcattgtcacagaggttggacagagagactctgaagatgtgagcaaaagagactccgataaagagatggctactaagtcagcggttgttcacgacatcacagatgatgggcaggaggagacacccgaaataatcgaacagattccttcttcagaaagcaatttagaagagctaacacaacccactgagtcccaggctaatgatattggatttaagaaggtgtttaagtttgttggctttaaattcactgtgaaaaaggataagacagagaagcctgacactgtccagctactcactgtgaagaaagatgaaggggagggagcagcaggggctggcgaccacaaggaccccagccttggggctggagaagcagcatccaaagaaagcgaacccaaacaatctacagagaaacccgaagagaccctgaagcgtgagcaaagccacgcagaaatttctcccccagccgaatctggccaagcagtggaggaatgcaaagaggaaggagaagagaaacaagaaaaagaacctagcaagtctgcagaatctccgactagtcccgtgaccagtgaaacaggatcaaccttcaaaaaattcttcactcaaggttgggccggctggcgcaaaaagaccagtttcaggaagccgaaggaggatgaagtggaagcttcagagaagaaaaaggaacaagagccagaaaaagtagacacagaagaagacggaaaggcagaggttgcctccgagaaactgaccgcctccgagcaagcccacccacaggagccggcagaaagtgcccacgagccccggttatcagctgaatatgagaaagttgagctgccctcagaggagcaagtcagtggctcgcagggaccttctgaagagaaacctgctccgttggcgacagaagtgtttgatgagaaaatagaagtccaccaagaagaggttgtggccgaagtccacgtcagcaccgtggaggagagaaccgaagagcagaaaacggaggtggaagaaacagcagggtctgtgccagctgaagaattggttgaaatggatgcagaacctcaggaagctgaacctgccaaggagctggtgaagctcaaagaaacgtgtgtttccggagaggaccctacacagggagctgacctcagtcctgatgagaaggtgctgtccaaaccccccgaaggcgttgtgagtgaggtggaaatgctgtcatcacaggagagaatgaaggtgcagggaagtccactaaagaagctttttaccagcactggcttaaaaaagctttctggaaagaaacagaaagggaaaagaggaggaggagacgaggaatcaggggagcacactcaggttccagccgattctccggacagccaggaggagcaaaagggcgagagctctgcctcatcccctgaggagcccgaggagatcacgtgtctggaaaagggcttagccgaggtgcagcaggatggggaagctgaagaaggagctacttccgatggagagaaaaaaagagaaggtgtcactccctgggcatcattcaaaaagatggtgacgcccaagaagcgtgttagacggccttcggaaagtgataaagaagatgagctggacaaggtcaagagcgctaccttgtcttccaccgagagcacagcctctgaaatgcaagaagaaatgaaagggagcgtggaagagccaaagccggaagaaccaaagcgcaaggtggatacctcagtatcttgggaagctttaatttgtgtgggatcatccaagaaaagagcaaggagagggtcctcttctgatgaggaagggggaccaaaagcaatgggaggagaccaccagaaagctgatgaggccggaaaagacaaagagacggggacagacgggatccttgctggttcccaagaacatgatccagggcagggaagttcctccccggagcaagctggaagccctaccgaaggggagggcgtttccacctgggagtcatttaaaaggttagtcacgccaagaaaaaaatcaaagtccaagctggaagagaaaagcgaagactccatagctgggtctggtgtagaacattccactccagacactgaacccggtaaagaagaatcctgggtctcaatcaagaagtttattcctggacgaaggaagaaaaggccagatgggaaacaagaacaagcccctgttgaagacgcagggccaacaggggccaacgaagatgactctgatgtcccggccgtggtccctctgtctgagtatgatgctgtagaaagggagaaaatggaggcacagcaagcccaaaaaagcgcagagcagcccgagcagaaggcagccactgaggtgtccaaggagctcagcgagagtcaggttcatatgatggcagcagctgtcgctgacgggacgagggcagctaccattattgaagaaaggtctccttcttggatatctgcttcagtgacagaacctcttgaacaagtagaagctgaagccgcactgttaactgaggaggtattggaaagagaagtaattgcagaagaagaaccccccacggttactgaacctctgccagagaacagagaggcccggggcgacacggtcgttagtgaggcggaattgacccccgaagctgtgacagctgcagaaactgcagggccattgggtgccgaagaaggaaccgaagcatctgctgctgaagagaccacagaaatggtgtcagcagtctcccagttaaccgactccccagacaccacagaggaggccactccggtgcaggaggtggaaggtggcgtacctgacatagaagagcaagagaggcggactcaagaggtcctccaggcagtggcagaaaaagtgaaagaggaatcccagctgcctggcaccggtgggccagaagatgtgcttcagcctgtgcagagagcagaggcagaaagaccagaagagcaggctgaagcgtcgggtctgaagaaagagacggatgtagtgttgaaagtagatgctcaggaggcaaaaactgagccttttacacaagggaaggtggtggggcagaccaccccagaaagctttgaaaaagctcctcaagtcacagagagcatagagtccagtgagcttgtaaccacttgtcaagccgaaaccttagctggggtaaaatcacaggagatggtgatggaacaggctatcccccctgactcggtggaaacccctacagacagtgagactgatggaagcacccccgtagccgactttgacgcaccaggcacaacccagaaagacgagattgtggaaatccatgaggagaatgaggtcgcatctggtacccagtcagggggcacagaagcagaggcagttcctgcacagaaagagaggcctccagcaccttccagttttgtgttccaggaagaaactaaagaacaatcaaagatggaagacactctagagcatacagataaagaggtgtcagtggaaactgtatccattctgtcaaagactgaggggactcaagaggctgaccagtatgctgatgagaaaaccaaagacgtaccatttttcgaaggacttgaggggtctatagacacaggcataacagtcagtcgggaaaaggtcactgaagttgcccttaaaggtgaagggacagaagaagctgaatgtaaaaaggatgatgctcttgaactgcagagtcacgctaagtctcctccatcccccgtggagagagagatggtagttcaagtcgaaagggagaaaacagaagcagagccaacccatgtgaatgaagagaagcttgagcacgaaacagctgttaccgtatctgaagaggtcagtaagcagctcctccagacagtgaatgtgcccatcatagatggggcaaaggaagtcagcagtttggaaggaagccctcctccctgcctaggtcaagaggaggcagtatgcaccaaaattcaagttcagagctctgaggcatcattcactctaacagcggctgcagaggaggaaaaggtcttaggagaaactgccaacattttagaaacaggtgaaacgttggagcctgcaggtgcacatttagttctggaagagaaatcctctgaaaaaaatgaagactttgccgctcatccaggggaagatgctgtgcccacagggcccgactgtcaggcaaaatcgacaccagtgatagtatctgctactaccaagaaaggcttaagttccgacctggaaggagagaaaaccacatcactgaagtggaagtcagatgaagtcgatgagcaggttgcttgccaggaggtcaaagtgagtgtagcaattgaggatttagagcctgaaaatgggattttggaacttgagaccaaaagcagtaaacttgtccaaaacatcatccagacagccgttgaccagtttgtacgtacagaagaaacagccaccgaaatgttgacgtctgagttacagacacaagctcacgtgataaaagctgacagccaggacgctggacaggaaacggagaaagaaggagaggaacctcaggcctctgcacaggatgaaacaccaattacttcagccaaagaggagtcagagtcaaccgcagtgggacaagcacattctgatatttccaaagacatgagtgaagcctcagaaaagaccatgactgttgaggtagaaggttccactgtaaatgatcagcagctggaagaggtcgtcctcccatctgaggaagagggaggtggagctggaacaaagtctgtgccagaagatgatggtcatgccttgttagcagaaagaatagagaagtcactagttgaaccgaaagaagatgaaaaaggtgatgatgttgatgaccctgaaaaccagaactcagccctggctgatactgatgcctcaggaggcttaaccaaagagtccccagatacaaatggaccaaaacaaaaagagaaggaggatgcccaggaagtagaattgcaggaaggaaaagtgcacagtgaatcagataaagcgatcacaccccaagcacaggaggagttacagaaacaagagagagaatctgcaaagtcagaacttacagaatcttaaaacatcatgcagttaaactcattgtctgtttggaagaccagaatgtgaagacaagtagtagaagaaaatgaatgctgctgctgagactgaagaccagtatttcagaactttgagaattggagagcaggcacatcaactgatctcatttctagagagcccctgacaatcctgaggcttcatcaggagctagagccatttaacatttcctctttccaagaccaacctacaattttcccttgataaccatataaattctgatttaaggtcctaaattcttaacctggaactggagttggcaatacctagttctgcttctgaaactggagtatcattctttacatatttatatgtatgttttaagtagtcctcctgtatctattgtatatttttttcttaatgtttaaggaaatgtgcaggatactacatgctttttgtatcacacagtatatgatggggcatgtgccatagtgcaggcttggggagctttaagcctcagttatataacccacgaaaaacagagcctcctagatgtaacattcctgatcaaggtacaattctttaaaattcactaatgattgaggtccatatttagtggtactctgaaattggtcactttcctattacacggagtgtgctaaaactaaaaagcattttgaaacatacagaatgttctattgtcattgggaaatttttctttctaacccagtggaggttagaaagaagttatattctggtagcaaattaactttacatcctttttcctacttgttatggttgtttggaccgataagtgtgcttaatcctgaggcaaagtagtgaatatgttttatatgttatgaagaaaagaattgttgtaagtttttgattctactcttatatgctggactgcattcacacatggcatgaaataagtcaggttctttacaaatggtattttgatagatactggattgtgtttgtgccatatttgtgccattcttttaagaacaatgttgcaacacattcatttggataagttgtgatttgacgactgatttaaataaaatatttgcttcactt

SEQ ID NO: 103064 - DNA, 6287 bp, Homo sapiens
  Payload ID: 104
  Gene Symbol: AKAP12
  Gene Name: A kinase (PRKA) anchor protein 12
  Uniprot ID: Q02952
  ENST ID: ENST00000354675
  CDS Start-End: 174-5228
ggcagctccgagggcacctccggttctcccccatcctccgggagtgtctgggcgctcagtccgctctgatcccgccgaaaccacctgcggttggcaggcaggagactaggcgtctgccggggagggcagggacccgctaagctgatctcctgtacagtagtgctacttaaaatatgctggggaccatcaccatcacagttggacagagagactctgaagatgtgagcaaaagagactccgataaagagatggctactaagtcagcggttgttcacgacatcacagatgatgggcaggaggagacacccgaaataatcgaacagattccttcttcagaaagcaatttagaagagctaacacaacccactgagtcccaggctaatgatattggatttaagaaggtgtttaagtttgttggctttaaattcactgtgaaaaaggataagacagagaagcctgacactgtccagctactcactgtgaagaaagatgaaggggagggagcagcaggggctggcgaccacaaggaccccagccttggggctggagaagcagcatccaaagaaagcgaacccaaacaatctacagagaaacccgaagagaccctgaagcgtgagcaaagccacgcagaaatttctcccccagccgaatctggccaagcagtggaggaatgcaaagaggaaggagaagagaaacaagaaaaagaacctagcaagtctgcagaatctccgactagtcccgtgaccagtgaaacaggatcaaccttcaaaaaattcttcactcaaggttgggccggctggcgcaaaaagaccagtttcaggaagccgaaggaggatgaagtggaagcttcagagaagaaaaaggaacaagagccagaaaaagtagacacagaagaagacggaaaggcagaggttgcctccgagaaactgaccgcctccgagcaagcccacccacaggagccggcagaaagtgcccacgagccccggttatcagctgaatatgagaaagttgagctgccctcagaggagcaagtcagtggctcgcagggaccttctgaagagaaacctgctccgttggcgacagaagtgtttgatgagaaaatagaagtccaccaagaagaggttgtggccgaagtccacgtcagcaccgtggaggagagaaccgaagagcagaaaacggaggtggaagaaacagcagggtctgtgccagctgaagaattggttgaaatggatgcagaacctcaggaagctgaacctgccaaggagctggtgaagctcaaagaaacgtgtgtttccggagaggaccctacacagggagctgacctcagtcctgatgagaaggtgctgtccaaaccccccgaaggcgttgtgagtgaggtggaaatgctgtcatcacaggagagaatgaaggtgcagggaagtccactaaagaagctttttaccagcactggcttaaaaaagctttctggaaagaaacagaaagggaaaagaggaggaggagacgaggaatcaggggagcacactcaggttccagccgattctccggacagccaggaggagcaaaagggcgagagctctgcctcatcccctgaggagcccgaggagatcacgtgtctggaaaagggcttagccgaggtgcagcaggatggggaagctgaagaaggagctacttccgatggagagaaaaaaagagaaggtgtcactccctgggcatcattcaaaaagatggtgacgcccaagaagcgtgttagacggccttcggaaagtgataaagaagatgagctggacaaggtcaagagcgctaccttgtcttccaccgagagcacagcctctgaaatgcaagaagaaatgaaagggagcgtggaagagccaaagccggaagaaccaaagcgcaaggtggatacctcagtatcttgggaagctttaatttgtgtgggatcatccaagaaaagagcaaggagagggtcctcttctgatgaggaagggggaccaaaagcaatgggaggagaccaccagaaagctgatgaggccggaaaagacaaagagacggggacagacgggatccttgctggttcccaagaacatgatccagggcagggaagttcctccccggagcaagctggaagccctaccgaaggggagggcgtttccacctgggagtcatttaaaaggttagtcacgccaagaaaaaaatcaaagtccaagctggaagagaaaagcgaagactccatagctgggtctggtgtagaacattccactccagacactgaacccggtaaagaagaatcctgggtctcaatcaagaagtttattcctggacgaaggaagaaaaggccagatgggaaacaagaacaagcccctgttgaagacgcagggccaacaggggccaacgaagatgactctgatgtcccggccgtggtccctctgtctgagtatgatgctgtagaaagggagaaaatggaggcacagcaagcccaaaaaagcgcagagcagcccgagcagaaggcagccactgaggtgtccaaggagctcagcgagagtcaggttcatatgatggcagcagctgtcgctgacgggacgagggcagctaccattattgaagaaaggtctccttcttggatatctgcttcagtgacagaacctcttgaacaagtagaagctgaagccgcactgttaactgaggaggtattggaaagagaagtaattgcagaagaagaaccccccacggttactgaacctctgccagagaacagagaggcccggggcgacacggtcgttagtgaggcggaattgacccccgaagctgtgacagctgcagaaactgcagggccattgggtgccgaagaaggaaccgaagcatctgctgctgaagagaccacagaaatggtgtcagcagtctcccagttaaccgactccccagacaccacagaggaggccactccggtgcaggaggtggaaggtggcgtacctgacatagaagagcaagagaggcggactcaagaggtcctccaggcagtggcagaaaaagtgaaagaggaatcccagctgcctggcaccggtgggccagaagatgtgcttcagcctgtgcagagagcagaggcagaaagaccagaagagcaggctgaagcgtcgggtctgaagaaagagacggatgtagtgttgaaagtagatgctcaggaggcaaaaactgagccttttacacaagggaaggtggtggggcagaccaccccagaaagctttgaaaaagctcctcaagtcacagagagcatagagtccagtgagcttgtaaccacttgtcaagccgaaaccttagctggggtaaaatcacaggagatggtgatggaacaggctatcccccctgactcggtggaaacccctacagacagtgagactgatggaagcacccccgtagccgactttgacgcaccaggcacaacccagaaagacgagattgtggaaatccatgaggagaatgaggtcgcatctggtacccagtcagggggcacagaagcagaggcagttcctgcacagaaagagaggcctccagcaccttccagttttgtgttccaggaagaaactaaagaacaatcaaagatggaagacactctagagcatacagataaagaggtgtcagtggaaactgtatccattctgtcaaagactgaggggactcaagaggctgaccagtatgctgatgagaaaaccaaagacgtaccatttttcgaaggacttgaggggtctatagacacaggcataacagtcagtcgggaaaaggtcactgaagttgcccttaaaggtgaagggacagaagaagctgaatgtaaaaaggatgatgctcttgaactgcagagtcacgctaagtctcctccatcccccgtggagagagagatggtagttcaagtcgaaagggagaaaacagaagcagagccaacccatgtgaatgaagagaagcttgagcacgaaacagctgttaccgtatctgaagaggtcagtaagcagctcctccagacagtgaatgtgcccatcatagatggggcaaaggaagtcagcagtttggaaggaagccctcctccctgcctaggtcaagaggaggcagtatgcaccaaaattcaagttcagagctctgaggcatcattcactctaacagcggctgcagaggaggaaaaggtcttaggagaaactgccaacattttagaaacaggtgaaacgttggagcctgcaggtgcacatttagttctggaagagaaatcctctgaaaaaaatgaagactttgccgctcatccaggggaagatgctgtgcccacagggcccgactgtcaggcaaaatcgacaccagtgatagtatctgctactaccaagaaaggcttaagttccgacctggaaggagagaaaaccacatcactgaagtggaagtcagatgaagtcgatgagcaggttgcttgccaggaggtcaaagtgagtgtagcaattgaggatttagagcctgaaaatgggattttggaacttgagaccaaaagcagtaaacttgtccaaaacatcatccagacagccgttgaccagtttgtacgtacagaagaaacagccaccgaaatgttgacgtctgagttacagacacaagctcacgtgataaaagctgacagccaggacgctggacaggaaacggagaaagaaggagaggaacctcaggcctctgcacaggatgaaacaccaattacttcagccaaagaggagtcagagtcaaccgcagtgggacaagcacattctgatatttccaaagacatgagtgaagcctcagaaaagaccatgactgttgaggtagaaggttccactgtaaatgatcagcagctggaagaggtcgtcctcccatctgaggaagagggaggtggagctggaacaaagtctgtgccagaagatgatggtcatgccttgttagcagaaagaatagagaagtcactagttgaaccgaaagaagatgaaaaaggtgatgatgttgatgaccctgaaaaccagaactcagccctggctgatactgatgcctcaggaggcttaaccaaagagtccccagatacaaatggaccaaaacaaaaagagaaggaggatgcccaggaagtagaattgcaggaaggaaaagtgcacagtgaatcagataaagcgatcacaccccaagcacaggaggagttacagaaacaagagagagaatctgcaaagtcagaacttacagaatcttaaaacatcatgcagttaaactcattgtctgtttggaagaccagaatgtgaagacaagtagtagaagaaaatgaatgctgctgctgagactgaagaccagtatttcagaactttgagaattggagagcaggcacatcaactgatctcatttctagagagcccctgacaatcctgaggcttcatcaggagctagagccatttaacatttcctctttccaagaccaacctacaattttcccttgataaccatataaattctgatttaaggtcctaaattcttaacctggaactggagttggcaatacctagttctgcttctgaaactggagtatcattctttacatatttatatgtatgttttaagtagtcctcctgtatctattgtatatttttttcttaatgtttaaggaaatgtgcaggatactacatgctttttgtatcacacagtatatgatggggcatgtgccatagtgcaggcttggggagctttaagcctcagttatataacccacgaaaaacagagcctcctagatgtaacattcctgatcaaggtacaattctttaaaattcactaatgattgaggtccatatttagtggtactctgaaattggtcactttcctattacacggagtgtgctaaaactaaaaagcattttgaaacatacagaatgttctattgtcattgggaaatttttctttctaacccagtggaggttagaaagaagttatattctggtagcaaattaactttacatcctttttcctacttgttatggttgtttggaccgataagtgtgcttaatcctgaggcaaagtagtgaatatgttttatatgttatgaagaaaagaattgttgtaagtttttgattctactcttatatgctggactgcattcacacatggcatgaaataagtcaggttctttacaaatggtattttgatagatactggattgtgtttgtgccatatttgtgccattcttttaagaacaatgttgcaacacattcatttggataagttgtgatttgacgactgatttaaataaaatatttgcttcactt

SEQ ID NO: 103065 - DNA, 6190 bp, Homo sapiens
  Payload ID: 104
  Gene Symbol: AKAP12
  Gene Name: A kinase (PRKA) anchor protein 12
  Uniprot ID: Q02952
  ENST ID: ENST00000359755
  CDS Start-End: 98-5131
agtgagtagcacgtgcacccaagcggcagttcgccccgcagcgatggcggacacggaatcccgagggccaccaactgtcccttaggaccggcccgagatggttggacagagagactctgaagatgtgagcaaaagagactccgataaagagatggctactaagtcagcggttgttcacgacatcacagatgatgggcaggaggagacacccgaaataatcgaacagattccttcttcagaaagcaatttagaagagctaacacaacccactgagtcccaggctaatgatattggatttaagaaggtgtttaagtttgttggctttaaattcactgtgaaaaaggataagacagagaagcctgacactgtccagctactcactgtgaagaaagatgaaggggagggagcagcaggggctggcgaccacaaggaccccagccttggggctggagaagcagcatccaaagaaagcgaacccaaacaatctacagagaaacccgaagagaccctgaagcgtgagcaaagccacgcagaaatttctcccccagccgaatctggccaagcagtggaggaatgcaaagaggaaggagaagagaaacaagaaaaagaacctagcaagtctgcagaatctccgactagtcccgtgaccagtgaaacaggatcaaccttcaaaaaattcttcactcaaggttgggccggctggcgcaaaaagaccagtttcaggaagccgaaggaggatgaagtggaagcttcagagaagaaaaaggaacaagagccagaaaaagtagacacagaagaagacggaaaggcagaggttgcctccgagaaactgaccgcctccgagcaagcccacccacaggagccggcagaaagtgcccacgagccccggttatcagctgaatatgagaaagttgagctgccctcagaggagcaagtcagtggctcgcagggaccttctgaagagaaacctgctccgttggcgacagaagtgtttgatgagaaaatagaagtccaccaagaagaggttgtggccgaagtccacgtcagcaccgtggaggagagaaccgaagagcagaaaacggaggtggaagaaacagcagggtctgtgccagctgaagaattggttgaaatggatgcagaacctcaggaagctgaacctgccaaggagctggtgaagctcaaagaaacgtgtgtttccggagaggaccctacacagggagctgacctcagtcctgatgagaaggtgctgtccaaaccccccgaaggcgttgtgagtgaggtggaaatgctgtcatcacaggagagaatgaaggtgcagggaagtccactaaagaagctttttaccagcactggcttaaaaaagctttctggaaagaaacagaaagggaaaagaggaggaggagacgaggaatcaggggagcacactcaggttccagccgattctccggacagccaggaggagcaaaagggcgagagctctgcctcatcccctgaggagcccgaggagatcacgtgtctggaaaagggcttagccgaggtgcagcaggatggggaagctgaagaaggagctacttccgatggagagaaaaaaagagaaggtgtcactccctgggcatcattcaaaaagatggtgacgcccaagaagcgtgttagacggccttcggaaagtgataaagaagatgagctggacaaggtcaagagcgctaccttgtcttccaccgagagcacagcctctgaaatgcaagaagaaatgaaagggagcgtggaagagccaaagccggaagaaccaaagcgcaaggtggatacctcagtatcttgggaagctttaatttgtgtgggatcatccaagaaaagagcaaggagagggtcctcttctgatgaggaagggggaccaaaagcaatgggaggagaccaccagaaagctgatgaggccggaaaagacaaagagacggggacagacgggatccttgctggttcccaagaacatgatccagggcagggaagttcctccccggagcaagctggaagccctaccgaaggggagggcgtttccacctgggagtcatttaaaaggttagtcacgccaagaaaaaaatcaaagtccaagctggaagagaaaagcgaagactccatagctgggtctggtgtagaacattccactccagacactgaacccggtaaagaagaatcctgggtctcaatcaagaagtttattcctggacgaaggaagaaaaggccagatgggaaacaagaacaagcccctgttgaagacgcagggccaacaggggccaacgaagatgactctgatgtcccggccgtggtccctctgtctgagtatgatgctgtagaaagggagaaaatggaggcacagcaagcccaaaaaagcgcagagcagcccgagcagaaggcagccactgaggtgtccaaggagctcagcgagagtcaggttcatatgatggcagcagctgtcgctgacgggacgagggcagctaccattattgaagaaaggtctccttcttggatatctgcttcagtgacagaacctcttgaacaagtagaagctgaagccgcactgttaactgaggaggtattggaaagagaagtaattgcagaagaagaaccccccacggttactgaacctctgccagagaacagagaggcccggggcgacacggtcgttagtgaggcggaattgacccccgaagctgtgacagctgcagaaactgcagggccattgggtgccgaagaaggaaccgaagcatctgctgctgaagagaccacagaaatggtgtcagcagtctcccagttaaccgactccccagacaccacagaggaggccactccggtgcaggaggtggaaggtggcgtacctgacatagaagagcaagagaggcggactcaagaggtcctccaggcagtggcagaaaaagtgaaagaggaatcccagctgcctggcaccggtgggccagaagatgtgcttcagcctgtgcagagagcagaggcagaaagaccagaagagcaggctgaagcgtcgggtctgaagaaagagacggatgtagtgttgaaagtagatgctcaggaggcaaaaactgagccttttacacaagggaaggtggtggggcagaccaccccagaaagctttgaaaaagctcctcaagtcacagagagcatagagtccagtgagcttgtaaccacttgtcaagccgaaaccttagctggggtaaaatcacaggagatggtgatggaacaggctatcccccctgactcggtggaaacccctacagacagtgagactgatggaagcacccccgtagccgactttgacgcaccaggcacaacccagaaagacgagattgtggaaatccatgaggagaatgaggtcgcatctggtacccagtcagggggcacagaagcagaggcagttcctgcacagaaagagaggcctccagcaccttccagttttgtgttccaggaagaaactaaagaacaatcaaagatggaagacactctagagcatacagataaagaggtgtcagtggaaactgtatccattctgtcaaagactgaggggactcaagaggctgaccagtatgctgatgagaaaaccaaagacgtaccatttttcgaaggacttgaggggtctatagacacaggcataacagtcagtcgggaaaaggtcactgaagttgcccttaaaggtgaagggacagaagaagctgaatgtaaaaaggatgatgctcttgaactgcagagtcacgctaagtctcctccatcccccgtggagagagagatggtagttcaagtcgaaagggagaaaacagaagcagagccaacccatgtgaatgaagagaagcttgagcacgaaacagctgttaccgtatctgaagaggtcagtaagcagctcctccagacagtgaatgtgcccatcatagatggggcaaaggaagtcagcagtttggaaggaagccctcctccctgcctaggtcaagaggaggcagtatgcaccaaaattcaagttcagagctctgaggcatcattcactctaacagcggctgcagaggaggaaaaggtcttaggagaaactgccaacattttagaaacaggtgaaacgttggagcctgcaggtgcacatttagttctggaagagaaatcctctgaaaaaaatgaagactttgccgctcatccaggggaagatgctgtgcccacagggcccgactgtcaggcaaaatcgacaccagtgatagtatctgctactaccaagaaaggcttaagttccgacctggaaggagagaaaaccacatcactgaagtggaagtcagatgaagtcgatgagcaggttgcttgccaggaggtcaaagtgagtgtagcaattgaggatttagagcctgaaaatgggattttggaacttgagaccaaaagcagtaaacttgtccaaaacatcatccagacagccgttgaccagtttgtacgtacagaagaaacagccaccgaaatgttgacgtctgagttacagacacaagctcacgtgataaaagctgacagccaggacgctggacaggaaacggagaaagaaggagaggaacctcaggcctctgcacaggatgaaacaccaattacttcagccaaagaggagtcagagtcaaccgcagtgggacaagcacattctgatatttccaaagacatgagtgaagcctcagaaaagaccatgactgttgaggtagaaggttccactgtaaatgatcagcagctggaagaggtcgtcctcccatctgaggaagagggaggtggagctggaacaaagtctgtgccagaagatgatggtcatgccttgttagcagaaagaatagagaagtcactagttgaaccgaaagaagatgaaaaaggtgatgatgttgatgaccctgaaaaccagaactcagccctggctgatactgatgcctcaggaggcttaaccaaagagtccccagatacaaatggaccaaaacaaaaagagaaggaggatgcccaggaagtagaattgcaggaaggaaaagtgcacagtgaatcagataaagcgatcacaccccaagcacaggaggagttacagaaacaagagagagaatctgcaaagtcagaacttacagaatcttaaaacatcatgcagttaaactcattgtctgtttggaagaccagaatgtgaagacaagtagtagaagaaaatgaatgctgctgctgagactgaagaccagtatttcagaactttgagaattggagagcaggcacatcaactgatctcatttctagagagcccctgacaatcctgaggcttcatcaggagctagagccatttaacatttcctctttccaagaccaacctacaattttcccttgataaccatataaattctgatttaaggtcctaaattcttaacctggaactggagttggcaatacctagttctgcttctgaaactggagtatcattctttacatatttatatgtatgttttaagtagtcctcctgtatctattgtatatttttttcttaatgtttaaggaaatgtgcaggatactacatgctttttgtatcacacagtatatgatggggcatgtgccatagtgcaggcttggggagctttaagcctcagttatataacccacgaaaaacagagcctcctagatgtaacattcctgatcaaggtacaattctttaaaattcactaatgattgaggtccatatttagtggtactctgaaattggtcactttcctattacacggagtgtgctaaaactaaaaagcattttgaaacatacagaatgttctattgtcattgggaaatttttctttctaacccagtggaggttagaaagaagttatattctggtagcaaattaactttacatcctttttcctacttgttatggttgtttggaccgataagtgtgcttaatcctgaggcaaagtagtgaatatgttttatatgttatgaagaaaagaattgttgtaagtttttgattctactcttatatgctggactgcattcacacatggcatgaaataagtcaggttctttacaaatggtattttgatagatactggattgtgtttgtgccatatttgtgccattcttttaagaacaatgttgcaacacattcatttggataagttgtgatttgacgactgatttaaataaaatatttgcttcactt

SEQ ID NO: 103066 - DNA, 8432 bp, Homo sapiens
  Payload ID: 104
  Gene Symbol: AKAP12
  Gene Name: A kinase (PRKA) anchor protein 12
  Uniprot ID: Q02952
  ENST ID: ENST00000402676
  CDS Start-End: 241-5589
gggactcggactcgctcctgggcgagctgaaagtcggctgcagcagaagctcctgccttgggagtttgccgcgagcgcgtctccttcattcgcaggctgggcgcgttcgcagtcggctggcggcgaaggaaggcgctctcgggacctcgcgggcgcgcgtcttttggctcttgcccctgtccctgcggcttggggaaggcgtaacccggcggctaggcgcgggagaagtgcggaggagccatgggcgccgggagctccaccgagcagcgcagcccggagcagccgcccgaggggagctccacgccggctgagcccgagcccagcggcggcggcccctcggccgaggcggcgccagacaccaccgcggaccccgccatcgctgcctcggaccccgccaccaagctcctacagaagaatggtcagctgtccaccatcaatggcgtagctgagcaagatgagctcagcctccaggagggtgacctaaatggccagaaaggagccctgaacggtcaaggagccctaaacagccaggaggaagaagaagtcattgtcacagaggttggacagagagactctgaagatgtgagcaaaagagactccgataaagagatggctactaagtcagcggttgttcacgacatcacagatgatgggcaggaggagacacccgaaataatcgaacagattccttcttcagaaagcaatttagaagagctaacacaacccactgagtcccaggctaatgatattggatttaagaaggtgtttaagtttgttggctttaaattcactgtgaaaaaggataagacagagaagcctgacactgtccagctactcactgtgaagaaagatgaaggggagggagcagcaggggctggcgaccacaaggaccccagccttggggctggagaagcagcatccaaagaaagcgaacccaaacaatctacagagaaacccgaagagaccctgaagcgtgagcaaagccacgcagaaatttctcccccagccgaatctggccaagcagtggaggaatgcaaagaggaaggagaagagaaacaagaaaaagaacctagcaagtctgcagaatctccgactagtcccgtgaccagtgaaacaggatcaaccttcaaaaaattcttcactcaaggttgggccggctggcgcaaaaagaccagtttcaggaagccgaaggaggatgaagtggaagcttcagagaagaaaaaggaacaagagccagaaaaagtagacacagaagaagacggaaaggcagaggttgcctccgagaaactgaccgcctccgagcaagcccacccacaggagccggcagaaagtgcccacgagccccggttatcagctgaatatgagaaagttgagctgccctcagaggagcaagtcagtggctcgcagggaccttctgaagagaaacctgctccgttggcgacagaagtgtttgatgagaaaatagaagtccaccaagaagaggttgtggccgaagtccacgtcagcaccgtggaggagagaaccgaagagcagaaaacggaggtggaagaaacagcagggtctgtgccagctgaagaattggttgaaatggatgcagaacctcaggaagctgaacctgccaaggagctggtgaagctcaaagaaacgtgtgtttccggagaggaccctacacagggagctgacctcagtcctgatgagaaggtgctgtccaaaccccccgaaggcgttgtgagtgaggtggaaatgctgtcatcacaggagagaatgaaggtgcagggaagtccactaaagaagctttttaccagcactggcttaaaaaagctttctggaaagaaacagaaagggaaaagaggaggaggagacgaggaatcaggggagcacactcaggttccagccgattctccggacagccaggaggagcaaaagggcgagagctctgcctcatcccctgaggagcccgaggagatcacgtgtctggaaaagggcttagccgaggtgcagcaggatggggaagctgaagaaggagctacttccgatggagagaaaaaaagagaaggtgtcactccctgggcatcattcaaaaagatggtgacgcccaagaagcgtgttagacggccttcggaaagtgataaagaagatgagctggacaaggtcaagagcgctaccttgtcttccaccgagagcacagcctctgaaatgcaagaagaaatgaaagggagcgtggaagagccaaagccggaagaaccaaagcgcaaggtggatacctcagtatcttgggaagctttaatttgtgtgggatcatccaagaaaagagcaaggagagggtcctcttctgatgaggaagggggaccaaaagcaatgggaggagaccaccagaaagctgatgaggccggaaaagacaaagagacggggacagacgggatccttgctggttcccaagaacatgatccagggcagggaagttcctccccggagcaagctggaagccctaccgaaggggagggcgtttccacctgggagtcatttaaaaggttagtcacgccaagaaaaaaatcaaagtccaagctggaagagaaaagcgaagactccatagctgggtctggtgtagaacattccactccagacactgaacccggtaaagaagaatcctgggtctcaatcaagaagtttattcctggacgaaggaagaaaaggccagatgggaaacaagaacaagcccctgttgaagacgcagggccaacaggggccaacgaagatgactctgatgtcccggccgtggtccctctgtctgagtatgatgctgtagaaagggagaaaatggaggcacagcaagcccaaaaaagcgcagagcagcccgagcagaaggcagccactgaggtgtccaaggagctcagcgagagtcaggttcatatgatggcagcagctgtcgctgacgggacgagggcagctaccattattgaagaaaggtctccttcttggatatctgcttcagtgacagaacctcttgaacaagtagaagctgaagccgcactgttaactgaggaggtattggaaagagaagtaattgcagaagaagaaccccccacggttactgaacctctgccagagaacagagaggcccggggcgacacggtcgttagtgaggcggaattgacccccgaagctgtgacagctgcagaaactgcagggccattgggtgccgaagaaggaaccgaagcatctgctgctgaagagaccacagaaatggtgtcagcagtctcccagttaaccgactccccagacaccacagaggaggccactccggtgcaggaggtggaaggtggcgtacctgacatagaagagcaagagaggcggactcaagaggtcctccaggcagtggcagaaaaagtgaaagaggaatcccagctgcctggcaccggtgggccagaagatgtgcttcagcctgtgcagagagcagaggcagaaagaccagaagagcaggctgaagcgtcgggtctgaagaaagagacggatgtagtgttgaaagtagatgctcaggaggcaaaaactgagccttttacacaagggaaggtggtggggcagaccaccccagaaagctttgaaaaagctcctcaagtcacagagagcatagagtccagtgagcttgtaaccacttgtcaagccgaaaccttagctggggtaaaatcacaggagatggtgatggaacaggctatcccccctgactcggtggaaacccctacagacagtgagactgatggaagcacccccgtagccgactttgacgcaccaggcacaacccagaaagacgagattgtggaaatccatgaggagaatgaggtcgcatctggtacccagtcagggggcacagaagcagaggcagttcctgcacagaaagagaggcctccagcaccttccagttttgtgttccaggaagaaactaaagaacaatcaaagatggaagacactctagagcatacagataaagaggtgtcagtggaaactgtatccattctgtcaaagactgaggggactcaagaggctgaccagtatgctgatgagaaaaccaaagacgtaccatttttcgaaggacttgaggggtctatagacacaggcataacagtcagtcgggaaaaggtcactgaagttgcccttaaaggtgaagggacagaagaagctgaatgtaaaaaggatgatgctcttgaactgcagagtcacgctaagtctcctccatcccccgtggagagagagatggtagttcaagtcgaaagggagaaaacagaagcagagccaacccatgtgaatgaagagaagcttgagcacgaaacagctgttaccgtatctgaagaggtcagtaagcagctcctccagacagtgaatgtgcccatcatagatggggcaaaggaagtcagcagtttggaaggaagccctcctccctgcctaggtcaagaggaggcagtatgcaccaaaattcaagttcagagctctgaggcatcattcactctaacagcggctgcagaggaggaaaaggtcttaggagaaactgccaacattttagaaacaggtgaaacgttggagcctgcaggtgcacatttagttctggaagagaaatcctctgaaaaaaatgaagactttgccgctcatccaggggaagatgctgtgcccacagggcccgactgtcaggcaaaatcgacaccagtgatagtatctgctactaccaagaaaggcttaagttccgacctggaaggagagaaaaccacatcactgaagtggaagtcagatgaagtcgatgagcaggttgcttgccaggaggtcaaagtgagtgtagcaattgaggatttagagcctgaaaatgggattttggaacttgagaccaaaagcagtaaacttgtccaaaacatcatccagacagccgttgaccagtttgtacgtacagaagaaacagccaccgaaatgttgacgtctgagttacagacacaagctcacgtgataaaagctgacagccaggacgctggacaggaaacggagaaagaaggagaggaacctcaggcctctgcacaggatgaaacaccaattacttcagccaaagaggagtcagagtcaaccgcagtgggacaagcacattctgatatttccaaagacatgagtgaagcctcagaaaagaccatgactgttgaggtagaaggttccactgtaaatgatcagcagctggaagaggtcgtcctcccatctgaggaagagggaggtggagctggaacaaagtctgtgccagaagatgatggtcatgccttgttagcagaaagaatagagaagtcactagttgaaccgaaagaagatgaaaaaggtgatgatgttgatgaccctgaaaaccagaactcagccctggctgatactgatgcctcaggaggcttaaccaaagagtccccagatacaaatggaccaaaacaaaaagagaaggaggatgcccaggaagtagaattgcaggaaggaaaagtgcacagtgaatcagataaagcgatcacaccccaagcacaggaggagttacagaaacaagagagagaatctgcaaagtcagaacttacagaatcttaaaacatcatgcagttaaactcattgtctgtttggaagaccagaatgtgaagacaagtagtagaagaaaatgaatgctgctgctgagactgaagaccagtatttcagaactttgagaattggagagcaggcacatcaactgatctcatttctagagagcccctgacaatcctgaggcttcatcaggagctagagccatttaacatttcctctttccaagaccaacctacaattttcccttgataaccatataaattctgatttaaggtcctaaattcttaacctggaactggagttggcaatacctagttctgcttctgaaactggagtatcattctttacatatttatatgtatgttttaagtagtcctcctgtatctattgtatatttttttcttaatgtttaaggaaatgtgcaggatactacatgctttttgtatcacacagtatatgatggggcatgtgccatagtgcaggcttggggagctttaagcctcagttatataacccacgaaaaacagagcctcctagatgtaacattcctgatcaaggtacaattctttaaaattcactaatgattgaggtccatatttagtggtactctgaaattggtcactttcctattacacggagtgtgctaaaactaaaaagcattttgaaacatacagaatgttctattgtcattgggaaatttttctttctaacccagtggaggttagaaagaagttatattctggtagcaaattaactttacatcctttttcctacttgttatggttgtttggaccgataagtgtgcttaatcctgaggcaaagtagtgaatatgttttatatgttatgaagaaaagaattgttgtaagtttttgattctactcttatatgctggactgcattcacacatggcatgaaataagtcaggttctttacaaatggtattttgatagatactggattgtgtttgtgccatatttgtgccattcttttaagaacaatgttgcaacacattcatttggataagttgtgatttgacgactgatttaaataaaatatttgcttcacttagatttgctggttttattagataccaggaagcctgggacatatgtgtaccacattagaattctaaagataatgattgataagctagaactttctgatgtagtcattacatgaaaccccttgtcactggtttgtgtgttcagaggaagccatggccgagatagctttcctgaaataaaccagtagcttttcagattgacgttcttgctacaattgtaccatctggtaattcctgaaaatgtcaatttttttgtgttaatatttttggtttcaaacaataacaaatgtctctagaaagaaattttaagaaagcttaattaatagtaaaaatgcctttcctgaaataatcttggaaaattttttaaatgtcaaaatgatgagtcatgctaatacattgagggtttgtttttttgtttgtttgtttgtttgtttttgagacagagtttcgctcttgttgcccaggctggagtgcaatggcacgatctcagctcaccgcaacctccacctcccggattccagcgattctcctgcctcagcctacattaagggttttgtcagacaattgtcacacgaagaatagtgtcacttatctactcttgacacacagaactggcctggcatatagctttccagattttactcaaacttggtactccagtttgaaaatttaaattttgactgctgattagctggaaagcctagttttaatggaaagaaagtttgcttttaaaactgaaagtagtttctttttgctaacaaatctaacttcatacataattggccatattagtaaaacacctcatgatagcagtgtatatatagtcttgtttgtagttggaagtcatcttttaggagttattctcaaatatatataatagctacccatgcatcattattaaaatccccaaattcaaaaaacctctgatatatatatataatttttttttttttttttttttggccaactgagattgaaatccaagtgctggtttctagttctgaacatcaactaaagagttttggaaatgacagcaatttataacaagttcatattgacttcctctctatggcaggaagacattctgtgctgttttgaacagattaaagatttgtgtagtttgtgggaaattgacgtttttgtttaaattccacccgcgtttgtcttttcctaccacctgtggccaggtgctcgctggccatcacagttgcgattccatgagtagctgctttatgactgctttttgtactatctggatgtgcccagagttacttctgtacaagctctgtatctatgtccgttgagaacattattttaacaagaagaacaccaacagtagcatgaaatataatactgttttataattctaaagctgctgttaatttatgaagtacataataatctaatgtaaactgcagaagtcagagcaagtgcctacattttgttatttttggcattactacagagccatgtacaatagaaagcaatgcaagacttgtaaactctcaccacttcttgtaatatcaaatgttccccctcaggttattttgcttatggtacccatgagttgcctctctctgtacatagataaattgttccaatattttcctttgatgtttggaactacagatagtcaagggctggaaattttagttttcaatataagcttccagcttagcaattacctctagtcgaagacaatatttgattcctagttctgtttggggcaaattttcatttatctaaataaaatgcaatctaattaaatgccatggattttctttctgt

SEQ ID NO: 103067 - DNA, 9468 bp, Homo sapiens
  Payload ID: 105
  Gene Symbol: AKAP13
  Gene Name: A kinase (PRKA) anchor protein 13
  Uniprot ID: Q12802
  ENST ID: ENST00000361243
  CDS Start-End: 82-8535
tgtctttctccgcggcgaaggtgaagagttgtcccagctcggcccgcgggggagccccgggagccgcacgtgtcctgggtcatgaaacttaatccacagcaagctcccttatatggtgattgtgttgttacagtgctgcttgctgaagaggacaaagctgaagatgatgtagtgttttacttggtatttttgggttccaccctccgtcactgtacaagtactcggaaggtcagttctgatacattggagaccattgctcctggtcatgattgttgtgaaacagtgaaggtgcagctctgtgcttccaaagagggccttcccgtgtttgtggtggctgaagaagactttcatttcgtccaggatgaagcgtatgatgcagctcaattcctagcaaccagtgctggaaatcagcaggctttgaactttacccgttttcttgaccagtcaggacccccatctggggatgtgaattcccttgataagaagttggtgctggcattcaggcacctgaagctgcccacggagtggaatgtattggggacagatcagagtttgcatgatgctggcccgcgagagacattgatgcattttgctgtgcggctgggactgctgaggttgacgtggttcctgttgcagaagccaggtggccgcggagctctcagtatccacaaccaggaaggggcgacgcctgtgagcttggccttggagcgaggctatcacaagctgcaccagcttctaaccgaggagaatgctggagaaccagactcctggagcagtttatcctatgaaataccgtatggagactgttctgtgaggcatcatcgagagttggacatctatacattaacctctgagtctgattcacatcatgaacacccatttcctggagacggttgcactggaccaatttttaaacttatgaacatccaacagcaactaatgaaaacaaacctcaagcagatggacagtcttatgcccttaatgatgacagcacaggatccttccagtgccccagagacagatggccagtttcttccctgtgcaccggagcccacggaccctcagcgactttcttcttctgaagagactgagagcactcagtgctgcccagggagccctgttgcacagactgaaagtccctgtgatttgtcaagcatagttgaggaggagaatacagaccgttcctgtaggaagaaaaataaaggcgtggaaagaaaaggggaagaggtggagccagcacctattgtggactctggaactgtatctgatcaagacagctgccttcagagcttgcctgattgtggagtaaagggcacggaaggcctttcgtcctgtggaaacagaaatgaagaaactggaacaaaatcttctggaatgcccacagaccaggagtccctgagcagtggagatgctgtgcttcagagagacttggtcatggagccaggcacagcccagtattcctctggaggtgaactgggaggcatttcaacaacaaatgtcagtaccccagacactgcaggggaaatggaacatgggctcatgaacccagatgccactgtttggaagaatgtgcttcagggaggggaaagtacaaaggaaagatttgagaactctaatattggcacagctggagcctctgacgtgcacgtcacaagtaagcctgtggataaaatcagtgttccaaactgtgcccctgctgccagttccctggatggtaacaaacctgctgagtcttcacttgcatttagtaatgaagaaacctccactgaaaaaacagcagaaacggaaacttcacgaagtcgtgaggagagtgctgatgctccagtagatcagaattctgtggtgattccagctgctgcaaaagacaagatttcagatggattagaaccttatactctcttagcagcaggcataggtgaggcaatgtcaccctcagatttagcccttcttgggctggaagaagatgtaatgccacaccagaactcagaaacaaattcatctcatgctcaaagccaaaagggcaaatcctcacccatttgttctacaactggagacgataaactttgtgcagactctgcatgtcaacagaacacagtgacttctagtggcgatttggttgcaaaactgtgtgataacatagttagcgagtccgaaagcaccacagcaaggcaacccagctcacaagatccacccgatgcctcccactgtgaagacccacaggctcatacagtcacctctgaccctgtaagggatacccaggaacgtgcggatttttgtcctttcaaagtggtggataacaaaggccaacgaaaagatgtgaaactagataaacctttaacaaatatgcttgaggtggtttcacatccacatccagttgtccctaaaatggagaaagaactggtgccagaccaggcagtaatatcagacagtactttctctctggcaaacagtccaggcagtgaatcagtaaccaaggatgacgcactttcttttgtcccctcccagaaagaaaagggaacagcaactcctgaactacatacagctacagattatagagatggcccagatggaaattcgaatgagcctgatacgcggccactagaagacagggcagtaggcctgtccacatcctccactgctgcagagcttcagcacgggatggggaataccagtctcacaggacttggtggagagcatgagggtcccgcccctccagcaatcccagaagctctgaatatcaaggggaacactgactcttccctgcaaagtgtgggtaaggccactttggctttagattcagttttgactgaagaaggaaaacttctggtggtttcagaaagctctgcagctcaggaacaagataaggataaagcggtgacctgttcctctattaaggaaaatgctctctcttcaggaactttgcaggaagagcagagaacaccacctcctggacaagatactcaacaatttcatgaaaaatcaatctcagctgactgtgccaaggacaaagcacttcagctaagtaattcaccgggtgcatcctctgcctttcttaaggcagaaactgaacataacaaggaagtggccccacaagtctcactgctgactcaaggtggggctgcccagagcctggtgccaccaggagcaagtctggccacagagtcaaggcaggaagccttgggggcagagcacaacagctccgctctgttgccatgtctgttgccagatgggtctgatgggtccgatgctcttaactgcagtcagccttctcctctggatgttggagtgaagaacactcaatcccagggaaaaactagtgcctgtgaggtgagtggagatgtgacggtggatgttacaggggttaatgctctacaaggtatggctgagcccagaagagagaatatatcacacaacacccaagacatcctgattccaaacgtcttgttgagccaagagaagaatgccgttctaggtttgccagtggctctacaggacaaagctgtgactgacccacagggagttggaaccccagagatgatacctcttgattgggagaaagggaagctggagggagcagaccacagctgtaccatgggtgacgctgaggaagcccaaatagacgatgaagcacatcctgtcctactgcagcctgttgccaaggagctccccacagacatggagctctcagcccatgatgatggggccccagctggtgtgagggaagtcatgcgagccccgccttcaggcagggaaaggagcactccctctctaccttgcatggtctctgcccaggacgcacctctgcctaagggggcagacttgatagaggaggctgccagccgtatagtggatgctgtcatcgaacaagtcaaggccgctggagcactgcttactgagggggaggcctgtcacatgtcactgtccagccctgagttgggtcctctcactaaaggactagagagtgcttttacagaaaaagtgagtactttcccacctggggagagcctaccaatgggcagtactcctgaggaagccacggggagccttgcaggatgttttgctggaagggaggagccagagaagatcattttacctgtccaggggcctgagccagcagcagaaatgccagacgtgaaagctgaagatgaagtggattttagagcaagttcaatttctgaagaagtggctgtagggagcatagctgctacactgaagatgaagcaaggcccaatgacccaggcgataaaccgagaaaactggtgtacaatagagccatgccctgatgcagcatctcttctggcttccaagcagagcccagaatgtgagaacttcctggatgttggactgggcagagagtgtacctcaaaacaaggtgtacttaaaagagaatctgggagtgattctgacctctttcactcacccagtgatgacatggacagcatcatcttcccaaagccagaggaagagcatttggcctgtgatatcaccggatccagttcatccaccgatgacacggcttcactggaccgacattcttctcatggcagtgatgtgtctctctcccagattttaaagccaaacaggtcaagagatcggcaaagccttgatggattctacagccatgggatgggagctgagggtcgagaaagtgagagtgagcctgctgacccaggcgacgtggaggaggaggagatggacagtatcactgaagtgcctgcaaactgctctgtcctaaggagctccatgcgctctctttctcccttccggaggcacagctgggggcctgggaaaaatgcagccagcgatgcagaaatgaaccaccggagtatgagctggtgcccctctggtgtgcagtactctgctggcctgagtgctgactttaattacagaagtttcagtctagaaggcttgacaggaggagctggtgtcggaaacaagccatcctcatctctagaagtaagctctgcaaatgccgaagagctcagacacccattcagtggtgaggaacgggttgactctttggtgtcactttcagaagaggatctggagtcagaccagagagaacataggatgtttgatcagcagatatgtcacagatctaagcagcagggatttaattactgtacatcagccatttcctctccattgacaaaatccatctcattaatgacaatcagccatcctggattggacaattcacggcccttccacagtaccttccacaataccagtgctaatctgactgagagtataacagaagagaactataatttcctgccacatagcccctccaagaaagattctgaatggaagagtggaacaaaagtcagtcgtacattcagctacatcaagaataaaatgtctagcagcaagaagagcaaagaaaaggaaaaagaaaaagataagattaaggagaaggagaaagattctaaagacaaggagaaagataagaagactgtcaacgggcacactttcagttccattcctgttgtgggtcccatcagctgtagccagtgtatgaagcccttcaccaacaaagatgcctatacttgtgcaaattgcagtgcttttgtccacaaaggctgccgagaaagtctagcctcctgtgcaaaggtcaaaatgaagcagcccaaagggagccttcaggcacatgacacatcatcactgcccacggtcattatgagaaacaagccctcacagcccaaggagcgtcctcggtccgcagtcctcctggtggatgaaaccgctaccaccccaatatttgccaatagacgatcccagcagagtgtctcgctctccaaaagtgtctccatacagaacattactggagttggcaatgatgagaacatgtcaaacacctggaaattcctgtctcattcaacagactcactaaataaaatcagcaaggtcaatgagtcaacagaatcacttactgatgagggagtaggtacagacatgaatgaaggacaactactgggagactttgagattgagtccaaacagctggaagcagagtcttggagtcggataatagacagcaagtttctaaaacagcaaaagaaagatgtggtcaaacggcaagaagtaatatatgagttgatgcagacagagtttcatcatgtccgcactctcaagatcatgagtggtgtgtacagccaggggatgatggcggatctgctttttgagcagcagatggtagaaaagctgttcccctgtttggatgagctgatcagtatccatagccaattcttccagaggattctggagcggaagaaggagtctctggtggataaaagtgaaaagaactttctcatcaagaggataggggatgtgcttgtaaatcagttttcaggtgagaatgcagaacgtttaaagaagacatatggcaagttttgtgggcaacataaccagtctgtaaactacttcaaagacctttatgccaaggataagcgttttcaagcctttgtaaagaagaagatgagcagttcagttgttagaaggcttggaattccagagtgcatattgcttgtaactcagcggattaccaagtacccagttttattccaaagaatattgcagtgtaccaaagacaatgaagtggagcaggaagatctagcacagtccttgagcctggtgaaggatgtgattggagctgtagacagcaaagtggcaagttatgaaaagaaagtgcgtctcaatgagatttatacaaagacagatagcaagtcaatcatgaggatgaagagtggtcagatgtttgccaaggaagatttgaaacggaagaagcttgtacgtgatgggagtgtgtttctgaagaatgcagcaggaaggttgaaagaggttcaagcagttcttctcactgacattttagttttccttcaagaaaaagaccagaagtacatctttgcatcattggaccagaagtcaacagtgatctctttaaagaagctgattgtgagagaagtggcacatgaggagaaaggtttattcctgatcagcatggggatgacagatccagagatggtagaagtccatgccagctccaaagaggaacgaaacagctggattcagatcattcaggacacaatcaacaccctgaacagagatgaagatgaaggaattcctagtgagaatgaggaagaaaagaaaatgttggacaccagagcccgagaattaaaagaacaacttcaccagaaggaccaaaaaatcctactcttgttggaagagaaggagatgattttccgggacatggctgagtgcagcacccctctcccagaggattgctccccaacacatagccctagagttctcttccgctccaacacagaagaggctctcaaaggaggacctttaatgaaaagtgcaataaatgaggtggagatccttcagggtttggtgagtggaaatctgggaggcacacttgggccgactgtcagcagccccattgagcaagatgtggtcggtcccgtttccctgccccggagagcagagacctttggaggatttgacagccatcagatgaatgcttcaaaaggaggcgagaaggaagagggagatgatggccaagatcttaggagaacggaatcagatagtggcctaaaaaagggtggaaatgctaacctggtatttatgcttaaaagaaacagtgagcaggttgtccagagcgttgttcatctctacgagctcctcagcgctctgcagggtgtggtgctgcagcaggacagctacattgaggaccagaaactggtgctgagcgagagggcgctcactcgcagcttgtcccgcccgagctccctcattgagcaggagaagcagcgcagcctggagaagcagcgccaggacctggccaacctgcagaagcagcaggcccagtacctcgaggagaagcgcaggcgcgagcgtgagtgggaagctcgtgagagggagctgcgggagcgggaggccctcctggcccagcgcgaggaggaggtgcagcaggggcagcaggacctggaaaaggagcgggaggagctccagcagaagaagggcacataccagtatgacctggagcgactgcgtgctgcccagaaacagcttgagagggaacaggagcagctgcgccgggaggcagagcggctcagccagcggcagacagaacgggacctgtgtcaggtttcccatccacataccaagctgatgaggatcccatcgttcttccccagtcctgaggagcccccctcgccatctgcaccttccatagccaaatcagggtcattggactcagaactttcagtgtccccaaaaaggaacagcatctctcggacacacaaagataaggggccttttcacatactgagttcaaccagccagacaaacaaaggaccagaagggcagagccaggcccctgcgtccacctctgcctctacccgcctgtttgggttaacaaagccaaaggaaaagaaggagaaaaaaaagaagaacaaaaccagccgctctcagcccggtgatggtcccgcgtcagaagtatcagcagagggtgaagagatcttctgctgaccctcttcctctctgctgaggcagctgcctcctgatcctggccagcccacctctcctgctgtccccgcgtgcacaagtctcttacactggacgcccactgctcctcagcgtccagtcctcctgggcggccccaggtcctggacaataagcaacagatgatattgagtgtcgggtggggaaggaggcccagactctgcttcggccatgatttgtgactgcccaggactctcaggttgggctggccctactcaggattacactgaaagtaatggcctcgtaagtacaggtgatggttttggacacgtcaggaattcctaaaggctgaaagagtgtatccaagtaaggtctgaacctccgaatgccttttatttgggggaacacaaaaccaaacagcagatgttttggacttgatctgtgtacgtacatggggacctgtctgcatatacacacggggaatgccagaagaaggcccagtctgcaccaggcgtctggtcaacttagcacaagggcagtgcctggacggacccggagcccccgcatatcagcagttcacccagtactcctcagagactggtttccctctaaacccatcccgggcacataccacccgtgttttgcatgtatttctcatttcattttagggatgacaaacatttgtgaaaccagtgagagaaggcttgatgtgtataaaagacgtgatgtgcaccacctcgatctcggtgtttcaggcactaaagcaacaaaacaacccatagtatctcattctgtcatcagatccagaagaaatatcctggttttccagcatgtttacccacatgttttggccatggataaagtgaagaggcctactcaccattatccctgcagcgtgacaccttttgattgtcactgaccactcagaaggggccacggcctcctggctgtgttcctgag

SEQ ID NO: 103068 - DNA, 9128 bp, Homo sapiens
  Payload ID: 105
  Gene Symbol: AKAP13
  Gene Name: A kinase (PRKA) anchor protein 13
  ENST ID: ENST00000394510
  CDS Start-End: 143-4447
ttttaatagagaggagtctggaaggcagagatctccaccacctaaccgtgagaaatttggaactaaggacttgcactggtccccaagttaacagtggatatacttcctgcattttctctgttctttcttgcatttgggcaaaatgtatgaacggcacaagaggcgctacagcctctgtgacatctccaaggtggacaggactgtggacgtggtattgctgaagataaaccgagaaaactggtgtacaatagagccatgccctgatgcagcatctcttctggcttccaagcagagcccagaatgtgagaacttcctggatgttggactgggcagagagtgtacctcaaaacaaggtgtacttaaaagagaatctgggagtgattctgacctctttcactcacccagtgatgacatggacagcatcatcttcccaaagccagaggaagagcatttggcctgtgatatcaccggatccagttcatccaccgatgacacggcttcactggaccgacattcttctcatggcagtgatgtgtctctctcccagattttaaagccaaacaggtcaagagatcggcaaagccttgatggattctacagccatgggatgggagctgagggtcgagaaagtgagagtgagcctgctgacccaggcgacgtggaggaggaggagatggacagtatcactgaagtgcctgcaaactgctctgtcctaaggagctccatgcgctctctttctcccttccggaggcacagctgggggcctgggaaaaatgcagccagcgatgcagaaatgaaccaccggagtttcagtctagaaggcttgacaggaggagctggtgtcggaaacaagccatcctcatctctagaagtaagctctgcaaatgccgaagagctcagacacccattcagtggtgaggaacgggttgactctttggtgtcactttcagaagaggatctggagtcagaccagagagaacataggatgtttgatcagcagatatgtcacagatctaagcagcagggatttaattactgtacatcagccatttcctctccattgacaaaatccatctcattaatgacaatcagccatcctggattggacaattcacggcccttccacagtaccttccacaataccagtgctaatctgactgagagtataacagaagagaactataatttcctgccacatagcccctccaagaaagattctgaatggaagagtggaacaaaagtcagtcgtacattcagctacatcaagaataaaatgtctagcagcaagaagagcaaagaaaaggaaaaagaaaaagataagattaaggagaaggagaaagattctaaagacaaggagaaagataagaagactgtcaacgggcacactttcagttccattcctgttgtgggtcccatcagctgtagccagtgtatgaagcccttcaccaacaaagatgcctatacttgtgcaaattgcagtgcttttgtccacaaaggctgccgagaaagtctagcctcctgtgcaaaggtcaaaatgaagcccaaagggagccttcaggcacatgacacatcatcactgcccacggtcattatgagaaacaagccctcacagcccaaggagcgtcctcggtccgcagtcctcctggtggatgaaaccgctaccaccccaatatttgccaatagacgatcccagcagagtgtctcgctctccaaaagtgtctccatacagaacattactggagttggcaatgatgagaacatgtcaaacacctggaaattcctgtctcattcaacagactcactaaataaaatcagcaaggtcaatgagtcaacagaatcacttactgatgagggagtaggtacagacatgaatgaaggacaactactgggagactttgagattgagtccaaacagctggaagcagagtcttggagtcggataatagacagcaagtttctaaaacagcaaaagaaagatgtggtcaaacggcaagaagtaatatatgagttgatgcagacagagtttcatcatgtccgcactctcaagatcatgagtggtgtgtacagccaggggatgatggcggatctgctttttgagcagcagatggtagaaaagctgttcccctgtttggatgagctgatcagtatccatagccaattcttccagaggattctggagcggaagaaggagtctctggtggataaaagtgaaaagaactttctcatcaagaggataggggatgtgcttgtaaatcagttttcaggtgagaatgcagaacgtttaaagaagacatatggcaagttttgtgggcaacataaccagtctgtaaactacttcaaagacctttatgccaaggataagcgttttcaagcctttgtaaagaagaagatgagcagttcagttgttagaaggcttggaattccagagtgcatattgcttgtaactcagcggattaccaagtacccagttttattccaaagaatattgcagtgtaccaaagacaatgaagtggagcaggaagatctagcacagtccttgagcctggtgaaggatgtgattggagctgtagacagcaaagtggcaagttatgaaaagaaagtgcgtctcaatgagatttatacaaagacagatagcaagtcaatcatgaggatgaagagtggtcagatgtttgccaaggaagatttgaaacggaagaagcttgtacgtgatgggagtgtgtttctgaagaatgcagcaggaaggttgaaagaggttcaagcagttcttctcactgacattttagttttccttcaagaaaaagaccagaagtacatctttgcatcattggaccagaagtcaacagtgatctctttaaagaagctgattgtgagagaagtggcacatgaggagaaaggtttattcctgatcagcatggggatgacagatccagagatggtagaagtccatgccagctccaaagaggaacgaaacagctggattcagatcattcaggacacaatcaacaccctgaacagagatgaagatgaaggaattcctagtgagaatgaggaagaaaagaaaatgttggacaccagagcccgagaattaaaagaacaacttcaccagaaggaccaaaaaatcctactcttgttggaagagaaggagatgattttccgggacatggctgagtgcagcacccctctcccagaggattgctccccaacacatagccctagagttctcttccgctccaacacagaagaggctctcaaaggaggacctttaatgaaaagtgcaataaatgaggtggagatccttcagggtttggtgagtggaaatctgggaggcacacttgggccgactgtcagcagccccattgagcaagatgtggtcggtcccgtttccctgccccggagagcagagacctttggaggatttgacagccatcagatgaatgcttcaaaaggaggcgagaaggaagagggagatgatggccaagatcttaggagaacggaatcagatagtggcctaaaaaagggtggaaatgctaacctggtatttatgcttaaaagaaacagtgagcaggttgtccagagcgttgttcatctctacgagctcctcagcgctctgcagggtgtggtgctgcagcaggacagctacattgaggaccagaaactggtgctgagcgagagggcgctcactcgcagcttgtcccgcccgagctccctcattgagcaggagaagcagcgcagcctggagaagcagcgccaggacctggccaacctgcagaagcagcaggcccagtacctcgaggagaagcgcaggcgcgagcgtgagtgggaagctcgtgagagggagctgcgggagcgggaggccctcctggcccagcgcgaggaggaggtgcagcaggggcagcaggacctggaaaaggagcgggaggagctccagcagaagaagggcacataccagtatgacctggagcgactgcgtgctgcccagaaacagcttgagagggaacaggagcagctgcgccgggaggcagagcggctcagccagcggcagacagaacgggacctgtgtcaggtttcccatccacataccaagctgatgaggatcccatcgttcttccccagtcctgaggagcccccctcgccatctgcaccttccatagccaaatcagggtcattggactcagaactttcagtgtccccaaaaaggaacagcatctctcggacacacaaagataaggggccttttcacatactgagttcaaccagccagacaaacaaaggaccagaagggcagagccaggcccctgcgtccacctctgcctctacccgcctgtttgggttaacaaagccaaaggaaaagaaggagaaaaaaaagaagaacaaaaccagccgctctcagcccggtgatggtcccgcgtcagaagtatcagcagagggtgaagagatcttctgctgaccctcttcctctctgctgaggcagctgcctcctgatcctggccagcccacctctcctgctgtccccgcgtgcacaagtctcttacactggacgcccactgctcctcagcgtccagtcctcctgggcggccccaggtcctggacaataagcaacagatgatattgagtgtcgggtggggaaggaggcccagactctgcttcggccatgatttgtgactgcccaggactctcaggttgggctggccctactcaggattacactgaaagtaatggcctcgtaagtacaggtgatggttttggacacgtcaggaattcctaaaggctgaaagagtgtatccaagtaaggtctgaacctccgaatgccttttatttgggggaacacaaaaccaaacagcagatgttttggacttgatctgtgtacgtacatggggacctgtctgcatatacacacggggaatgccagaagaaggcccagtctgcaccaggcgtctggtcaacttagcacaagggcagtgcctggacggacccggagcccccgcatatcagcagttcacccagtactcctcagagactggtttccctctaaacccatcccgggcacataccacccgtgttttgcatgtatttctcatttcattttagggatgacaaacatttgtgaaaccagtgagagaaggcttgatgtgtataaaagacgtgatgtgcaccacctcgatctcggtgtttcaggcactaaagcaacaaaacaacccatagtatctcattctgtcatcagatccagaagaaatatcctggttttccagcatgtttacccacatgttttggccatggataaagtgaagaggcctactcaccattatccctgcagcgtgacaccttttgattgtcactgaccactcagaaggggccacggcctcctggctgtgttcctgagcccccgtcgtgcctctcccagacagcagctgtctggcccttgctgggtgagggcacaccactgccaggggtcagcctcgcacccaggccaggcagaagctgtgctctgaagctaggacagctggctgagaagtgggttcaggcgaagggtgaagccatgtgtagcagttcctgccagtgcagatctggagaggagctggcccggaaggcgtggttgtgaaagcgcccttcttatgttaggaggccttggcaaaattggatttcttcaaaaatacatgtaaaggtctgttgttgaattgtactctgcccctggaagcagatacagatggctgcctgctgctcggctttgcttttgcttttcccaccgtgttttcatctttgttcacttgaggctttccccagctggtgtgtgcaggacagttcatggtaatgttgccctctgaggccccgtacaccagaagggaggccctggaaaattttgtgcttccaacgtggccttcaattcttgcttttttgcccctcggaagcatggggcttttgagcacacttaaaaaaagaaaaatctgtaacttggtgcttattgatgaattgcaagctggccttgcagatggagatatttatctttcagtttatttgaaagaggtctggtttaaaatttgtagcctacatttgttttatttattgtatttgtgtgtttgtgtttgtttttttttaagggtgagccaggtctagcccaacagtctaaactatccagtcaataccgagtgaagtggcagccagcactgttcactctgtgtcttttgaagtgccttgaaggcccagatgaaattttaaagggagggggtccatgtccttccctcccccaccccgcctcattctttaatcaaaggatgtcttctcccttgtttgagaatgaagaaactcgccacctctgacctacctttgcctttttctgtcatggagaatactcacccttcagaaacagaccaaaggccaaaacctgctgatttttctattgaaaatatgtccccttgcaaagaccctaaacaaaaagttaagtttctttctttcacctatttgtacaactccaagttacagctgaatctgtcgtgactttcctgagatctacccggggcttggctgtctgttctgggcactggctccgagttcccctcctgggatttgcaggagggcagtactgaacctgcattcttctccttgtaaatgtaggccgggtgcccctgttctccgggtttggaacaatacgaggttggtgctgatgggatttacttgcgtacgtgctcttcacaaaaacaccgtggatgctgaagttagagcacgtcgccacagagcttgacatcaatgttagagggtctcttactccccgcccagctgtgatgtttcatctgctttggttgttttggtggtcttttttaaaaatagagatttcacatctgcccagaccccactcaaaacgatttggtcaggttctggttggacaagtttaaaatcaaagtagtgcccggaattccctcaaaccacccaacttcatccaggaatacagtctgcagtgcagcaacagaaccgcttaccaagaactgtgcttacatacctttgtcatctctcttccccccttggaagttgtcctcagggggatttgttcctgtcctggggatttacctgggatggtggctgcctgtgcttttgctcatggccttgacagtgctctagttgctggatctaatggcctgtcttggtttctatcacatgagaaggggttgtttttttggggtgactcggactgaattccccatactgtttccacgccgggacaccatgttctccatcaagctaaagaaatcacgtgcctgaaactgtgcttaagttttgggggaaagatggagttcctatccagagcccccagatttccagaatcgagtgagcttcctggaaggagactgcgtcttctctcaattccagtcatctcagtcgttgtcgttaggtgacatgtgcactttaaatgctctcatcggttggcttcattttcaagacaatcaaatgtattgactgtgttttcttcttagaaaatggagagggttaaaaacatgcaaactgccactttcaacctttgccagtattccctctacccccgtgagagctatctggggggaagaatccttaccaaggtttttttggaaaggtacgaatcttaacttttttccccttctgtgtctcagggtaatactattcagagtcgcccctttgctcattttctcccgtatttgttaccttcctgaggcctcagtattagtcgtgagcacaaagttttgagacctttggcgttgtttcttgatgtgggaggggaggtgttagtgcatgcaagggttgaactagatagaccctgccttagtagagggtgggactataaccttagaggccagaacttgatccagaagttgctgtccacagaagtgctttctatttcatcatttttgtttctagggctctttttctgtagccaggtcttcccaaggattttagtatttgcattggagttgaggtttactctaatgatggtggcccagctgtgcccagaggacagccaggcaggccctgggagggagtttagaaagacagtcctggtgaatgggcttcaagtggtcacaaagagggtggctgtgaggtgaccccagacactgcagaacgatgtgcaccctctgcgttttggatgtccttggaatgtgggagcctagaaataaccctgtggatggaattggggcagcggctgctggagatctgtgtgccttgccttccttcagcaggaccgtctaggtgcgcagccacctatggatgcgtcccagccagccccgtcgctctcgtccatcctcagagacaaagaagagggcagggagtttgggcttggttttgaactttcctttcaatgtagcaaagcattcctagttaaccagagccttggaatctactgcctgctggccaggctttaaaatgaaaagtgttttaatgctgccataaaagggaggcgggggggaggaagggaaaataaaggcatctttccaagtactcatctaatttaattgtcaaaagattgataggccatgaattacttctccatctcactaagggttaaaggcgtgcaaccccccactggctgtgtcccctgccaccgaagtgagtgacctgccctacaaccaggtgggaccacctgtgctgcagtccggaggggcttctgcaggaagcactcaccccccacaccttccccggcctgagcttcccctacctttcgtcaccacctgagggcatgagcacaggccatggggcgtgcctggtgagtctgcctgtggttcaggcttagcctgtggtctcctgtgtgctgctgcccgcatgggatgcgcaggggaggcgtggggatccgcaggagggtggttgggatacaccggatacctctgctctcattgcttgtttgcaaatgctctatggacatttgtgtgctaaatcctattaaataaaaaagacgggttaaaacccagatgctgtatattcatttgtaattatgtataaagtgaagcagttttaaactgtaaagatttttttcagtgtgttttctcgaattttgccacaacatactggcttcgtattttatttatctttctttctagttaccagcttcagacccttgtaaagtctccctcagccctttcaaaaaataataaatttcctgtgaagttctg

SEQ ID NO: 103069 - DNA, 13215 bp, Homo sapiens
  Payload ID: 105
  Gene Symbol: AKAP13
  Gene Name: A kinase (PRKA) anchor protein 13
  Uniprot ID: Q12802
  ENST ID: ENST00000394518
  CDS Start-End: 96-8537
gagcggccgcctattgtctttctccgcggcgaaggtgaagagttgtcccagctcggcccgcgggggagccccgggagccgcacgtgtcctgggtcatgaaacttaatccacagcaagctcccttatatggtgattgtgttgttacagtgctgcttgctgaagaggacaaagctgaagatgatgtagtgttttacttggtatttttgggttccaccctccgtcactgtacaagtactcggaaggtcagttctgatacattggagaccattgctcctggtcatgattgttgtgaaacagtgaaggtgcagctctgtgcttccaaagagggccttcccgtgtttgtggtggctgaagaagactttcatttcgtccaggatgaagcgtatgatgcagctcaattcctagcaaccagtgctggaaatcagcaggctttgaactttacccgttttcttgaccagtcaggacccccatctggggatgtgaattcccttgataagaagttggtgctggcattcaggcacctgaagctgcccacggagtggaatgtattggggacagatcagagtttgcatgatgctggcccgcgagagacattgatgcattttgctgtgcggctgggactgctgaggttgacgtggttcctgttgcagaagccaggtggccgcggagctctcagtatccacaaccaggaaggggcgacgcctgtgagcttggccttggagcgaggctatcacaagctgcaccagcttctaaccgaggagaatgctggagaaccagactcctggagcagtttatcctatgaaataccgtatggagactgttctgtgaggcatcatcgagagttggacatctatacattaacctctgagtctgattcacatcatgaacacccatttcctggagacggttgcactggaccaatttttaaacttatgaacatccaacagcaactaatgaaaacaaacctcaagcagatggacagtcttatgcccttaatgatgacagcacaggatccttccagtgccccagagacagatggccagtttcttccctgtgcaccggagcccacggaccctcagcgactttcttcttctgaagagactgagagcactcagtgctgcccagggagccctgttgcacagactgaaagtccctgtgatttgtcaagcatagttgaggaggagaatacagaccgttcctgtaggaagaaaaataaaggcgtggaaagaaaaggggaagaggtggagccagcacctattgtggactctggaactgtatctgatcaagacagctgccttcagagcttgcctgattgtggagtaaagggcacggaaggcctttcgtcctgtggaaacagaaatgaagaaactggaacaaaatcttctggaatgcccacagaccaggagtccctgagcagtggagatgctgtgcttcagagagacttggtcatggagccaggcacagcccagtattcctctggaggtgaactgggaggcatttcaacaacaaatgtcagtaccccagacactgcaggggaaatggaacatgggctcatgaacccagatgccactgtttggaagaatgtgcttcagggaggggaaagtacaaaggaaagatttgagaactctaatattggcacagctggagcctctgacgtgcacgtcacaagtaagcctgtggataaaatcagtgttccaaactgtgcccctgctgccagttccctggatggtaacaaacctgctgagtcttcacttgcatttagtaatgaagaaacctccactgaaaaaacagcagaaacggaaacttcacgaagtcgtgaggagagtgctgatgctccagtagatcagaattctgtggtgattccagctgctgcaaaagacaagatttcagatggattagaaccttatactctcttagcagcaggcataggtgaggcaatgtcaccctcagatttagcccttcttgggctggaagaagatgtaatgccacaccagaactcagaaacaaattcatctcatgctcaaagccaaaagggcaaatcctcacccatttgttctacaactggagacgataaactttgtgcagactctgcatgtcaacagaacacagtgacttctagtggcgatttggttgcaaaactgtgtgataacatagttagcgagtccgaaagcaccacagcaaggcaacccagctcacaagatccacccgatgcctcccactgtgaagacccacaggctcatacagtcacctctgaccctgtaagggatacccaggaacgtgcggatttttgtcctttcaaagtggtggataacaaaggccaacgaaaagatgtgaaactagataaacctttaacaaatatgcttgaggtggtttcacatccacatccagttgtccctaaaatggagaaagaactggtgccagaccaggcagtaatatcagacagtactttctctctggcaaacagtccaggcagtgaatcagtaaccaaggatgacgcactttcttttgtcccctcccagaaagaaaagggaacagcaactcctgaactacatacagctacagattatagagatggcccagatggaaattcgaatgagcctgatacgcggccactagaagacagggcagtaggcctgtccacatcctccactgctgcagagcttcagcacgggatggggaataccagtctcacaggacttggtggagagcatgagggtcccgcccctccagcaatcccagaagctctgaatatcaaggggaacactgactcttccctgcaaagtgtgggtaaggccactttggctttagattcagttttgactgaagaaggaaaacttctggtggtttcagaaagctctgcagctcaggaacaagataaggataaagcggtgacctgttcctctattaaggaaaatgctctctcttcaggaactttgcaggaagagcagagaacaccacctcctggacaagatactcaacaatttcatgaaaaatcaatctcagctgactgtgccaaggacaaagcacttcagctaagtaattcaccgggtgcatcctctgcctttcttaaggcagaaactgaacataacaaggaagtggccccacaagtctcactgctgactcaaggtggggctgcccagagcctggtgccaccaggagcaagtctggccacagagtcaaggcaggaagccttgggggcagagcacaacagctccgctctgttgccatgtctgttgccagatgggtctgatgggtccgatgctcttaactgcagtcagccttctcctctggatgttggagtgaagaacactcaatcccagggaaaaactagtgcctgtgaggtgagtggagatgtgacggtggatgttacaggggttaatgctctacaaggtatggctgagcccagaagagagaatatatcacacaacacccaagacatcctgattccaaacgtcttgttgagccaagagaagaatgccgttctaggtttgccagtggctctacaggacaaagctgtgactgacccacagggagttggaaccccagagatgatacctcttgattgggagaaagggaagctggagggagcagaccacagctgtaccatgggtgacgctgaggaagcccaaatagacgatgaagcacatcctgtcctactgcagcctgttgccaaggagctccccacagacatggagctctcagcccatgatgatggggccccagctggtgtgagggaagtcatgcgagccccgccttcaggcagggaaaggagcactccctctctaccttgcatggtctctgcccaggacgcacctctgcctaagggggcagacttgatagaggaggctgccagccgtatagtggatgctgtcatcgaacaagtcaaggccgctggagcactgcttactgagggggaggcctgtcacatgtcactgtccagccctgagttgggtcctctcactaaaggactagagagtgcttttacagaaaaagtgagtactttcccacctggggagagcctaccaatgggcagtactcctgaggaagccacggggagccttgcaggatgttttgctggaagggaggagccagagaagatcattttacctgtccaggggcctgagccagcagcagaaatgccagacgtgaaagctgaagatgaagtggattttagagcaagttcaatttctgaagaagtggctgtagggagcatagctgctacactgaagatgaagcaaggcccaatgacccaggcgataaaccgagaaaactggtgtacaatagagccatgccctgatgcagcatctcttctggcttccaagcagagcccagaatgtgagaacttcctggatgttggactgggcagagagtgtacctcaaaacaaggtgtacttaaaagagaatctgggagtgattctgacctctttcactcacccagtgatgacatggacagcatcatcttcccaaagccagaggaagagcatttggcctgtgatatcaccggatccagttcatccaccgatgacacggcttcactggaccgacattcttctcatggcagtgatgtgtctctctcccagattttaaagccaaacaggtcaagagatcggcaaagccttgatggattctacagccatgggatgggagctgagggtcgagaaagtgagagtgagcctgctgacccaggcgacgtggaggaggaggagatggacagtatcactgaagtgcctgcaaactgctctgtcctaaggagctccatgcgctctctttctcccttccggaggcacagctgggggcctgggaaaaatgcagccagcgatgcagaaatgaaccaccggagttcaatgcgagttcttggggatgttgtcaggagacctcccattcataggagaagtttcagtctagaaggcttgacaggaggagctggtgtcggaaacaagccatcctcatctctagaagtaagctctgcaaatgccgaagagctcagacacccattcagtggtgaggaacgggttgactctttggtgtcactttcagaagaggatctggagtcagaccagagagaacataggatgtttgatcagcagatatgtcacagatctaagcagcagggatttaattactgtacatcagccatttcctctccattgacaaaatccatctcattaatgacaatcagccatcctggattggacaattcacggcccttccacagtaccttccacaataccagtgctaatctgactgagagtataacagaagagaactataatttcctgccacatagcccctccaagaaagattctgaatggaagagtggaacaaaagtcagtcgtacattcagctacatcaagaataaaatgtctagcagcaagaagagcaaagaaaaggaaaaagaaaaagataagattaaggagaaggagaaagattctaaagacaaggagaaagataagaagactgtcaacgggcacactttcagttccattcctgttgtgggtcccatcagctgtagccagtgtatgaagcccttcaccaacaaagatgcctatacttgtgcaaattgcagtgcttttgtccacaaaggctgccgagaaagtctagcctcctgtgcaaaggtcaaaatgaagcagcccaaagggagccttcaggcacatgacacatcatcactgcccacggtcattatgagaaacaagccctcacagcccaaggagcgtcctcggtccgcagtcctcctggtggatgaaaccgctaccaccccaatatttgccaatagacgatcccagcagagtgtctcgctctccaaaagtgtctccatacagaacattactggagttggcaatgatgagaacatgtcaaacacctggaaattcctgtctcattcaacagactcactaaataaaatcagcaaggtcaatgagtcaacagaatcacttactgatgagggagtaggtacagacatgaatgaaggacaactactgggagactttgagattgagtccaaacagctggaagcagagtcttggagtcggataatagacagcaagtttctaaaacagcaaaagaaagatgtggtcaaacggcaagaagtaatatatgagttgatgcagacagagtttcatcatgtccgcactctcaagatcatgagtggtgtgtacagccaggggatgatggcggatctgctttttgagcagcagatggtagaaaagctgttcccctgtttggatgagctgatcagtatccatagccaattcttccagaggattctggagcggaagaaggagtctctggtggataaaagtgaaaagaactttctcatcaagaggataggggatgtgcttgtaaatcagttttcaggtgagaatgcagaacgtttaaagaagacatatggcaagttttgtgggcaacataaccagtctgtaaactacttcaaagacctttatgccaaggataagcgttttcaagcctttgtaaagaagaagatgagcagttcagttgttagaaggcttggaattccagagtgcatattgcttgtaactcagcggattaccaagtacccagttttattccaaagaatattgcagtgtaccaaagacaatgaagtggagcaggaagatctagcacagtccttgagcctggtgaaggatgtgattggagctgtagacagcaaagtggcaagttatgaaaagaaagtgcgtctcaatgagatttatacaaagacagatagcaagtcaatcatgaggatgaagagtggtcagatgtttgccaaggaagatttgaaacggaagaagcttgtacgtgatgggagtgtgtttctgaagaatgcagcaggaaggttgaaagaggttcaagcagttcttctcactgacattttagttttccttcaagaaaaagaccagaagtacatctttgcatcattggaccagaagtcaacagtgatctctttaaagaagctgattgtgagagaagtggcacatgaggagaaaggtttattcctgatcagcatggggatgacagatccagagatggtagaagtccatgccagctccaaagaggaacgaaacagctggattcagatcattcaggacacaatcaacaccctgaacagagatgaagatgaaggaattcctagtgagaatgaggaagaaaagaaaatgttggacaccagagcccgagaattaaaagaacaacttcaccagaaggaccaaaaaatcctactcttgttggaagagaaggagatgattttccgggacatggctgagtgcagcacccctctcccagaggattgctccccaacacatagccctagagttctcttccgctccaacacagaagaggctctcaaaggaggacctttaatgaaaagtgcaataaatgaggtggagatccttcagggtttggtgagtggaaatctgggaggcacacttgggccgactgtcagcagccccattgagcaagatgtggtcggtcccgtttccctgccccggagagcagagacctttggaggatttgacagccatcagatgaatgcttcaaaaggaggcgagaaggaagagggagatgatggccaagatcttaggagaacggaatcagatagtggcctaaaaaagggtggaaatgctaacctggtatttatgcttaaaagaaacagtgagcaggttgtccagagcgttgttcatctctacgagctcctcagcgctctgcagggtgtggtgctgcagcaggacagctacattgaggaccagaaactggtgctgagcgagagggcgctcactcgcagcttgtcccgcccgagctccctcattgagcaggagaagcagcgcagcctggagaagcagcgccaggacctggccaacctgcagaagcagcaggcccagtacctcgaggagaagcgcaggcgcgagcgtgagtgggaagctcgtgagagggagctgcgggagcgggaggccctcctggcccagcgcgaggaggaggtgcagcaggggcagcaggacctggaaaaggagcgggaggagctccagcagaagaagggcacataccagtatgacctggagcgactgcgtgctgcccagaaacagcttgagagggaacaggagcagctgcgccgggaggcagagcggctcagccagcggcagacagaacgggacctgtgtcaggtttcccatccacataccaagctgatgaggatcccatcgttcttccccagtcctgaggagcccccctcgccatctgcaccttccatagccaaatcagggtcattggactcagaactttcagtgtccccaaaaaggaacagcatctctcggacacacaaagataaggggccttttcacatactgagttcaaccagccagacaaacaaaggaccagaagggcagagccaggcccctgcgtccacctctgcctctacccgcctgtttgggttaacaaagccaaaggaaaagaaggagaaaaaaaagaagaacaaaaccagccgctctcagcccggtgatggtcccgcgtcagaagtatcagcagagggtgaagagatcttctgctgaccctcttcctctctgctgaggcagctgcctcctgatcctggccagcccacctctcctgctgtccccgcgtgcacaagtctcttacactggacgcccactgctcctcagcgtccagtcctcctgggcggccccaggtcctggacaataagcaacagatgatattgagtgtcgggtggggaaggaggcccagactctgcttcggccatgatttgtgactgcccaggactctcaggttgggctggccctactcaggattacactgaaagtaatggcctcgtaagtacaggtgatggttttggacacgtcaggaattcctaaaggctgaaagagtgtatccaagtaaggtctgaacctccgaatgccttttatttgggggaacacaaaaccaaacagcagatgttttggacttgatctgtgtacgtacatggggacctgtctgcatatacacacggggaatgccagaagaaggcccagtctgcaccaggcgtctggtcaacttagcacaagggcagtgcctggacggacccggagcccccgcatatcagcagttcacccagtactcctcagagactggtttccctctaaacccatcccgggcacataccacccgtgttttgcatgtatttctcatttcattttagggatgacaaacatttgtgaaaccagtgagagaaggcttgatgtgtataaaagacgtgatgtgcaccacctcgatctcggtgtttcaggcactaaagcaacaaaacaacccatagtatctcattctgtcatcagatccagaagaaatatcctggttttccagcatgtttacccacatgttttggccatggataaagtgaagaggcctactcaccattatccctgcagcgtgacaccttttgattgtcactgaccactcagaaggggccacggcctcctggctgtgttcctgagcccccgtcgtgcctctcccagacagcagctgtctggcccttgctgggtgagggcacaccactgccaggggtcagcctcgcacccaggccaggcagaagctgtgctctgaagctaggacagctggctgagaagtgggttcaggcgaagggtgaagccatgtgtagcagttcctgccagtgcagatctggagaggagctggcccggaaggcgtggttgtgaaagcgcccttcttatgttaggaggccttggcaaaattggatttcttcaaaaatacatgtaaaggtctgttgttgaattgtactctgcccctggaagcagatacagatggctgcctgctgctcggctttgcttttgcttttcccaccgtgttttcatctttgttcacttgaggctttccccagctggtgtgtgcaggacagttcatggtaatgttgccctctgaggccccgtacaccagaagggaggccctggaaaattttgtgcttccaacgtggccttcaattcttgcttttttgcccctcggaagcatggggcttttgagcacacttaaaaaaagaaaaatctgtaacttggtgcttattgatgaattgcaagctggccttgcagatggagatatttatctttcagtttatttgaaagaggtctggtttaaaatttgtagcctacatttgttttatttattgtatttgtgtgtttgtgtttgtttttttttaagggtgagccaggtctagcccaacagtctaaactatccagtcaataccgagtgaagtggcagccagcactgttcactctgtgtcttttgaagtgccttgaaggcccagatgaaattttaaagggagggggtccatgtccttccctcccccaccccgcctcattctttaatcaaaggatgtcttctcccttgtttgagaatgaagaaactcgccacctctgacctacctttgcctttttctgtcatggagaatactcacccttcagaaacagaccaaaggccaaaacctgctgatttttctattgaaaatatgtccccttgcaaagaccctaaacaaaaagttaagtttctttctttcacctatttgtacaactccaagttacagctgaatctgtcgtgactttcctgagatctacccggggcttggctgtctgttctgggcactggctccgagttcccctcctgggatttgcaggagggcagtactgaacctgcattcttctccttgtaaatgtaggccgggtgcccctgttctccgggtttggaacaatacgaggttggtgctgatgggatttacttgcgtacgtgctcttcacaaaaacaccgtggatgctgaagttagagcacgtcgccacagagcttgacatcaatgttagagggtctcttactccccgcccagctgtgatgtttcatctgctttggttgttttggtggtcttttttaaaaatagagatttcacatctgcccagaccccactcaaaacgatttggtcaggttctggttggacaagtttaaaatcaaagtagtgcccggaattccctcaaaccacccaacttcatccaggaatacagtctgcagtgcagcaacagaaccgcttaccaagaactgtgcttacatacctttgtcatctctcttccccccttggaagttgtcctcagggggatttgttcctgtcctggggatttacctgggatggtggctgcctgtgcttttgctcatggccttgacagtgctctagttgctggatctaatggcctgtcttggtttctatcacatgagaaggggttgtttttttggggtgactcggactgaattccccatactgtttccacgccgggacaccatgttctccatcaagctaaagaaatcacgtgcctgaaactgtgcttaagttttgggggaaagatggagttcctatccagagcccccagatttccagaatcgagtgagcttcctggaaggagactgcgtcttctctcaattccagtcatctcagtcgttgtcgttaggtgacatgtgcactttaaatgctctcatcggttggcttcattttcaagacaatcaaatgtattgactgtgttttcttcttagaaaatggagagggttaaaaacatgcaaactgccactttcaacctttgccagtattccctctacccccgtgagagctatctggggggaagaatccttaccaaggtttttttggaaaggtacgaatcttaacttttttccccttctgtgtctcagggtaatactattcagagtcgcccctttgctcattttctcccgtatttgttaccttcctgaggcctcagtattagtcgtgagcacaaagttttgagacctttggcgttgtttcttgatgtgggaggggaggtgttagtgcatgcaagggttgaactagatagaccctgccttagtagagggtgggactataaccttagaggccagaacttgatccagaagttgctgtccacagaagtgctttctatttcatcatttttgtttctagggctctttttctgtagccaggtcttcccaaggattttagtatttgcattggagttgaggtttactctaatgatggtggcccagctgtgcccagaggacagccaggcaggccctgggagggagtttagaaagacagtcctggtgaatgggcttcaagtggtcacaaagagggtggctgtgaggtgaccccagacactgcagaacgatgtgcaccctctgcgttttggatgtccttggaatgtgggagcctagaaataaccctgtggatggaattggggcagcggctgctggagatctgtgtgccttgccttccttcagcaggaccgtctaggtgcgcagccacctatggatgcgtcccagccagccccgtcgctctcgtccatcctcagagacaaagaagagggcagggagtttgggcttggttttgaactttcctttcaatgtagcaaagcattcctagttaaccagagccttggaatctactgcctgctggccaggctttaaaatgaaaagtgttttaatgctgccataaaagggaggcgggggggaggaagggaaaataaaggcatctttccaagtactcatctaatttaattgtcaaaagattgataggccatgaattacttctccatctcactaagggttaaaggcgtgcaaccccccactggctgtgtcccctgccaccgaagtgagtgacctgccctacaaccaggtgggaccacctgtgctgcagtccggaggggcttctgcaggaagcactcaccccccacaccttccccggcctgagcttcccctacctttcgtcaccacctgagggcatgagcacaggccatggggcgtgcctggtgagtctgcctgtggttcaggcttagcctgtggtctcctgtgtgctgctgcccgcatgggatgcgcaggggaggcgtggggatccgcaggagggtggttgggatacaccggatacctctgctctcattgcttgtttgcaaatgctctatggacatttgtgtgctaaatcctattaaataaaaaagacgggttaaaacccagatgctgtatattcatttgtaattatgtataaagtgaagcagttttaaactgtaaagatttttttcagtgtgttttctcgaattttgccacaacatactggcttcgtattttatttatctttctttctagttaccagcttcagacccttgtaaagtctccctcagccctttcaaaaaataataaatttcctgtgaagtt

SEQ ID NO: 103070 - DNA, 558 bp, Homo sapiens
  Payload ID: 105
  Gene Symbol: AKAP13
  Gene Name: A kinase (PRKA) anchor protein 13
  ENST ID: ENST00000558166
  CDS Start-End: 280-558
attgtgtgtttgccgcaaattaaaacctcagctctgtatcttgccttctgctggaggtttgtaagcttgctcctgctaaccacttcattgtctgagagagaaacggagaatgctggagaaccagactcctggagcagtttatcctatgaaataccgtatggagactgttctgtgaggcatcatcgagagttggacatctatacattaacctctgagtctgattcacatcatgaacacccatttcctggagacggttgcactggaccaatttttaaacttatgaacatccaacagcaactaatgaaaacaaacctcaagcagatggacagtcttatgcccttaatgatgacagcacaggatccttccagtgccccagagacagatggccagtttcttccctgtgcaccggagcccacggaccctcagcgactttcttcttctgaagagactgagagcactcagtgctgcccagggagccctgttgcacagactgaaagtccctgtgatttgtcaagcatagttgaggaggagaatacagaccgttcctgtaggaagaaa

SEQ ID NO: 103071 - DNA, 447 bp, Homo sapiens
  Payload ID: 105
  Gene Symbol: AKAP13
  Gene Name: A kinase (PRKA) anchor protein 13
  ENST ID: ENST00000558811
  CDS Start-End: 9-447
aaaagaggatgggcttgcgatattcggggtgcttgggcagccatgtggagaatgctggagaaccagactcctggagcagtttatcctatgaaataccgtatggagactgttctgtgaggcatcatcgagagttggacatctatacattaacctctgagtctgattcacatcatgaacacccatttcctggagacggttgcactggaccaatttttaaacttatgaacatccaacagcaactaatgaaaacaaacctcaagcagatggacagtcttatgcccttaatgatgacagcacaggatccttccagtgccccagagacagatggccagtttcttccctgtgcaccggagcccacggaccctcagcgactttcttcttctgaagagactgagagcactcagtgctgcccagggagccctgttgcacagactgaaagtccctgtg

SEQ ID NO: 103072 - DNA, 827 bp, Homo sapiens
  Payload ID: 105
  Gene Symbol: AKAP13
  Gene Name: A kinase (PRKA) anchor protein 13
  ENST ID: ENST00000559486
  CDS Start-End: 1-827
cccagtgatgacatggacagcatcatcttcccaaagccagaggaagagcatttggcctgtgatatcaccggatccagttcatccaccgatgacacggcttcactggaccgacattcttctcatggcagtgatgtgtctctctcccagattttaaagccaaacaggtcaagagatcggcaaagccttgatggattctacagccatgggatgggagctgagggtcgagaaagtgagagtgagcctgctgacccaggcgacgtggaggaggaggagatggacagtatcactgaagtgcctgcaaactgctctgtcctaaggagctccatgcgctctctttctcccttccggaggcacagctgggggcctgggaaaaatgcagccagcgatgcagaaatgaaccaccggagttcaatgcgagttcttggggatgttgtcaggagacctcccattcataggagaagtatgagctggtgcccctctggtgtgcagtactctgctggcctgagtgctgactttaattacagaagtttcagtctagaaggcttgacaggaggagctggtgtcggaaacaagccatcctcatctctagaagtaagctctgcaaatgccgaagagctcagacacccattcagtggtgaggaacgggttgactctttggtgtcactttcagaagaggatctggagtcagaccagagagaacataggatgtttgatcagcagatatgtcacagatctaagcagcagggatttaattactgtacatcagccatttcctctccattgacaaaatccatctcattaatgacaatcagccatcctggattgga

SEQ ID NO: 103073 - DNA, 322 bp, Homo sapiens
  Payload ID: 105
  Gene Symbol: AKAP13
  Gene Name: A kinase (PRKA) anchor protein 13
  ENST ID: ENST00000560256
  CDS Start-End: 209-322
gttgtcccagctcggcccgcgggggagccccgggagccgcacgggacatgtatagtttcaccatgttggccaggatggtctgaaactccttatctgaagtgatcagcctgccttgacctcccaaaattctgggattacaggcgtgtgccaccgcgtctgtcctaaggagacacactgtttctctggcttattaagagtgtcctgggtcatgaaacttaatccacagcaagctcccttatatggtgattgtgttgttacagtgctgcttgctgaagaggacaaagctgaagatgatgtagtgttttacttggtatttttgggt

SEQ ID NO: 103074 - DNA, 3765 bp, Homo sapiens
  Payload ID: 105
  Gene Symbol: AKAP13
  Gene Name: A kinase (PRKA) anchor protein 13
  Uniprot ID: Q12802
  ENST ID: ENST00000560302
  CDS Start-End: 171-710
gaagcgcctgtgctctgccgagactgccgtgcccattgctcgcctcggtcgccgccgctttagccgcctccgggggagcggccgcctattgtctttctccgcggcgaaggtgaagagttgtcccagctcggcccgcgggggagccccgggagccgcacgtgtcctgggtcatgaaacttaatccacagcaagctcccttatatggtgattgtgttgttacagtgctgcttgctgaagaggacaaagctgaagatgatgtagtgttttacttggtatttttgggttccaccctccgtcactgtacaagtactcggaaggtcagttctgatacattggagaccattgctcctggtcatgattgttgtgaaacagtgaaggtgcagctctgtgcttccaaagagggccttcccgtgtttgtggtggctgaagaagactttcatttcgtccaggatgaagcgtatgatgcagctcaattcctagcaaccagtgctggaaatcagcaggctttgaactttacccgttttcttgaccagtcaggacccccatctggggatgtgaattcccttgataagaagttggtgctggcattcaggcacctgaagctgcccacggagtggaatgtattggggacagatcagagtttgcatggtgagaatttatatgatctacaaacacactttaagtttgtgatatttctactttttttttaatggggctacttttctatggtcatcatattcaggtcttccacagaggctgcgtaaatcttagaattactgtaggaaagtggcctcaatggcatctcttctaggttcttcaattgagctgttaagcatgttgttgcagcgaaatgaccctagggattacccaaggagagtggcacgtcaccttcctgtgggtctggatttcagatttgatctctcaagtgtagaaagtgacatgctcttcatgaggagagtagcagagttactttttggtgtttaatgatcaaagacatggttttcattattgtattctgaagttctctaaagatagcctggaagtgaaggagaggaaagattgggcagtgagtgggaggagcatgagaacagggtgtgctctgagaaaccacacacttccttaaccaggttagtgtcactcttactgactttatctgttggccctccctatgagagttcactgaagaaaggactttttgtttgttttttgtttttttttgagaacgggctttcactcttgtagtccaggctggagtgcagtggcatgatctcggctcactgcagcctccacctcctgggttcaggtgattctgctgcctcagcctcccaaatagctgggattacaggcatgtaccaccatgcctagcaaatttttttttttttttaattagagacagggtttcaccgtgttagtcaggctggtctcgaactcctgacctcaggtaatctacccacctcggcctcccaaagtgctgggattataggcatgagccactgcgcccggccagaactccactttttcaaaaatatttacatagtaagtcctcttactcaaacaagggttttcccacataattctagtagccaatgacatctacttgatgtcataattgtatagatattttttaatgaaacataatgtgtacctggagttcaataagtaacatccagtttcccttctgagttcaagtccaattgaacgatttgggagtcctgagatagaaaccaaaatgtttattactgatgaaatctagattggaagcctgatgttagagctcctgccagaagggtctgcttgtactttctatgtcttcaatgaaagagctggtcagtcacaccattgccctgtagagtccacccagccttgagtattgaattattttgggtaagcagaccacaagtcactctccccacaggtgagcagttcctgaggagaaatacccagaggggcctgagccatagcatagttagtttctacactcagatgaattttgtcttcttccatggaagaatggtaaagaggtctttgccagctttgattctcttaaatctacactaaatttaacagttaaacctgtggtcagccgtcagaacggtgtcccatactgtcaggtgcatactgtcagattctacctggatagtcctgcccaggtaaaacctgaaaggaagtatcaaatcaaggaagaaaggatttatccttttcttcttctttttttaagtatagtgtccaagaaacttctgtcttgctaatatttagagatcagaatatttgacattctgaaaaggcactcatgccttatataaacctggtgatgggccttaatacctctagctcctcctatttctgtattgatacaggaatgtttattctggctgcctttcacaaatcagtgtcaagatagtactgcattagttatttgtggggcttatggtgttttatggttttgttttgtcttgtttaaagaggggcccaggagttggatagttttatgttgccatgattaaaaacaactattagaaaaagcaaacatctgaaactttggacatatcacttcctctttctctctcttttttttttttttttttgagatagagtcttgctctgtcgcccaggctggagtgcaatggtgcaatctcggctcactgcaacctccatctcctgggttgaagcgattctcctgccttagcctcccaagtagctgggaatacaggcacatgccaccacaccctgctgcttttttgtgtgttttagtagagacggggtttcaccatgttgcccaggctggtcttgaactcctgagctcaggcaatccacccgcctcagcctcccaaagtgctaggattacaggcgtgagccactgtgcccggccacttcctctctttgggccttaacttccttgtctttaataggagggaattggccagctttaatttttttttgtactgtcagtgtactggtaaattttctgttgcacaaaattgctcaagcagtgctaacaaaggccaaaccaaatttgaacacttgaggaaggaaatacatattaaaaccacaatgagatatcattacacatttatcataatggctaagatgaagaataccaagtgctggcaaagatgaagaacatatcatatgttgcttgtaggaatgcaaaatgtataaccactctagaaatatttggcagtttcttgtaaagttaaacatacacttagcgtatgacccagtaatcccacttttgggtgtttatcctagagaaatgaaaatctgtagtcaccaaaaagtctgtgcacggacgtgctcatagtaatgttattcataatcttcaaaaactggaaataacccagatttccctcactgagtgaatacagaagcaaactataatatatccatacagtggaatactactcagcaataaaaagaagcaaactgttgacatgtgcaacaacttggatgtgttttaaatgcattatgcgggaaaatgaagtcagtttccaaaggttccatactatgtgattctatttatatgatattctggaagatgcaaaattatagaaaaagagaacagatgagtagttgctaggggctgggagtgggggaagtctgactggaaagaggtatcatgagggaattctttgggttgttggagttgttttgtcttgttcgtggtggtggctgtaagaatctatgcatgtgttaaaactcataggagtgtacatcccctaaaggtgaattttattgtacatatatttaaaataataaaataacaaa

SEQ ID NO: 103075 - DNA, 5459 bp, Homo sapiens
  Payload ID: 105
  Gene Symbol: AKAP13
  Gene Name: A kinase (PRKA) anchor protein 13
  ENST ID: ENST00000559362
  CDS Start-End: 224-5459
tgcgcggactggagctgtgtgcagggccagcgcggagcccgagcagccgcggtgaagcgcctgtgctctgccgagactgccgtgcccattgctcgcctcggtcgccgccgctttagccgcctccgggggagcggccgcctattgtctttctccgcggcgaaggtgaagagttgtcccagctcggcccgcgggggagccccgggagccgcacgtgtcctgggtcatgaaacttaatccacagcaagctcccttatatggtgattgtgttgttacagtgctgcttgctgaagaggacaaagctgaagatgatgtagtgttttacttggtatttttgggttccaccctccgtcactgtacaagtactcggaaggtcagttctgatacattggagaccattgctcctggtcatgattgttgtgaaacagtgaaggtgcagctctgtgcttccaaagagggccttcccgtgtttgtggtggctgaagaagactttcatttcgtccaggatgaagcgtatgatgcagctcaattcctagcaaccagtgctggaaatcagcaggctttgaactttacccgttttcttgaccagtcaggacccccatctggggatgtgaattcccttgataagaagttggtgctggcattcaggcacctgaagctgcccacggagtggaatgtattggggacagatcagagtttgcatgatgctggcccgcgagagacattgatgcattttgctgtgcggctgggactgctgaggttgacgtggttcctgttgcagaagccaggtggccgcggagctctcagtatccacaaccaggaaggggcgacgcctgtgagcttggccttggagcgaggctatcacaagctgcaccagcttctaaccgaggagaatgctggagaaccagactcctggagcagtttatcctatgaaataccgtatggagactgttctgtgaggcatcatcgagagttggacatctatacattaacctctgagtctgattcacatcatgaacacccatttcctggagacggttgcactggaccaatttttaaacttatgaacatccaacagcaactaatgaaaacaaacctcaagcagatggacagtcttatgcccttaatgatgacagcacaggatccttccagtgccccagagacagatggccagtttcttccctgtgcaccggagcccacggaccctcagcgactttcttcttctgaagagactgagagcactcagtgctgcccagggagccctgttgcacagactgaaagtccctgtgatttgtcaagcatagttgaggaggagaatacagaccgttcctgtaggaagaaaaataaaggcgtggaaagaaaaggggaagaggtggagccagcacctattgtggactctggaactgtatctgatcaagacagctgccttcagagcttgcctgattgtggagtaaagggcacggaaggcctttcgtcctgtggaaacagaaatgaagaaactggaacaaaatcttctggaatgcccacagaccaggagtccctgagcagtggagatgctgtgcttcagagagacttggtcatggagccaggcacagcccagtattcctctggaggtgaactgggaggcatttcaacaacaaatgtcagtaccccagacactgcaggggaaatggaacatgggctcatgaacccagatgccactgtttggaagaatgtgcttcagggaggggaaagtacaaaggaaagatttgagaactctaatattggcacagctggagcctctgacgtgcacgtcacaagtaagcctgtggataaaatcagtgttccaaactgtgcccctgctgccagttccctggatggtaacaaacctgctgagtcttcacttgcatttagtaatgaagaaacctccactgaaaaaacagcagaaacggaaacttcacgaagtcgtgaggagagtgctgatgctccagtagatcagaattctgtggtgattccagctgctgcaaaagacaagatttcagatggattagaaccttatactctcttagcagcaggcataggtgaggcaatgtcaccctcagatttagcccttcttgggctggaagaagatgtaatgccacaccagaactcagaaacaaattcatctcatgctcaaagccaaaagggcaaatcctcacccatttgttctacaactggagacgataaactttgtgcagactctgcatgtcaacagaacacagtgacttctagtggcgatttggttgcaaaactgtgtgataacatagttagcgagtccgaaagcaccacagcaaggcaacccagctcacaagatccacccgatgcctcccactgtgaagacccacaggctcatacagtcacctctgaccctgtaagggatacccaggaacgtgcggatttttgtcctttcaaagtggtggataacaaaggccaacgaaaagatgtgaaactagataaacctttaacaaatatgcttgaggtggtttcacatccacatccagttgtccctaaaatggagaaagaactggtgccagaccaggcagtaatatcagacagtactttctctctggcaaacagtccaggcagtgaatcagtaaccaaggatgacgcactttcttttgtcccctcccagaaagaaaagggaacagcaactcctgaactacatacagctacagattatagagatggcccagatggaaattcgaatgagcctgatacgcggccactagaagacagggcagtaggcctgtccacatcctccactgctgcagagcttcagcacgggatggggaataccagtctcacaggacttggtggagagcatgagggtcccgcccctccagcaatcccagaagctctgaatatcaaggggaacactgactcttccctgcaaagtgtgggtaaggccactttggctttagattcagttttgactgaagaaggaaaacttctggtggtttcagaaagctctgcagctcaggaacaagataaggataaagcggtgacctgttcctctattaaggaaaatgctctctcttcaggaactttgcaggaagagcagagaacaccacctcctggacaagatactcaacaatttcatgaaaaatcaatctcagctgactgtgccaaggacaaagcacttcagctaagtaattcaccgggtgcatcctctgcctttcttaaggcagaaactgaacataacaaggaagtggccccacaagtctcactgctgactcaaggtggggctgcccagagcctggtgccaccaggagcaagtctggccacagagtcaaggcaggaagccttgggggcagagcacaacagctccgctctgttgccatgtctgttgccagatgggtctgatgggtccgatgctcttaactgcagtcagccttctcctctggatgttggagtgaagaacactcaatcccagggaaaaactagtgcctgtgaggtgagtggagatgtgacggtggatgttacaggggttaatgctctacaaggtatggctgagcccagaagagagaatatatcacacaacacccaagacatcctgattccaaacgtcttgttgagccaagagaagaatgccgttctaggtttgccagtggctctacaggacaaagctgtgactgacccacagggagttggaaccccagagatgatacctcttgattgggagaaagggaagctggagggagcagaccacagctgtaccatgggtgacgctgaggaagcccaaatagacgatgaagcacatcctgtcctactgcagcctgttgccaaggagctccccacagacatggagctctcagcccatgatgatggggccccagctggtgtgagggaagtcatgcgagccccgccttcaggcagggaaaggagcactccctctctaccttgcatggtctctgcccaggacgcacctctgcctaagggggcagacttgatagaggaggctgccagccgtatagtggatgctgtcatcgaacaagtcaaggccgctggagcactgcttactgagggggaggcctgtcacatgtcactgtccagccctgagttgggtcctctcactaaaggactagagagtgcttttacagaaaaagtgagtactttcccacctggggagagcctaccaatgggcagtactcctgaggaagccacggggagccttgcaggatgttttgctggaagggaggagccagagaagatcattttacctgtccaggggcctgagccagcagcagaaatgccagacgtgaaagctgaagatgaagtggattttagagcaagttcaatttctgaagaagtggctgtagggagcatagctgctacactgaagatgaagcaaggcccaatgacccaggcgataaaccgagaaaactggtgtacaatagagccatgccctgatgcagcatctcttctggcttccaagcagagcccagaatgtgagaacttcctggatgttggactgggcagagagtgtacctcaaaacaaggtgtacttaaaagagaatctgggagtgattctgacctctttcactcacccagtgatgacatggacagcatcatcttcccaaagccagaggaagagcatttggcctgtgatatcaccggatccagttcatccaccgatgacacggcttcactggaccgacattcttctcatggcagtgatgtgtctctctcccagattttaaagccaaacaggtcaagagatcggcaaagccttgatggattctacagccatgggatgggagctgagggtcgagaaagtgagagtgagcctgctgacccaggcgacgtggaggaggaggagatggacagtatcactgaagtgcctgcaaactgctctgtcctaaggagctccatgcgctctctttctcccttccggaggcacagctgggggcctgggaaaaatgcagccagcgatgcagaaatgaaccaccggagtttcagtctagaaggcttgacaggaggagctggtgtcggaaacaagccatcctcatctctagaagtaagctctgcaaatgccgaagagctcagacacccattcagtggtgaggaacgggttgactctttggtgtcactttcagaagaggatctggagtcagaccagagagaacataggatgtttgatcagcagatatgtcacagatctaagcagcagggatttaattactgtacatcagccatttcctctccattgacaaaatccatctcattaatgacaatcagccatcctggattggacaattcacggcccttccacagtaccttccacaataccagtgctaatctgactgagagtataacagaagagaactataatttcctgccacatagcccctccaagaaagattctgaatggaagagtggaacaaaagtcagtcgtacattcagctacatcaagaataaaatgtctagcagcaagaagagcaaag

SEQ ID NO: 103076 - DNA, 4290 bp, Homo sapiens
  Payload ID: 105
  Gene Symbol: AKAP13
  Gene Name: A kinase (PRKA) anchor protein 13
  ENST ID: ENST00000560579
  CDS Start-End: 1-4290
atgttgtatataaaccgagaaaactggtgtacaatagagccatgccctgatgcagcatctcttctggcttccaagcagagcccagaatgtgagaacttcctggatgttggactgggcagagagtgtacctcaaaacaaggtgtacttaaaagagaatctgggagtgattctgacctctttcactcacccagtgatgacatggacagcatcatcttcccaaagccagaggaagagcatttggcctgtgatatcaccggatccagttcatccaccgatgacacggcttcactggaccgacattcttctcatggcagtgatgtgtctctctcccagattttaaagccaaacaggtcaagagatcggcaaagccttgatggattctacagccatgggatgggagctgagggtcgagaaagtgagagtgagcctgctgacccaggcgacgtggaggaggaggagatggacagtatcactgaagtgcctgcaaactgctctgtcctaaggagctccatgcgctctctttctcccttccggaggcacagctgggggcctgggaaaaatgcagccagcgatgcagaaatgaaccaccggagttcaatgcgagttcttggggatgttgtcaggagacctcccattcataggagaagtttcagtctagaaggcttgacaggaggagctggtgtcggaaacaagccatcctcatctctagaagtaagctctgcaaatgccgaagagctcagacacccattcagtggtgaggaacgggttgactctttggtgtcactttcagaagaggatctggagtcagaccagagagaacataggatgtttgatcagcagatatgtcacagatctaagcagcagggatttaattactgtacatcagccatttcctctccattgacaaaatccatctcattaatgacaatcagccatcctggattggacaattcacggcccttccacagtaccttccacaataccagtgctaatctgactgagagtataacagaagagaactataatttcctgccacatagcccctccaagaaagattctgaatggaagagtggaacaaaagtcagtcgtacattcagctacatcaagaataaaatgtctagcagcaagaagagcaaagaaaaggaaaaagaaaaagataagattaaggagaaggagaaagattctaaagacaaggagaaagataagaagactgtcaacgggcacactttcagttccattcctgttgtgggtcccatcagctgtagccagtgtatgaagcccttcaccaacaaagatgcctatacttgtgcaaattgcagtgcttttgtccacaaaggctgccgagaaagtctagcctcctgtgcaaaggtcaaaatgaagcagcccaaagggagccttcaggcacatgacacatcatcactgcccacggtcattatgagaaacaagccctcacagcccaaggagcgtcctcggtccgcagtcctcctggtggatgaaaccgctaccaccccaatatttgccaatagacgatcccagcagagtgtctcgctctccaaaagtgtctccatacagaacattactggagttggcaatgatgagaacatgtcaaacacctggaaattcctgtctcattcaacagactcactaaataaaatcagcaaggtcaatgagtcaacagaatcacttactgatgagggagtaggtacagacatgaatgaaggacaactactgggagactttgagattgagtccaaacagctggaagcagagtcttggagtcggataatagacagcaagtttctaaaacagcaaaagaaagatgtggtcaaacggcaagaagtaatatatgagttgatgcagacagagtttcatcatgtccgcactctcaagatcatgagtggtgtgtacagccaggggatgatggcggatctgctttttgagcagcagatggtagaaaagctgttcccctgtttggatgagctgatcagtatccatagccaattcttccagaggattctggagcggaagaaggagtctctggtggataaaagtgaaaagaactttctcatcaagaggataggggatgtgcttgtaaatcagttttcaggtgagaatgcagaacgtttaaagaagacatatggcaagttttgtgggcaacataaccagtctgtaaactacttcaaagacctttatgccaaggataagcgttttcaagcctttgtaaagaagaagatgagcagttcagttgttagaaggcttggaattccagagtgcatattgcttgtaactcagcggattaccaagtacccagttttattccaaagaatattgcagtgtaccaaagacaatgaagtggagcaggaagatctagcacagtccttgagcctggtgaaggatgtgattggagctgtagacagcaaagtggcaagttatgaaaagaaagtgcgtctcaatgagatttatacaaagacagatagcaagtcaatcatgaggatgaagagtggtcagatgtttgccaaggaagatttgaaacggaagaagcttgtacgtgatgggagtgtgtttctgaagaatgcagcaggaaggttgaaagaggttcaagcagttcttctcactgacattttagttttccttcaagaaaaagaccagaagtacatctttgcatcattggaccagaagtcaacagtgatctctttaaagaagctgattgtgagagaagtggcacatgaggagaaaggtttattcctgatcagcatggggatgacagatccagagatggtagaagtccatgccagctccaaagaggaacgaaacagctggattcagatcattcaggacacaatcaacaccctgaacagagatgaagatgaaggaattcctagtgagaatgaggaagaaaagaaaatgttggacaccagagcccgagaattaaaagaacaacttcaccagaaggaccaaaaaatcctactcttgttggaagagaaggagatgattttccgggacatggctgagtgcagcacccctctcccagaggattgctccccaacacatagccctagagttctcttccgctccaacacagaagaggctctcaaaggaggacctttaatgaaaagtgcaataaatgaggtggagatccttcagggtttggtgagtggaaatctgggaggcacacttgggccgactgtcagcagccccattgagcaagatgtggtcggtcccgtttccctgccccggagagcagagacctttggaggatttgacagccatcagatgaatgcttcaaaaggaggcgagaaggaagagggagatgatggccaagatcttaggagaacggaatcagatagtggcctaaaaaagggtggaaatgctaacctggtatttatgcttaaaagaaacagtgagcaggttgtccagagcgttgttcatctctacgagctcctcagcgctctgcagggtgtggtgctgcagcaggacagctacattgaggaccagaaactggtgctgagcgagagggcgctcactcgcagcttgtcccgcccgagctccctcattgagcaggagaagcagcgcagcctggagaagcagcgccaggacctggccaacctgcagaagcagcaggcccagtacctcgaggagaagcgcaggcgcgagcgtgagtgggaagctcgtgagagggagctgcgggagcgggaggccctcctggcccagcgcgaggaggaggtgcagcaggggcagcaggacctggaaaaggagcgggaggagctccagcagaagaagggcacataccagtatgacctggagcgactgcgtgctgcccagaaacagcttgagagggaacaggagcagctgcgccgggaggcagagcggctcagccagcggcagacagaacgggacctgtgtcaggtttcccatccacataccaagctgatgaggatcccatcgttcttccccagtcctgaggagcccccctcgccatctgcaccttccatagccaaatcagggtcattggactcagaactttcagtgtccccaaaaaggaacagcatctctcggacacacaaagataaggggccttttcacatactgagttcaaccagccagacaaacaaaggaccagaagggcagagccaggcccctgcgtccacctctgcctctacccgcctgtttgggttaacaaagccaaaggaaaagaaggagaaaaaaaagaagaacaaaaccagccgctctcagcccggtgatggtcccgcgtcagaagtatcagcagagggtgaagagatcttctgctga

SEQ ID NO: 103077 - DNA, 660 bp, Homo sapiens
  Payload ID: 105
  Gene Symbol: AKAP13
  Gene Name: A kinase (PRKA) anchor protein 13
  ENST ID: ENST00000557852
  CDS Start-End: 162-660
aggaaacaagcagcctcagccctccctccttccctttctcagccagtctctggcttcctcttacgatttcactaatggcagctcaaagctgctgagctctgccctgacggcatgcgcccccgcttctgtgagagcacgcttcctggcatgggggtcgaatcatgtcgataaaatgggctcggtttcatgaagtaccccacataacagtgagattcataggaccaaagcatggggaggaaaaggaaaaagaaaaagataagattaaggagaaggagaaagattctaaagacaaggagaaagataagaagactgtcaacgggcacactttcagttccattcctgttgtgggtcccatcagctgtagccagtgtatgaagcccttcaccaacaaagatgcctatacttgtgcaaattgcagtgcttttgtccacaaaggctgccgagaaagtctagcctcctgtgcaaaggtcaaaatgaagcagcccaaagggagccttcaggcacatgacacatcatcactgcccacggtcattatgagaaacaagccctcacagcccaaggagcgtcctcggtccgcagtcctcctggtggatgaaaccgctaccaccccaatatttgccaatagacgatcccagcagagtgtctcgctctccaaaagtg

SEQ ID NO: 103078 - DNA, 3297 bp, Homo sapiens
  Payload ID: 105
  Gene Symbol: AKAP13
  Gene Name: A kinase (PRKA) anchor protein 13
  ENST ID: ENST00000560676
  CDS Start-End: 397-3297
atcggccgttatgcttagccagtttattctttatttttttactggagtcattgccagtgatggaaacggtgtttgcttctctttcagtcaagatctgcacaaagtatagcattaggtggtatttattgtttatattatgagttctacattcatctttccagcactctgaagttatcagcaagttctcagtcagttcaaggcattggattctgcttgatttctttttaattcattgtttttgacccctttgagagttttaatagagaggagtctggaaggcagagatctccaccacctaaccgtgagaaatttggaactaaggacttgcactggtccccaagttaacagtggatatacttcctgcattttctctgttctttcttgcatttgggcaaaatgtatgaacggcacaagaggcgctacagcctctgtgacatctccaaggtggacaggactgtggacgtggtattgctgaagataaaccgagaaaactggtgtacaatagagccatgccctgatgcagcatctcttctggcttccaagcagagcccagaatgtgagaacttcctggatgttggactgggcagagagtgtacctcaaaacaaggtgtacttaaaagagaatctgggagtgattctgacctctttcactcacccagtgatgacatggacagcatcatcttcccaaagccagaggaagagcatttggcctgtgatatcaccggatccagttcatccaccgatgacacggcttcactggaccgacattcttctcatggcagtgatgtgtctctctcccagattttaaagccaaacaggtcaagagatcggcaaagccttgatggattctacagccatgggatgggagctgagggtcgagaaagtgagagtgagcctgctgacccaggcgacgtggaggaggaggagatggacagtatcactgaagtgcctgcaaactgctctgtcctaaggagctccatgcgctctctttctcccttccggaggcacagctgggggcctgggaaaaatgcagccagcgatgcagaaatgaaccaccggagtttcagtctagaaggcttgacaggaggagctggtgtcggaaacaagccatcctcatctctagaagtaagctctgcaaatgccgaagagctcagacacccattcagtggtgaggaacgggttgactctttggtgtcactttcagaagaggatctggagtcagaccagagagaacataggatgtttgatcagcagatatgtcacagatctaagcagcagggatttaattactgtacatcagccatttcctctccattgacaaaatccatctcattaatgacaatcagccatcctggattggacaattcacggcccttccacagtaccttccacaataccagtgctaatctgactgagagtataacagaagagaactataatttcctgccacatagcccctccaagaaagattctgaatggaagagtggaacaaaagtcagtcgtacattcagctacatcaagaataaaatgtctagcagcaagaagagcaaagaaaaggaaaaagaaaaagataagattaaggagaaggagaaagattctaaagacaaggagaaagataagaagactgtcaacgggcacactttcagttccattcctgttgtgggtcccatcagctgtagccagtgtatgaagcccttcaccaacaaagatgcctatacttgtgcaaattgcagtgcttttgtccacaaaggctgccgagaaagtctagcctcctgtgcaaaggtcaaaatgaagcccaaagggagccttcaggcacatgacacatcatcactgcccacggtcattatgagaaacaagccctcacagcccaaggagcgtcctcggtccgcagtcctcctggtggatgaaaccgctaccaccccaatatttgccaatagacgatcccagcagagtgtctcgctctccaaaagtgtctccatacagaacattactggagttggcaatgatgagaacatgtcaaacacctggaaattcctgtctcattcaacagactcactaaataaaatcagcaaggtcaatgagtcaacagaatcacttactgatgagggagtaggtacagacatgaatgaaggacaactactgggagactttgagattgagtccaaacagctggaagcagagtcttggagtcggataatagacagcaagtttctaaaacagcaaaagaaagatgtggtcaaacggcaagaagtaatatatgagttgatgcagacagagtttcatcatgtccgcactctcaagatcatgagtggtgtgtacagccaggggatgatggcggatctgctttttgagcagcagatggtagaaaagctgttcccctgtttggatgagctgatcagtatccatagccaattcttccagaggattctggagcggaagaaggagtctctggtggataaaagtgaaaagaactttctcatcaagaggataggggatgtgcttgtaaatcagttttcaggtgagaatgcagaacgtttaaagaagacatatggcaagttttgtgggcaacataaccagtctgtaaactacttcaaagacctttatgccaaggataagcgttttcaagcctttgtaaagaagaagatgagcagttcagttgttagaaggcttggaattccagagtgcatattgcttgtaactcagcggattaccaagtacccagttttattccaaagaatattgcagtgtaccaaagacaatgaagtggagcaggaagatctagcacagtccttgagcctggtgaaggatgtgattggagctgtagacagcaaagtggcaagttatgaaaagaaagtgcgtctcaatgagatttatacaaagacagatagcaagtcaatcatgaggatgaagagtggtcagatgtttgccaaggaagatttgaaacggaagaagcttgtacgtgatgggagtgtgtttctgaagaatgcagcaggaaggttgaaagaggttcaagcagttcttctcactgacattttagttttccttcaagaaaaagaccagaagtacatctttgcatcattggaccagaagtcaacagtgatctctttaaagaagctgattgtgagagaagtggcacatgaggagaaaggtttattcctgatcagcatggggatgacagatccagagatggtagaagtccatgccagctccaaagaggaacgaaacagctggattcagatcattcaggacacaatcaacaccctgaacagagatgaagatgaaggaattcctagtgag

SEQ ID NO: 103079 - DNA, 425 bp, Homo sapiens
  Payload ID: 105
  Gene Symbol: AKAP13
  Gene Name: A kinase (PRKA) anchor protein 13
  ENST ID: ENST00000612418
  CDS Start-End: 227-425
gtctaaaactctcttttctcttggctcttcttattcgagtgatgaggaggaggagttgcataattcacggcccttccacagtaccttccacaataccagtgctaatctgactgagagtataacagaagagaactataatttcctgccacatagcccctccaagaaagattctgaatggaagagtggaacaaaagtcagtcgtacattcagctacatcaagaataaaatgtctagcagcaagaagagcaaagaaaaggaaaaagaaaaagataagattaaggagaaggagaaagattctaaagacaaggagaaagataagaagactgtcaacgggcacactttcagttccattcctgttgtgggtcccatcagctgtagccagtgtatgaagcccttcaccaacaaagatgcctatacttgtgcaa

SEQ ID NO: 103080 - DNA, 553 bp, Homo sapiens
  Payload ID: 105
  Gene Symbol: AKAP13
  Gene Name: A kinase (PRKA) anchor protein 13
  ENST ID: ENST00000560340
  CDS Start-End: 258-553
tcacacagcagcctgttccatctgtgggtaaccatgttccgaggcagcaaagagaaaccgctattgctccgtggaaataaactatctgaataaaacttcttaacgggggttgaggctgaagctgaaacgggagtcggacacgatcttggctcctgaagtctttaaaggtcagtttgatgcacacttctataccaccacctgttaccagctgtagacagaagacctatctccatgcttgcccctaggcttttgtagaaatgccagacgtgaaagctgaagatgaagtggattttagagcaagttcaatttctgaagaagtggctgtagggagcatagctgctacactgaagatgaagcaaggcccaatgacccaggcgataaaccgagaaaactggtgtacaatagagccatgccctgatgcagcatctcttctggcttccaagcagagcccagaatgtgagaacttcctggatgttggactgggcagagagtgtacctcaaaacaaggtgtacttaaaagagaatctgggagtgattctgacctctttcactc

SEQ ID NO: 103081 - DNA, 608 bp, Homo sapiens
  Payload ID: 106
  Gene Symbol: AKAP14
  Gene Name: A kinase (PRKA) anchor protein 14
  Uniprot ID: Q86UN6
  ENST ID: ENST00000334356
  CDS Start-End: 86-499
actgagagaatcctgagacatccccagccacctaccactgctcctgttccaagcaaagaagatctgctcactccggaaaaagaaaatgagtgagactcaaaattcaacaagccagaaagcaatggatgaggataacaaagccgcaagccaaacaatgccgaatacacaagacaagaactacgaggatgaattgactcaagtagctctagctctggttgaggatgtcatcaattatgctgttaagattgtggaagaggagcgaaaccctttgaaaaacatcaagtggatgactcacggtgaattcactgtggaaaagggtcttaaacaaattgacgaatatttttcggatgcacccattgttgtttcttatgtaggtgaccaccaagcattagttcacagaccaggaatggttcgctttcgagaaaactggcagaagaatcttactgatgccaaatatagtttcatggagtcattccccttcttattcaatcgtgtctgatacttacaggatgtcttaggattgtttttctcatcaggatacattaaaaatacaatacagcacgtcaaaccacagaatatttattgagtaataaacttgtggcacacaa

SEQ ID NO: 103082 - DNA, 412 bp, Homo sapiens
  Payload ID: 106
  Gene Symbol: AKAP14
  Gene Name: A kinase (PRKA) anchor protein 14
  Uniprot ID: Q86UN6
  ENST ID: ENST00000371422
  CDS Start-End: 86-355
actgagagaatcctgagacatccccagccacctaccactgctcctgttccaagcaaagaagatctgctcactccggaaaaagaaaatgagtgagactcaaaattcaacaagccagaaagcaatggatgaggataacaaagccgcaagccaaacaatgccgaatacacaagacaagaactacgaggatgaattgactcaagtagctctagctctggttgaggatgtcatcaattatgctgttaagattgtggaagaggagcgaaaccctttgaaaaacatcaagtggatgactcacggtgaattcactgtggaaaagggtcttaaacaaattgacgaatatttttcggtaagttaggccgaccactccagcatggtacaccggtgtgaagaacaataaagagactctcagcag

SEQ ID NO: 103083 - DNA, 793 bp, Homo sapiens
  Payload ID: 106
  Gene Symbol: AKAP14
  Gene Name: A kinase (PRKA) anchor protein 14
  Uniprot ID: Q86UN6
  ENST ID: ENST00000371425
  CDS Start-End: 275-688
ttgtgaggagtaaatgacttcagacactgaaggcttaacacagtgactggcatatcatagggatgcccaatacataccagctgtgaggcttatcaccactgttcttcctggcatggccctgtaagctcatcttcggctgaagagaagctagcacttgcaaacattccatctggcaatctgagagaagctactgagagaatcctgagacatccccagccacctaccactgctcctgttccaagcaaagaagatctgctcactccggaaaaagaaaatgagtgagactcaaaattcaacaagccagaaagcaatggatgaggataacaaagccgcaagccaaacaatgccgaatacacaagacaagaactacgaggatgaattgactcaagtagctctagctctggttgaggatgtcatcaattatgctgttaagattgtggaagaggagcgaaaccctttgaaaaacatcaagtggatgactcacggtgaattcactgtggaaaagggtcttaaacaaattgacgaatatttttcggatgcacccattgttgtttcttatgtaggtgaccaccaagcattagttcacagaccaggaatggttcgctttcgagaaaactggcagaagaatcttactgatgccaaatatagtttcatggagtcattccccttcttattcaatcgtgtctgatacttacaggatgtcttaggattgtttttctcatcaggatacattaaaaatacaatacagcacgtcaaaccacagaatatttattgagtaataaacttgtggcac

SEQ ID NO: 103084 - DNA, 977 bp, Homo sapiens
  Payload ID: 106
  Gene Symbol: AKAP14
  Gene Name: A kinase (PRKA) anchor protein 14
  Uniprot ID: Q86UN6
  ENST ID: ENST00000371431
  CDS Start-End: 275-868
ttgtgaggagtaaatgacttcagacactgaaggcttaacacagtgactggcatatcatagggatgcccaatacataccagctgtgaggcttatcaccactgttcttcctggcatggccctgtaagctcatcttcggctgaagagaagctagcacttgcaaacattccatctggcaatctgagagaagctactgagagaatcctgagacatccccagccacctaccactgctcctgttccaagcaaagaagatctgctcactccggaaaaagaaaatgagtgagactcaaaattcaacaagccagaaagcaatggatgaggataacaaagccgcaagccaaacaatgccgaatacacaagacaagaactacgaggatgaattgactcaagtagctctagctctggttgaggatgtcatcaattatgctgttaagattgtggaagaggagcgaaaccctttgaaaaacatcaagtggatgactcacggtgaattcactgtggaaaagggtcttaaacaaattgacgaatatttttcgaagtgtgtttctaaaaaatgctgggcacatggcgtagagtttgtagagaggaaagacttaattcacagcttcctctacatctactatgtacactggagtatctcaactgctgacctacccgtagcacgaatctctgctggtacctacttcaccatgaaggtctccaaaaccaaaccaccggatgcacccattgttgtttcttatgtaggtgaccaccaagcattagttcacagaccaggaatggttcgctttcgagaaaactggcagaagaatcttactgatgccaaatatagtttcatggagtcattccccttcttattcaatcgtgtctgatacttacaggatgtcttaggattgtttttctcatcaggatacattaaaaatacaatacagcacgtcaaaccacagaatatttattgagtaataaacttgtggcacacaa

SEQ ID NO: 103085 - DNA, 3204 bp, Homo sapiens
  Payload ID: 107
  Gene Symbol: AKAP17A
  Gene Name: A kinase (PRKA) anchor protein 17A
  Uniprot ID: Q02040
  ENST ID: ENST00000313871
  CDS Start-End: 197-2284
agtggaaatgcgtcatagagggcgggcggcgacggcggtggcggcgtcggaggcgcctccgggggacggtggcggctcccggcggtgaggccgcgcctgtccggggatcgtcgagggacggcgggagcttgggccagcggcggcggcggcctgggacgcaggcggagccccgcgcaggcccaaggtcccggaggctatggcagcggctaccatcgtgcacgacacgtctgaggccgtggagctctgccctgcttacggcttgtacctgaagcccatcaccaagatgaccatcagcgtggcactcccgcagctgaagcagccggggaagtccatctccaactgggaggtgatggagaggctgaagggcatggtgcagaaccaccagttctccacgctgcgtatttccaagagcaccatggacttcatccgcttcgagggggaggtggagaacaagagcctggtcaagtcttttctggcctgcctggacggcaagaccatcaagctcagcggcttctccgacatcctgaaggtgcgcgcggccgagttcaagatcgacttccccacccgccacgactgggactccttcttccgcgacgccaaggacatgaacgagaccctgccgggggagcggccggacaccatccacctggaggggctgccctgcaagtggttcgccctgaaggagtcgggctccgagaagcccagcgaggacgtcctggtcaaggtgtttgagaagttcggggagatccggaatgtggacatccccatgctggacccctaccgggaggagatgacgggccgcaacttccacaccttcagtttcggggggcacttgaacttcgaggcctatgtgcagtaccgcgagtacatgggcttcatccaggccatgagcgccctgcgcgggatgaaactcatgtacaagggcgaggacggcaaggccgtggcctgcaacatcaaggtttcttttgattcgaccaaacacctgagtgatgcctcaattaagaagcggcagctggagaggcagaagcttcaggaactggagcagcaaagagaagaacaaaagcgcagagagaaggaagcggaggagaggcagcgagcggaggaaaggaaacaaaaggagctggaagagctggagcgagagaggaaaagagaagagaagcttcgcaagagggagcagaagcagagggaccgtgagctgcgccggaatcagaagaagctggagaagctgcaggcggaggagcagaagcagctgcaggagaagatcaagctggaggagcgcaagctgctgctggcccagaggaacctgcagtccatccggctcatcgccgagctgctcagcagagccaaggctgtgaagctacgggaacaggagcagaaggaggagaagctgaggctccagcagcaggaggagcggcggcggctgcaggaggccgagctgcggcgcgtggaggaggagaaggagcgcgcgctgggcctgcagcggaaagagcgggagctgcgcgagcggctgctgagcatcctgctgagcaagaagccggacgacagccacacacacgacgagctgggcgtggcacacgccgacctgctgcagcccgtcctggacatcctgcagaccgtgtcgtccggctgtgtgagcgccaccacgctgcaccccctcgggggccagcccccggccggtgcccccaaggagagcccggcccacccagaggccgacggcgctcccaaaagcgtgaacgggagcgtggccgaggaggccccatgcaaggaggttcagagctcctgtcgtgtggtccccgaggatggctctccagagaagaggtgcccgggcggcgtcctctcctgcattcctgacaacaaccaacagcccaagggcatccctgcctgcgagcagaatgtctccagaaaggacacccggtcagaacaggacaagtgcaaccgggagcccagcaagggccggggccgggccaccggagacgggcttgctgaccggcacaagcgggagaggagccgggccaggcgggccagcagcagggaggacgggaggccacgcaaggagcggcggccccacaagaagcacgcctacaaggatgacagcccccgccggcgcagcacgagcccggaccacacccggtcccggaggtcccacagcaaagacaggcaccggagggagcggagccgggagcggaggggcagcgccagcaggaagcacagccgccaccgccgccgaagcgagcggtcgcgctcccggtccccgagcaggcaccgcagtacctggaacaggtaatgacgggcacggcctccccacggcctgtccgggaaagaccaggacctgctcgagcctcctggccgctccttggccgctctccgtccacccctgcaaagccaagacccttctgcagccacgaatgtccacggagcccgccggcaggaaggaagacaccatgctttagagatccatctttctccactcaccgcagcgtacttggcacttcagtttcaaacacgtagtcctttaaaacttgatccgatagctttaatgcggccggtcctctctcagtcaggaaaattgcacagaccgacagtcgtgaggatggcagagctgctgcattcccccacacggggatttctgtgtctgcttggcgacctccctgcgtgcacggcctaggaggtgcacgggccaccatagtcacactggcactgaaaagaaagcgttgccctggtgattctttcccccccgtttgtaatgttaactgatcaggaagtgcagtttgggtgggatgccgaatcgtcgtgctgacattgagtcacggatgaggaaggtacaagtcctttaagatcaaaactcaaacgggccgttctttctaaggtgtcggtatgtggggagtggtacaaaatggtctgatgctccttcaaaaacattcactttttacaacgtcaaggaattaagcataaaaaagattggttaaaagctttggtttctagtaaaggttagtgtgtgtggtttttttaagaagctgttttgctaaattatttttacttggaatgtttcaaacagatttcaggctgcaaacttgttttataatcgtttgcttctccaagtgaagctcagaaatacctaaaaatagctgtaacgttcgcgttaggaaagatggtgtttattccagtttgcatttttatggtgaaataaaatccttttccaatgaa

SEQ ID NO: 103086 - DNA, 2187 bp, Homo sapiens
  Payload ID: 107
  Gene Symbol: AKAP17A
  Gene Name: A kinase (PRKA) anchor protein 17A
  ENST ID: ENST00000381261
  CDS Start-End: 165-1505
cggcggtggcggcgtcggaggcgcctccgggggacggtggcggctcccggcggtgaggccgcgcctgtccggggatcgtcgagggacggcgggagcttgggccagcggcggcggcggcctgggacgcaggcggagccccgcgcaggcccaaggtcccggaggctatggcagcggctaccatcgtgcacgacacgtctgaggccgtggagctctgccctgcttacggcttgtacctgaagcccatcaccaagatgaccatcagcgtggcactcccgcagctgaagcagccggggaagtccatctccaactgggaggtgatggagaggctgaagggcatggtgcagaaccaccagttctccacgctgcgtatttccaagagcaccatggacttcatccgcttcgagggggaggtggagaacaagagcctggtcaagtcttttctggcctgcctggacggcaagaccatcaagctcagcggcttctccgacatcctgaaggtgcgcgcggccgagttcaagatcgacttccccacccgccacgactgggactccttcttccgcgacgccaaggacatgaacgagaccctgccgggggagcggccggacaccatccacctggaggggctgccctgcaagtggttcgccctgaaggagtcgggctccgagaagcccagcgaggacgtcctggtcaaggtgtttgagaagttcggggagatccggaatgtggacatccccatgctggacccctaccgggaggagatgacgggccgcaacttccacaccttcagtttcggggggcacttgaacttcgaggcctatgtgcagtaccgcgagtacatgggcttcatccaggccatgagcgccctgcgcgggatgaaactcatgtacaagggcgaggacggcaaggccgtggcctgcaacatcaaggtttcttttgattcgaccaaacacctgagtgatgcctcaattaagaagcggcagctggagaggcagaagcttcaggaactggagcagcaaagagaagaacaaaagcgcagagagaaggaagcggaggagaggcagcgagcggaggaaaggaaacaaaaggagctggaagagctggagcgagagaggaaaagagaagagaagcttcgcaagagggagcagaagcagagggaccgtgagctgcgccggaatcagaagaagctggagaagctgcaggcggaggagcagaagcagctgcaggagaagatcaagctggaggagcgcaagctgctgctggcccagaggaacctgcagtccatccggctcatcgccgagctgctcagcagagccaaggtacccgggggctccctctgcagccgccagccgcgcccgggctgccctcagtgccctcccctgaaatgcgggcggcgtcacggcgccgtttccccgccggctgcagctgtagctacgaaaccagctttaatgccgaggatgacggctccttcccgggagggtgtagcgctcgtctgtcgttcccgatgatttcagagctgtgacggtttccttttgcaaagctggtgcattcaggttccccgagcaggctggcagcctcccgggggccagggcagaggctctctgtttcctttgggtcggggcagtggcagagagtgcagggggccgctccctctggcccgcgcctctgtgtgtggtcagctggcctggctgtgacctcaccagtggcccagagcagaggggcaaggtgggctggggggagggctgagcgcacagagggggcctgccgtgggcccgggtccctcctccgcagcgtgaacctgacaggtctcaccagcgccggtactgacgaccccctcagcaccaagagcctccctgctcctcctgcaggcgcgactggtaactcccatgagcccggggccagggcccacagacagacagacctccccaggacagacgtccccggcacgctccttgtcctcaggagggctgcgtccccctggagtccaacgcggggcgaccccataacctgttgtctgattacagttgtgataagtccccgggaaggagcatgacaagaggctgagacatgtggcagcccagtccttacctcatggtgaatattgaagacactaacccaggctaggccaggctcgccccgcagctacggcggtggcatgcgtctgcggcgtcatctcagctccctgttgct

SEQ ID NO: 103087 - DNA, 3232 bp, Homo sapiens
  Payload ID: 107
  Gene Symbol: AKAP17A
  Gene Name: A kinase (PRKA) anchor protein 17A
  Uniprot ID: Q02040
  ENST ID: ENST00000474361
  CDS Start-End: 167-1324
gacggcggtggcggcgtcggaggcgcctccgggggacggtggcggctcccggcggtgaggccgcgcctgtccggggatcgtcgagggacggcgggagcttgggccagcggcggcggcggcctgggacgcaggcggagccccgcgcaggcccaaggtcccggaggctatggcagcggctaccatcgtgcacgacacgtctgaggccgtggagctctgccctgcttacggcttgtacctgaagcccatcaccaagatgaccatcagcgtggcactcccgcagctgaagcagccggggaagtccatctccaactgggaggtgatggagaggctgaagggcatggtgcagaaccaccagttctccacgctgcgtatttccaagagcaccatggacttcatccgcttcgagggggaggtggagaacaagagcctggtcaagtcttttctggcctgcctggacggcaagaccatcaagctcagcggcttctccgacatcctgaaggtgcgcgcggccgagttcaagatcgacttccccacccgccacgactgggactccttcttccgcgacgccaaggacatgaacgagaccctgccgggggagcggccggacaccatccacctggaggggctgccctgcaagtggttcgccctgaaggagtcgggctccgagaagcccagcgaggacgtcctggtcaaggtgtttgagaagttcggggagatccggaatgtggacatccccatgctggacccctaccgggaggagatgacgggccgcaacttccacaccttcagtttcggggggcacttgaacttcgaggcctatgtgcagtaccgcgagtacatgggcttcatccaggccatgagcgccctgcgcgggatgaaactcatgtacaagggcgaggacggcaaggccgtggcctgcaacatcaaggtttcttttgattcgaccaaacacctgagtgatgcctcaattaagaagcggcagctggagaggcagaagcttcaggaactggagcagcaaagagaagaacaaaagcgcagagagaaggaagcggaggagaggcagcgagcggaggaaaggaaacaaaaggagctggaagagctggagcgagagaggaaaagagaagagaagcttcgcaagagggagcagaagcagagggaccgtgagctgcgccggaatcagaagaagctggagaagctgcaggcggaggagcagaagcagctgcaggagaagatcaagctggaggagcgcaagctgctgctggcccagaggaacctgcagtccatccggctcatcgccgagctgctcagcagagccaagttgtgataagtccccgggaaggagcatgacaagaggctgagacatgtggcagcccagtccttacctcatggctgtgaagctacgggaacaggagcagaaggaggagaagctgaggctccagcagcaggaggagcggcggcggctgcaggaggccgagctgcggcgcgtggaggaggagaaggagcgcgcgctgggcctgcagcggaaagagcgggagctgcgcgagcggctgctgagcatcctgctgagcaagaagccggacgacagccacacacacgacgagctgggcgtggcacacgccgacctgctgcagcccgtcctggacatcctgcagaccgtgtcgtccggctgtgtgagcgccaccacgctgcaccccctcgggggccagcccccggccggtgcccccaaggagagcccggcccacccagaggccgacggcgctcccaaaagcgtgaacgggagcgtggccgaggaggccccatgcaaggaggttcagagctcctgtcgtgtggtccccgaggatggctctccagagaagaggtgcccgggcggcgtcctctcctgcattcctgacaacaaccaacagcccaagggcatccctgcctgcgagcagaatgtctccagaaaggacacccggtcagaacaggacaagtgcaaccgggagcccagcaagggccggggccgggccaccggagacgggcttgctgaccggcacaagcgggagaggagccgggccaggcgggccagcagcagggaggacgggaggccacgcaaggagcggcggccccacaagaagcacgcctacaaggatgacagcccccgccggcgcagcacgagcccggaccacacccggtcccggaggtcccacagcaaagacaggcaccggagggagcggagccgggagcggaggggcagcgccagcaggaagcacagccgccaccgccgccgaagcgagcggtcgcgctcccggtccccgagcaggcaccgcagtacctggaacaggtaatgacgggcacggcctccccacggcctgtccgggaaagaccaggacctgctcgagcctcctggccgctccttggccgctctccgtccacccctgcaaagccaagacccttctgcagccacgaatgtccacggagcccgccggcaggaaggaagacaccatgctttagagatccatctttctccactcaccgcagcgtacttggcacttcagtttcaaacacgtagtcctttaaaacttgatccgatagctttaatgcggccggtcctctctcagtcaggaaaattgcacagaccgacagtcgtgaggatggcagagctgctgcattcccccacacggggatttctgtgtctgcttggcgacctccctgcgtgcacggcctaggaggtgcacgggccaccatagtcacactggcactgaaaagaaagcgttgccctggtgattctttcccccccgtttgtaatgttaactgatcaggaagtgcagtttgggtgggatgccgaatcgtcgtgctgacattgagtcacggatgaggaaggtacaagtcctttaagatcaaaactcaaacgggccgttctttctaaggtgtcggtatgtggggagtggtacaaaatggtctgatgctccttcaaaaacattcactttttacaacgtcaaggaattaagcataaaaaagattggttaaaagctttggtttctagtaaaggttagtgtgtgtggtttttttaagaagctgttttgctaaattatttttacttggaatgtttcaaacagatttcaggctgcaaacttgttttataatcgtttgcttctccaagtgaagctcagaaatacctaaaaatagctgtaacgttcgcgttaggaaagatggtgtttattccagtttgcatttttatggtgaaataaaatcc

SEQ ID NO: 103088 - DNA, 3101 bp, Homo sapiens
  Payload ID: 108
  Gene Symbol: AKAP2
  Gene Name: A kinase (PRKA) anchor protein 2
  Uniprot ID: Q9Y2D5
  ENST ID: ENST00000259318
  CDS Start-End: 208-2787
aggaatttgtccagcttgagccagggtgcacgcaggaatctgtctggaaaaaggcagttctcactgaggaggtttgaggcgcgcgctctgggcaggaagcctccccagctttctgaggatgatatctggctaaaaagcgagggagacaactatagtgccaccctcctggagcctgctgccagctctctttccccagatcacaaaaacatggaaattgaggtgtctgttgcagaatgtaaaagtgttcctggaatcacctctaccccacatcccatggaccatccctccgctttctattcacccccgcataatggcctccttactgatcaccacgaatccctggataatgatgttgccagagagatccgctatctagatgaggtgctagaggccaactgctgtgattctgctgtggatggaacgtacaatggaacatcctccccagagcctggtgcagtggttctggtgggcggcctaagcccccctgtccacgaggcgacccagccagaacccactgaaagaacagctagccggcaggcacctcctcacatcgagctcagtaatagcagccctgaccccatggcagaggcagaaagaacaaatggccattcccccagccagcctagagatgcgctgggggacagcctgcaggtgcctgtcagccccagctccacaaccagctcacggtgttcttcccgagatggagagttcactctcaccacactgaaaaaggaggccaagtttgagctgcgtgccttccatgaggacaagaagccctccaagctctttgaggatgacgagcatgagaaagaacaatactgcattagaaaagtgaggccttcagaggagatgctggagctggaaaaggagaggagagagctcatccgcagccaggccgtcaagaagaatcctggcattgcagcaaaatggtggaatcccccgcaggaaaaaaccatcgaggagcagctggacgaggaacatctggagtcgcacaaaaagtacaaggagcgcaaagagagaagggcacagcaggaacagttgctgctgcagaagcagttacagcagcagcagcagcagcccccatcgcagctctgcacagcccctgcctcttctcatgaacgcgcaagcatgattgacaaagcaaaggaggacattgtcacagagcagatagatttctctgctgctcgcaaacaatttcagctgatggagaattccaggcaagcggtggccaagggccagagtacacccaggctgttctccatcaagcctttctacaggcctctggggtcagtcaactcagacaagccactgactaatccgagaccaccttctgtcgggggacctccagaagacagtggtgcctcagccgccaagggacagaaatcccccggtgccctggagaccccatcggcagcaggaagccagggcaacacagcctctcaggggaaggaagggccctacagcgagccttctaaacgtgggcccttatctaaactgtgggctgaggatggagaatttacgagcgcccgggctgtcctcactgtggtcaaggatgatgaccatgggattttggatcagttctcaagatctgtcaatgtctccttgacccaagaggagcttgactctggtctggacgaattgtcggtgaggtctcaggataccacagtcctggagaccctatccaatgatttcagcatggacaacatcagtgacagcggggcatccaatgagacaaccaatgccctccaggaaaattcactggctgatttttctctgccccagacaccacaaactgacaacccctcagagggccgaggagaaggcgtctccaagtcatttagtgatcatggtttctattccccttcctccacgctgggggactctccgttggttgatgaccccttggagtatcaggctggcctcctggtgcagaatgccattcaacaagccatagccgagcaggtggataaagctgtgtccaaaaccagcagggatggagcagagcaacagggacctgaagcgactgtagaggaagctgaagctgcggctttcggctcagaaaagcctcagagcatgtttgagccacctcaggtgtcttctcctgttcaagagaaaagggatgtattaccaaagattctgcctgctgaagacagggcgctcagggaaagggggcccccccagccactgccagctgtgcagcccagtggcccgattaacatggaggagaccaggcccgaaggaagctatttcagcaagtactcggaggcagctgagctgagaagcacagcctccctcctggccactcaagaatctgacgtgatggttgggcctttcaagctgaggtccaggaaacagcggactttgtccatgattgaggaagagatccgagcagctcaggaaagggaagaggagctgaagaggcagagacaagtcttgcagagtacgcagagccccaggacaaagaatgccccatcactgccctccagaacatgctacaaaactgctccagggaaaatagagaaagtcaaacctcctccatcccccaccactgaaggccccagcttgcagcctgacttagcccctgaagaggctgccggaacccagcggcccaagaatctgatgcagaccctcatggaagactatgagacacacaaatctaaaaggcgcgagagaatggatgatagtagtgtcctcgaggccacacgggttaatcgaagaaagagcgcactggctttgcgctgggaagcagggatctatgccaaccaggaggaagaagacaacgaataaacttccttcaacccaggaagcgtctttggtgcttgggagaccaagaaaccaagaaattaacaactgaaagcattttaatggactatttattaaagtgcaaacaaactcagcaatccttatgtagaccagaagctgcaatatacaatgatgaaaatgaaacgaaaaggaagtccccccatcagactctggacacccaggaatcaaaagagaaaggacttttttggtgactcaatcccagtgtctggtttggggccaatctacaatggatccaaaaggacaaaacatgttacaagcaaatcaacatagttgctgca

SEQ ID NO: 103089 - DNA, 6866 bp, Homo sapiens
  Payload ID: 108
  Gene Symbol: AKAP2
  Gene Name: A kinase (PRKA) anchor protein 2
  Uniprot ID: Q9Y2D5
  ENST ID: ENST00000374525
  CDS Start-End: 5-2851
gcagatgcgctggccccagcccggggctgccgctcgccttcccccggagtctcctggacccccggagtctcctggacccccggagcgggaggcagcggccgcgcggcgctggactggagcagaaccccaggactgcgcccccgggagcgggcgcccagagaagcctccccagctttctgaggatgatatctggctaaaaagcgagggagacaactatagtgccaccctcctggagcctgctgccagctctctttccccagatcacaaaaacatggaaattgaggtgtctgttgcagaatgtaaaagtgttcctggaatcacctctaccccacatcccatggaccatccctccgctttctattcacccccgcataatggcctccttactgatcaccacgaatccctggataatgatgttgccagagagatccgctatctagatgaggtgctagaggccaactgctgtgattctgctgtggatggaacgtacaatggaacatcctccccagagcctggtgcagtggttctggtgggcggcctaagcccccctgtccacgaggcgacccagccagaacccactgaaagaacagctagccggcaggcacctcctcacatcgagctcagtaatagcagccctgaccccatggcagaggcagaaagaacaaatggccattcccccagccagcctagagatgcgctgggggacagcctgcaggtgcctgtcagccccagctccacaaccagctcacggtgttcttcccgagatggagagttcactctcaccacactgaaaaaggaggccaagtttgagctgcgtgccttccatgaggacaagaagccctccaagctctttgaggatgacgagcatgagaaagaacaatactgcattagaaaagtgaggccttcagaggagatgctggagctggaaaaggagaggagagagctcatccgcagccaggccgtcaagaagaatcctggcattgcagcaaaatggtggaatcccccgcaggaaaaaaccatcgaggagcagctggacgaggaacatctggagtcgcacaaaaagtacaaggagcgcaaagagagaagggcacagcaggaacagttgctgctgcagaagcagttacagcagcagcagcagcagcccccatcgcagctctgcacagcccctgcctcttctcatgaacgcgcaagcatgattgacaaagcaaaggaggacattgtcacagagcagatagatttctctgctgctcgcaaacaatttcagctgatggagaattccaggcaagcggtggccaagggccagagtacacccaggctgttctccatcaagcctttctacaggcctctggggtcagtcaactcagacaagccactgactaatccgagaccaccttctgtcgggggacctccagaagacagtggtgcctcagccgccaagggacagaaatcccccggtgccctggagaccccatcggcagcaggaagccagggcaacacagcctctcaggggaaggaagggccctacagcgagccttctaaacgtgggcccttatctaaactgtgggctgaggatggagaatttacgagcgcccgggctgtcctcactgtggtcaaggatgatgaccatgggattttggatcagttctcaagatctgtcaatgtctccttgacccaagaggagcttgactctggtctggacgaattgtcggtgaggtctcaggataccacagtcctggagaccctatccaatgatttcagcatggacaacatcagtgacagcggggcatccaatgagacaaccaatgccctccaggaaaattcactggctgatttttctctgccccagacaccacaaactgacaacccctcagagggccgaggagaaggcgtctccaagtcatttagtgatcatggtttctattccccttcctccacgctgggggactctccgttggttgatgaccccttggagtatcaggctggcctcctggtgcagaatgccattcaacaagccatagccgagcaggtggataaagctgtgtccaaaaccagcagggatggagcagagcaacagggacctgaagcgactgtagaggaagctgaagctgcggctttcggctcagaaaagcctcagagcatgtttgagccacctcaggtgtcttctcctgttcaagagaaaagggatgtattaccaaagattctgcctgctgaagacagggcgctcagggaaagggggcccccccagccactgccagctgtgcagcccagtggcccgattaacatggaggagaccaggcccgaaggaagctatttcagcaagtactcggaggcagctgagctgagaagcacagcctccctcctggccactcaagaatctgacgtgatggttgggcctttcaagctgaggtccaggaaacagcggactttgtccatgattgaggaagagatccgagcagctcaggaaagggaagaggagctgaagaggcagagacaagtcttgcagagtacgcagagccccaggacaaagaatgccccatcactgccctccagaacatgctacaaaactgctccagggaaaatagagaaagtcaaacctcctccatcccccaccactgaaggccccagcttgcagcctgacttagcccctgaagaggctgccggaacccagcggcccaagaatctgatgcagaccctcatggaagactatgagacacacaaatctaaaaggcgcgagagaatggatgatagtagtgtcctcgaggccacacgggttaatcgaagaaagagcgcactggctttgcgctgggaagcagggatctatgccaaccaggaggaagaagacaacgaataaacttccttcaacccaggaagcgtctttggtgcttgggagaccaagaaaccaagaaattaacaactgaaagcattttaatggactatttattaaagtgcaaacaaactcagcaatccttatgtagaccagaagctgcaatatacaatgatgaaaatgaaacgaaaaggaagtccccccatcagactctggacacccaggaatcaaaagagaaaggacttttttggtgactcaatcccagtgtctggtttggggccaatctacaatggatccaaaaggacaaaacatgttacaagcaaatcaacatagttgctgcaggcggaactgagaccagcctctctgggcgatgaaggacaatggtggtagggccacttagagagcagtagggcccaggctggtgcagcctacatggcacaggatatttccctgcaccagtttcccacctgtcacttgcagcatcagagggtgttgcattaactccattttctccagcagccataaaatgaatggcgtttctctccatatttgcccagaagaggcagttatgattccacttctcctacatttaattatttttaattgagaacaactcatgatcacaattcataaaatccatattttaagacaatagttcttcatgtcacaaacacaatctattctacatgaggaggctgagaaaggggaagagaaaaacaaaccaaatggatgatgttagctttaggatcgtgtctgcttataatattcactgatctgcagtttatgagaacacattttcacagttatgtttcttcataggaaaactatatttagtgggcaacaactatttttatgatgggatgggggagtatatacacgtatagaatctgtacgcgttgaacaacttggttcaagatggtgggggcatttttagagcggcaataattgaaaaaaaaggcgaactctgccttggagaggtagatgataagaaataaaaaggtgtttataactattttgtattataaagtgggccttagagataggaagaagaatgatggattccttttggatcaatcagaaaggaaacacgaaagaaaagtcaggaaggtagagagagaaaaagggagggaaggagaaagaatgggaataaaataaggaggtaagagatactatttttgctgagcaaccagtgtgtttcaggatgatacaaagaaaaatatagaatagaaataagtgcaggcttggaatcagctacaaatcctaaagatggggtgtgtgtggatgtgtgtgtgtgtgtgtgtacaccattgtgtgtttgtaaaatgtgtatgttcatgagtaagggtgtgtgtgtgtgtgtattaaaattccagagtgaccgtggcacttgggtgtacaggtaattcctccagagctgtttgctggcttcaggagtggagtgagaatttcttttttatgaaaagggatataaaggcaccgagctgatgcagtatttgtaatattaagttgacctaacaaggtatttgcatgagtcacaattacaaagttttgagcggttttgtaatttgacatttaggagagtctcctatttattctcatactttacattcatgcttagtatactatagaggatgccagctttaatctttctgtcatttaaagcaatatgataagggtattcaataattgggtgccctaaatttctggatgagaaaattttcaattctggccatgagaaagaaaaaaaaataaacagccttctttttttttcctttgttttaaaactgtggttttttaaaaaagcaataattaactcagacctcactaaaaatcatttttgtttttatattgttatgtcataagctctattatgttattctaacaagtagcaatttcacaaaatttgtatgtagatgttaacgcacatttcctttgcttcttttattagactagtgttgactttggggggggacatttattcacaaatgagaagtaggcacaaagtaaaaaatggaaccatctactaacaaggatcctttaaaactgccaagggagctctaacttgaagccacatcctacagatggcagcccaaatagcacatgggcaattggcaccatctttatatggttgagtctcctgaatattttgaatgaattctcaacaaaatgtgctagccactggggacgcaaaacaagtaagatccctgttgcaagaaattcattttatagtgagggaggttggcatggagactaaaattctcaggaaaatgagatccgtgttagattagaagtcctgatgtgaaatgggaggactcaggaaggaggatcgtctttacctgaggatttctagccagaggtcccagatgcctgggctgagaacccagcgataagggggcgttcccaaagcagacacagggataagaacagaggaggcagcagcattgcacagccccaggcacagtggcagttaggatggctggagagtaggatagttctatgggttgcccaaaaaatgtgatgcgcttcatgttttctctgactcatggatctggtagagaccatagacatgatatagactaacttccccatttttcacaagaggaaaccatccttatgacttaccttaaagttttttgttctgttttgaaggaaaccatgtgcttcatgaaacctacagttgacaagagaatgtacagctaagagaaaagcttaagaggccacactattcgcggaatggctttagaggcagatgaagtggtctttgaccacagttgattgaaccagagcacttattgcttaaagaataacagagttctagagctgggggttcttgggccatgctccgtgtgtggataaggaaagaaatactgtttctgggactctcccacagtcacaaagctgttttcactgtggcccctacatctcttaacttttgctattactcctatgctgccttccggattactgctgtctatcttcttgctccactcactgaagatcctattataatcccatgaaaatgtaaattacagtttacttgggagagccagattttctctgtgctcttgagttttttattcattcaagaaaccttgggccaccgctttgtacatagcaccgtgctaggctctgggatcccaaatggacccttttaactttctgaagatgggaccgtcccctggaggaaagtcattcctgcctaatccatcgagagaaagaggcttacgaaaaactttgcctctgatgctcagccccacccccaaatagcacacaagcttgttaaccccacctcttacaaaatgtttagattctgtaggtgttaaaagcctttctggaagtattgcattctgccgtgtttataggtgttcactttcctccagagctgattaactactgacatgacttggctttctcatccagaaattatggaaacagggtctgtcagtggcaggaggccgtgctgtgttttacttggatgacacaatgcagtttacttgcctcttcatacccatgcatgctgctcaccctagacaatgacatataagccgtatatagatcaatgtccacatatatatacacacacacatatatatatataaagtgtaacaaggaacactaaaacagtgttgattcttgtctctgaagacaaataattaaaccttttttttcccaactaaagaatggatttaattaaactatgtattgaaaaaaaagtagcctaagtgttagagatggtgaatatattccattttagttaaagaacaaatttcctgaattttaagcattcagtgagctgccaattttgattttgtgttgctctttacccaaattattttttctttgtttttctttttttgggggaggaggggaaaaaagcagcaatactgtgtttggaaattatactctgtatctggttttcctgtgtatgttaaccacttaaatgttattatcctgctttggttttagagtgattgtgaggcattcaatgcaagtatacagttattttctcattaaaatccaatgtgtgttgagtttttataaa

SEQ ID NO: 103090 - DNA, 4400 bp, Homo sapiens
  Payload ID: 108
  Gene Symbol: AKAP2
  Gene Name: A kinase (PRKA) anchor protein 2
  Uniprot ID: Q9Y2D5
  ENST ID: ENST00000434623
  CDS Start-End: 103-2988
tactggaggggaagcgaggaggcggggaaggggcgggccccaggagcaggcgggcggggctccccgccctccagcgcgcccggaggctaccactccctgcagatgcgctggccccagcccggggctgccgctcgccttcccccggagtctcctggacccccggagtctcctggacccccggagcgggaggcagcggccgcgcggcgctggactggagcagaaccccaggactgcgcccccgggagcgggcgcccagagaagcctccccagctttctgaggatgatatctggctaaaaagcgagggagacaactatagtgccaccctcctggagcctgctgccagctctctttccccagatcacaaaaacatggaaattgaggtgtctgttgcagaatgtaaaagtgttcctggaatcacctctaccccacatcccatggaccatccctccgctttctattcacccccgcataatggcctccttactgatcaccacgaatccctggataatgatgttgccagagagatccgctatctagatgaggtgctagaggccaactgctgtgattctgctgtggatggaacgtacaatggaacatcctccccagagcctggtgcagtggttctggtgggcggcctaagcccccctgtccacgaggcgacccagccagaacccactgaaagaacagctagccggcaggcacctcctcacatcgagctcagtaatagcagccctgaccccatggcagaggcagaaagaacaaatggccattcccccagccagcctagagatgcgctgggggacagcctgcaggtgcctgtcagccccagctccacaaccagctcacggtgttcttcccgagatggagagttcactctcaccacactgaaaaaggaggccaagtttgagctgcgtgccttccatgaggacaagaagccctccaagctctttgaggatgacgagcatgagaaagaacaatactgcattagaaaagtgaggccttcagaggagatgctggagctggaaaaggagaggagagagctcatccgcagccaggccgtcaagaagaatcctggcattgcagcaaaatggtggaatcccccgcaggaaaaaaccatcgaggagcagctggacgaggaacatctggagtcgcacaaaaagtacaaggagcgcaaagagagaagggcacagcaggaacagttgctgctgcagaagcagttacagcagcagcagcagcagcccccatcgcagctctgcacagcccctgcctcttctcatgaacgcgcaagcatgattgacaaagcaaaggaggacattgtcacagagcagatagatttctctgctgctcgcaaacaatttcagctgatggagaattccaggcaagcggtggccaagggccagagtacacccaggctgttctccatcaagcctttctacaggcctctggggtcagtcaactcagacaagccactgactaatccgagaccaccttctgtcgggggacctccagaagacagtggtgcctcagccgccaagggacagaaatcccccggtgccctggagaccccatcggcagcaggaagccagggcaacacagcctctcaggggaaggaagggccctacagcgagccttctaaacgtgggcccttatctaaactgtgggctgaggatggagaatttacgagcgcccgggctgtcctcactgtggtcaaggatgatgaccatgggattttggatcagttctcaagatctgtcaatgtctccttgacccaagaggagcttgactctggtctggacgaattgtcggtgaggtctcaggataccacagtcctggagaccctatccaatgatttcagcatggacaacatcagtgacagcggggcatccaatgagacaaccaatgccctccaggaaaattcactggctgatttttctctgccccagacaccacaaactgacaacccctcagagggccgaggagaaggcgtctccaagtcatttagtgatcatggtttctattccccttcctccacgctgggggactctccgttggttgatgaccccttggagtatcaggctggcctcctggtgcagaatgccattcaacaagccatagccgagcaggtggataaagctgtgtccaaaaccagcagggatggagcagagcaacagggacctgaagcgactgtagaggaagctgaagctgcggctttcggctcagaaaagcctcagagcatgtttgagccacctcaggtgtcttctcctgttcaagagaaaagggatgtattaccaaagattctgcctgctgaagacagggcgctcagggaaagggggcccccccagccactgccagctgtgcagcccagtggcccgattaacatggaggagaccaggcccgaaggaagctatttcagcaagtactcggaggcagctgagctgagaagcacagcctccctcctggccactcaagaatctgacgtgatggttgggcctttcaagctgaggtccaggaaacagcggactttgtccatgattgaggaagagatccgagcagctcaggaaagggaagaggagctgaagaggcagagacaagtcttgcagagtacgcagagccccaggacaaagaatgccccatcactgccctccagaacatgctacaaaactgctccagggaaaatagagaaagtcaaacctcctccatcccccaccactgaaggccccagcttgcagcctgacttagcccctgaagaggctgccggaacccagcggcccaagaatctgatgcagaccctcatggaagactatgagacacacaaatctaaaaggcgcgagagaatggatgatagtagttacacttctaagttactgtcttgcaaggtgacttccgaggtcctcgaggccacacgggttaatcgaagaaagagcgcactggctttgcgctgggaagcagggatctatgccaaccaggaggaagaagacaacgaataaacttccttcaacccaggaagcgtctttggtgcttgggagaccaagaaaccaagaaattaacaactgaaagcattttaatggactatttattaaagtgcaaacaaactcagcaatccttatgtagaccagaagctgcaatatacaatgatgaaaatgaaacgaaaaggaagtccccccatcagactctggacacccaggaatcaaaagagaaaggacttttttggtgactcaatcccagtgtctggtttggggccaatctacaatggatccaaaaggacaaaacatgttacaagcaaatcaacatagttgctgcaggcggaactgagaccagcctctctgggcgatgaaggacaatggtggtagggccacttagagagcagtagggcccaggctggtgcagcctacatggcacaggatatttccctgcaccagtttcccacctgtcacttgcagcatcagagggtgttgcattaactccattttctccagcagccataaaatgaatggcgtttctctccatatttgcccagaagaggcagttatgattccacttctcctacatttaattatttttaattgagaacaactcatgatcacaattcataaaatccatattttaagacaatagttcttcatgtcacaaacacaatctattctacatgaggaggctgagaaaggggaagagaaaaacaaaccaaatggatgatgttagctttaggatcgtgtctgcttataatattcactgatctgcagtttatgagaacacattttcacagttatgtttcttcataggaaaactatatttagtgggcaacaactatttttatgatgggatgggggagtatatacacgtatagaatctgtacgcgttgaacaacttggttcaagatggtgggggcatttttagagcggcaataattgaaaaaaaaggcgaactctgccttggagaggtagatgataagaaataaaaaggtgtttataactattttgtattataaagtgggccttagagataggaagaagaatgatggattccttttggatcaatcagaaaggaaacacgaaagaaaagtcaggaaggtagagagagaaaaagggagggaaggagaaagaatgggaataaaataaggaggtaagagatactatttttgctgagcaaccagtgtgtttcaggatgatacaaagaaaaatatagaatagaaataagtgcaggcttggaatcagctacaaatcctaaagatggggtgtgtgtggatgtgtgtgtgtgtgtgtgtacaccattgtgtgtttgtaaaatgtgtatgttcatgagtaagggtgtgtgtgtgtgtgtattaaaattccagagtgaccgtggcacttgggtgtacaggtaattcctccagagctgtttgctggcttcaggagtggag

SEQ ID NO: 103091 - DNA, 2520 bp, Homo sapiens
  Payload ID: 108
  Gene Symbol: AKAP2
  Gene Name: A kinase (PRKA) anchor protein 2
  ENST ID: ENST00000480388
  CDS Start-End: 185-2520
aggtgtgtgcgggcaggtacaggatgcgagctcagtcctgcttcccctgaaatcctgtgacctggcagagggctgtgttcctgtgtccttacatcggatgtcctactgaagaaagggaaactgggacgaagctgtaggcacagtgggttctgaagatcagatataactgagggaaagttaggtcatgattgccacctggatgctgttctctctcttcacgaagcctccccagctttctgaggatgatatctggctaaaaagcgagggagacaactatagtgccaccctcctggagcctgctgccagctctctttccccagatcacaaaaacatggaaattgaggtgtctgttgcagaatgtaaaagtgttcctggaatcacctctaccccacatcccatggaccatccctccgctttctattcacccccgcataatggcctccttactgatcaccacgaatccctggataatgatgttgccagagagatccgctatctagatgaggtgctagaggccaactgctgtgattctgctgtggatggaacgtacaatggaacatcctccccagagcctggtgcagtggttctggtgggcggcctaagcccccctgtccacgaggcgacccagccagaacccactgaaagaacagctagccggcaggcacctcctcacatcgagctcagtaatagcagccctgaccccatggcagaggcagaaagaacaaatggccattcccccagccagcctagagatgcgctgggggacagcctgcaggtgcctgtcagccccagctccacaaccagctcacggtgttcttcccgagatggagagttcactctcaccacactgaaaaaggaggccaagtttgagctgcgtgccttccatgaggacaagaagccctccaagctctttgaggatgacgagcatgagaaagaacaatactgcattagaaaagtgaggccttcagaggagatgctggagctggaaaaggagaggagagagctcatccgcagccaggccgtcaagaagaatcctggcattgcagcaaaatggtggaatcccccgcaggaaaaaaccatcgaggagcagctggacgaggaacatctggagtcgcacaaaaagtacaaggagcgcaaagagagaagggcacagcaggaacagttgctgctgcagaagcagttacagcagcagcagcagcagcccccatcgcagctctgcacagcccctgcctcttctcatgaacgcgcaagcatgattgacaaagcaaaggaggacattgtcacagagcagatagatttctctgctgctcgcaaacaatttcagctgatggagaattccaggcaagcggtggccaagggccagagtacacccaggctgttctccatcaagcctttctacaggcctctggggtcagtcaactcagacaagccactgactaatccgagaccaccttctgtcgggggacctccagaagacagtggtgcctcagccgccaagggacagaaatcccccggtgccctggagaccccatcggcagcaggaagccagggcaacacagcctctcaggggaaggaagggccctacagcgagccttctaaacgtgggcccttatctaaactgtgggctgaggatggagaatttacgagcgcccgggctgtcctcactgtggtcaaggatgatgaccatgggattttggatcagttctcaagatctgtcaatgtctccttgacccaagaggagcttgactctggtctggacgaattgtcggtgaggtctcaggataccacagtcctggagaccctatccaatgatttcagcatggacaacatcagtgacagcggggcatccaatgagacaaccaatgccctccaggaaaattcactggctgatttttctctgccccagacaccacaaactgacaacccctcagagggccgaggagaaggcgtctccaagtcatttagtgatcatggtttctattccccttcctccacgctgggggactctccgttggttgatgaccccttggagtatcaggctggcctcctggtgcagaatgccattcaacaagccatagccgagcaggtggataaagctgtgtccaaaaccagcagggatggagcagagcaacagggacctgaagcgactgtagaggaagctgaagctgcggctttcggctcagaaaagcctcagagcatgtttgagccacctcaggtgtcttctcctgttcaagagaaaagggatgtattaccaaagattctgcctgctgaagacagggcgctcagggaaagggggcccccccagccactgccagctgtgcagcccagtggcccgattaacatggaggagaccaggcccgaaggaagctatttcagcaagtactcggaggcagctgagctgagaagcacagcctccctcctggccactcaagaatctgacgtgatggttgggcctttcaagctgaggtccaggaaacagcggactttgtccatgattgaggaagagatccgagcagctca

SEQ ID NO: 103092 - DNA, 572 bp, Homo sapiens
  Payload ID: 108
  Gene Symbol: AKAP2
  Gene Name: A kinase (PRKA) anchor protein 2
  ENST ID: ENST00000495980
  CDS Start-End: 3-167
agatgcgctggccccagcccggggctgccgctcgccttcccccggagtctcctggacccccggagtctcctggacccccggagcgggaggcagcggccgcgcggcgctggactggagcagaaccccaggactgcgcccccgggagcgggcgcccagagggaaaatagagaaagtcaaacctcctccatcccccaccactgaaggccccagcttgcagcctgacttagcccctgaagaggctgccggaacccagcggcccaagaatctgatgcagaccctcatggaagactatgagacacacaaatctaaaaggcgcgagagaatggatgatagtagtgtcctcgaggccacacgggttaatcgaagaaagagcgcactggctttgcgctgggaagcagggatctatgccaaccaggaggaagaagacaacgaataaacttccttcaacccaggaagcgtctttggtgcttgggagaccaagaaaccaagaaattaacaactgaaagcattttaatggactatttattaaagtgcaaacaaactcagcaatccttatgtagaccagaagctgc

SEQ ID NO: 103093 - DNA, 3339 bp, Homo sapiens
  Payload ID: 109
  Gene Symbol: AKAP3
  Gene Name: A kinase (PRKA) anchor protein 3
  Uniprot ID: O75969
  ENST ID: ENST00000228850
  CDS Start-End: 548-3109
gtctgcgcaagcgctaaccaagaaacgacggtttcgggtagattgttggttaagaagaaagctgggaaagtgaaggagagggggaagaaaggaagtgaaaagactttggctgttggaatctcagatctggaataggctgtataggctatttataatctctaattgccgaggaacctgaagttcagagttaaccagtgactgactcaggacatgcaaaatggcaagacccgaggtagaagagctcacctttcctgactctcagtttcctgttccctgaaaatgtaagctaagctggcagccctgtcccagcaagggggaggtacatggaaggccacaggaagaaacaagatcttgagctgagcaagaacatcccagcatcttcattgactttaaaagtatattctggagtcttccgtggttcactattccagtactacagagattccttatattacatggcaggaggggggtaaactgagggatagtgaagacaacaataaattaatcaagagctttcctcatatctcagaacctatcctctgtaagaatgtcagaaaaggttgactggttacaaagccaaaatggagtatgcaaagttgatgtctattctcctggagacaaccaagcccaggactggaaaatggacacctccacggatcctgtcagagtgctcagctggctccgcagagacctggagaagagtacagcagagttccaagatgttcggttcaaacccggagaatcatttggtggggaaacgtccaactcaggagacccacacaaaggtttctctgtagactattacaacaccaccaccaagggcactccagaaagattgcattttgagatgactcacaaagagattccttgccagggccccagggcccaacttggcaacgggagttcagtagatgaagtttccttctatgctaaccgcctcacgaatctagtcatagccatggcccgcaaagagatcaatgagaagatcgatggctctgaaaacaaatgtgtctatcagtcattgtacatggggaatgaacccacacccaccaaaagcctcagtaagatagcatcagagcttgtgaatgagaccgtctctgcatgttccaggaatgctgccccagacaaggctcctggctctggagacagagtctcgggatcatcacaaagtcccccaaatttgaaatacaagtccactttgaagatcaaggagagcaccaaagaaagacagggtccagatgacaagcctccttctaagaagtctttcttctataaggaagtgtttgaatctcgtaatggagattatgccagagagggtggaaggttctttcctcgggagagaaagaggtttcgagggcaggaaaggcctgatgactttacggcttctgttagtgaagggatcatgacctatgctaacagtgtggtatctgatatgatggtctccatcatgaagacactgaagatccaagtgaaagacacaaccattgccaccatcctactgaagaaggttctgctcaagcatgcaaaagaggtggtctcggatctcatcgactccttcttgaggaatctccacagcgtcacagggaccctcatgactgacacacagtttgtctcggctgtgaaaagaactgtcttctctcatggaagccaaaaggccacagatatcatggatgccatgctaaggaagctgtacaatgtaatgtttgccaagaaagtccctgagcatgtcaggaaagcccaagacaaggctgagagttattccctcatctccatgaaaggaatgggtgatcctaaaaaccgaaatgtgaactttgccatgaaatctgaaactaaattgagagaaaaaatgtattctgaacccaaatcagaggaggagacttgtgcgaaaactctgggtgagcacattatcaaagaggggcttaccttgtggcataaaactcagcagaaagaatgtaaatctctaggtttccagcatgcagcatttgaagctcccaacacacagcgtaagcctgcatcagacatttcctttgagtaccctgaagatattggcaacctcagccttcctccatatcctccagagaaacctgagaattttatgtatgattcagactcctgggccgaggacctgatcgtgtctgccctgcttctgattcaatatcacctggcccagggaggaagaagggatgcacggagcttcgttgaagctgctggcaccaccaactttcctgccaatgaacctcctgtagctcccgatgaatcttgccttaagtctgctcccattgtaggtgaccaagaacaagcagaaaagaaggacctaaggagtgttttctttaatttcatccggaacttacttagtgagaccattttcaagcgtgaccagagccctgaacccaaggtgccggaacagccagttaaggaagataggaagttgtgtgaaagaccgttggcgtcttctccccccaggctatatgaggatgatgagacccctggtgccctttctgggctgaccaagatggctgtcagccagatagatggccacatgagtgggcagatggtagaacatctgatgaactcagtgatgaagctgtgtgtcatcattgctaagtcctgtgatgcttcgttggcagagctgggagatgacaagtctggagatgccagtaggctaacttcggccttcccagatagtttatatgagtgcttaccagccaagggcacagggtcagcagaagctgtcctgcagaatgcctatcaagctatccataatgaaatgagaggcacatcaggacagccccctgaagggtgtgcagcacccacggtgattgtcagcaatcacaacctaacggacacagttcagaacaagcaactccaagccgtccttcaatgggtagctgcctctgagctcaatgtccctattttgtattttgctggtgatgatgaagggatccaggagaagctacttcagctctcagctgctgctgtggacaaaggatgcagtgtgggcgaggttctgcagtcggtgctgcgctatgagaaggagcgccagctgaatgaggcggtggggaatgtcacaccgctgcagctgctggactggctgatggtgaacctgtaatcggcaaccccactgctttcccctcttctggcagtggggccggcccttatccccgcccttctttctcacttccacatctccccctctatatcctcacagagccctaacattatcttcacaccactctcatcaaagacatgtcatcttgtgctagccactggattttgcagattttcctgtccatgcaagcaaggacgtaaaattaaaaaattacaattaaagggctccac

SEQ ID NO: 103094 - DNA, 528 bp, Homo sapiens
  Payload ID: 109
  Gene Symbol: AKAP3
  Gene Name: A kinase (PRKA) anchor protein 3
  ENST ID: ENST00000536414
  CDS Start-End: 239-528
aagaaacaagatcttgagctgagcaagaacatcccagcatcttcattgactttaaaagtatattctggagtcttccgtggttcactattccagtactacagagtcatttttatctgtgtctttccattgcagattccttatattacatggcaggaggggggtaaactgagggatagtgaagacaacaataaattaatcaagagctttcctcatatctcagaacctatcctctgtaagaatgtcagaaaaggttgactggttacaaagccaaaatggagtatgcaaagttgatgtctattctcctggagacaaccaagcccaggactggaaaatggacacctccacggatcctgtcagagtgctcagctggctccgcagagacctggagaagagtacagcagagttccaagatgttcggttcaaacccggagaatcatttggtggggaaacgtccaactcaggagacccacacaaaggtttctctgtagactattacaacaccaccaccaagggcactccagaaagatt

SEQ ID NO: 103095 - DNA, 3318 bp, Homo sapiens
  Payload ID: 109
  Gene Symbol: AKAP3
  Gene Name: A kinase (PRKA) anchor protein 3
  Uniprot ID: O75969
  ENST ID: ENST00000545990
  CDS Start-End: 526-3087
gtctgcgcaagcgctaaccaagaaacgacggtttcgggtagattgttggttaagaagaaagctgggaaagtgaaggagagggggaagaaaggaagtgaaaagactttggctgttggaatctcagatctggaataggctgtataggctatttataatctctaattgccgaggaacctgaagttcagagttaaccagtgactgactcaggacatgcaaaatggcaagacccgaggtagaagagctcacctttcctgactctcagtttcctgttccctgaaaattcccagcaagggggaggtacatggaaggccacaggaagaaacaagatcttgagctgagcaagaacatcccagcatcttcattgactttaaaagtatattctggagtcttccgtggttcactattccagtactacagagattccttatattacatggcaggaggggggtaaactgagggatagtgaagacaacaataaattaatcaagagctttcctcatatctcagaacctatcctctgtaagaatgtcagaaaaggttgactggttacaaagccaaaatggagtatgcaaagttgatgtctattctcctggagacaaccaagcccaggactggaaaatggacacctccacggatcctgtcagagtgctcagctggctccgcagagacctggagaagagtacagcagagttccaagatgttcggttcaaacccggagaatcatttggtggggaaacgtccaactcaggagacccacacaaaggtttctctgtagactattacaacaccaccaccaagggcactccagaaagattgcattttgagatgactcacaaagagattccttgccagggccccagggcccaacttggcaacgggagttcagtagatgaagtttccttctatgctaaccgcctcacgaatctagtcatagccatggcccgcaaagagatcaatgagaagatcgatggctctgaaaacaaatgtgtctatcagtcattgtacatggggaatgaacccacacccaccaaaagcctcagtaagatagcatcagagcttgtgaatgagaccgtctctgcatgttccaggaatgctgccccagacaaggctcctggctctggagacagagtctcgggatcatcacaaagtcccccaaatttgaaatacaagtccactttgaagatcaaggagagcaccaaagaaagacagggtccagatgacaagcctccttctaagaagtctttcttctataaggaagtgtttgaatctcgtaatggagattatgccagagagggtggaaggttctttcctcgggagagaaagaggtttcgagggcaggaaaggcctgatgactttacggcttctgttagtgaagggatcatgacctatgctaacagtgtggtatctgatatgatggtctccatcatgaagacactgaagatccaagtgaaagacacaaccattgccaccatcctactgaagaaggttctgctcaagcatgcaaaagaggtggtctcggatctcatcgactccttcttgaggaatctccacagcgtcacagggaccctcatgactgacacacagtttgtctcggctgtgaaaagaactgtcttctctcatggaagccaaaaggccacagatatcatggatgccatgctaaggaagctgtacaatgtaatgtttgccaagaaagtccctgagcatgtcaggaaagcccaagacaaggctgagagttattccctcatctccatgaaaggaatgggtgatcctaaaaaccgaaatgtgaactttgccatgaaatctgaaactaaattgagagaaaaaatgtattctgaacccaaatcagaggaggagacttgtgcgaaaactctgggtgagcacattatcaaagaggggcttaccttgtggcataaaactcagcagaaagaatgtaaatctctaggtttccagcatgcagcatttgaagctcccaacacacagcgtaagcctgcatcagacatttcctttgagtaccctgaagatattggcaacctcagccttcctccatatcctccagagaaacctgagaattttatgtatgattcagactcctgggccgaggacctgatcgtgtctgccctgcttctgattcaatatcacctggcccagggaggaagaagggatgcacggagcttcgttgaagctgctggcaccaccaactttcctgccaatgaacctcctgtagctcccgatgaatcttgccttaagtctgctcccattgtaggtgaccaagaacaagcagaaaagaaggacctaaggagtgttttctttaatttcatccggaacttacttagtgagaccattttcaagcgtgaccagagccctgaacccaaggtgccggaacagccagttaaggaagataggaagttgtgtgaaagaccgttggcgtcttctccccccaggctatatgaggatgatgagacccctggtgccctttctgggctgaccaagatggctgtcagccagatagatggccacatgagtgggcagatggtagaacatctgatgaactcagtgatgaagctgtgtgtcatcattgctaagtcctgtgatgcttcgttggcagagctgggagatgacaagtctggagatgccagtaggctaacttcggccttcccagatagtttatatgagtgcttaccagccaagggcacagggtcagcagaagctgtcctgcagaatgcctatcaagctatccataatgaaatgagaggcacatcaggacagccccctgaagggtgtgcagcacccacggtgattgtcagcaatcacaacctaacggacacagttcagaacaagcaactccaagccgtccttcaatgggtagctgcctctgagctcaatgtccctattttgtattttgctggtgatgatgaagggatccaggagaagctacttcagctctcagctgctgctgtggacaaaggatgcagtgtgggcgaggttctgcagtcggtgctgcgctatgagaaggagcgccagctgaatgaggcggtggggaatgtcacaccgctgcagctgctggactggctgatggtgaacctgtaatcggcaaccccactgctttcccctcttctggcagtggggccggcccttatccccgcccttctttctcacttccacatctccccctctatatcctcacagagccctaacattatcttcacaccactctcatcaaagacatgtcatcttgtgctagccactggattttgcagattttcctgtccatgcaagcaaggacgtaaaattaaaaaattacaattaaagggctccaca

SEQ ID NO: 103096 - DNA, 631 bp, Homo sapiens
  Payload ID: 109
  Gene Symbol: AKAP3
  Gene Name: A kinase (PRKA) anchor protein 3
  ENST ID: ENST00000540967
  CDS Start-End: 147-631
ctctccagtcccagcaagggggaggtacatggaaggccacaggaagaaacaagatcttgagctgagcaagaacatcccagcatcttcattgactttaaaagtatattctggagtcttccgtggttcactattccagtactacagagatgtcagaaaaggttgactggttacaaagccaaaatggagtatgcaaagttgatgtctattctcctggagacaaccaagcccaggactggaaaatggacacctccacggatcctgtcagagtgctcagctggctccgcagagacctggagaagagtacagcagagttccaagatgttcggttcaaacccggagaatcatttggtggggaaacgtccaactcaggagacccacacaaaggtttctctgtagactattacaacaccaccaccaagggcactccagaaagattgcattttgagatgactcacaaagagattccttgccagggccccagggcccaacttggcaacgggagttcagtagatgaagtttccttctatgctaaccgcctcacgaatctagtcatagccatggcccgcaaagagatcaatgagaagatcgatggctctgaaaacaaatgtgtctatcagtcattgtacatggg

SEQ ID NO: 103097 - DNA, 2881 bp, Homo sapiens
  Payload ID: 110
  Gene Symbol: AKAP4
  Gene Name: A kinase (PRKA) anchor protein 4
  Uniprot ID: Q5JQC9
  ENST ID: ENST00000358526
  CDS Start-End: 125-2689
ccagctggcagtcaaggctgtaggagggcatggagagttgaagaaaaaagcagtatcttgaggcagactggaagagtcatcacagcatccaaatcaacaagaaaacatcattccagggtcctacatgatggcgtactctgatactacaatgatgtctgatgatattgactggttacgcagccacaggggtgtgtgcaaggtagatctctacaacccagaaggacagcaagatcaggaccggaaagtgatatgctttgtcgatgtgtccaccctgaatgtagaagataaagattacaaggatgctgctagttccagctcagaaggcaacttaaacctgggaagtctggaagaaaaagagattatcgtgatcaaggacactgagaagaaagaccagtctaagacagagggatctgtatgccttttcaaacaagctccctctgatcctgtaagtgtcctcaactggcttctcagtgatctccagaagtatgccttgggtttccaacatgcactgagcccctcaacctctacctgtaaacataaagtaggagacacagagggcgaatatcacagagcatcctctgagaactgctacagtgtctatgccgatcaagtgaacatagattatttgatgaacagacctcaaaacctacgtctagaaatgacagcagctaaaaacaccaacaataatcaaagtccttcagctcctccagccaaacctcctagcactcagagagcagtcatttcccctgatggagaatgttctatagatgacctttccttctacgtcaaccgactatcttctctggtaatccagatggcccataaggaaatcaaggagaagttggaaggtaaaagcaaatgccttcatcattcaatctgtccatcccctgggaacaaagagagaatcagtccccgaactcctgcgagcaagattgcttctgaaatggcctatgaagctgtggaactgacagctgcagaaatgcgtggcactggagaggagtccagggaaggtggccagaaaagctttctatatagcgaattatccaacaagagcaaaagtggagacaaacagatgtcccagagagagagcaaagaatttgcagattccatcagcaaggggctcatggtttatgcaaatcaggtggcatctgacatgatggtctctctcatgaagaccttgaaagtgcacagctctgggaagccaattccagcatctgtggtcctgaagagggtgttgctaaggcacaccaaggagattgtgtccgatttgattgattcttgcatgaagaacctgcataatattactggggtcctgatgactgactcagactttgtctcagctgtcaagagaaatctgttcaaccagtggaaacaaaatgctacagacatcatggaggccatgctgaagcgcttggtcagtgcccttataggtgaggagaaggagactaagtctcagagtctgtcatatgcatctttaaaagctgggtcccatgatcccaaatgcaggaatcagagtcttgaattctccaccatgaaagctgaaatgaaagagagggacaaaggcaaaatgaaatcagacccatgcaagtcactgactagtgctgagaaagtcggtgaacacattctcaaagagggcctaaccatctggaaccaaaagcaaggaaactcatgcaaggtggctaccaaagcatgcagcaataaagatgagaaaggagaaaagatcaatgcttccacagattcactggccaaggacctgattgtctctgcccttaagctgatccagtaccatctgacccagcagactaagggcaaagatacatgtgaagaagactgtcctggttccaccatgggctatatggctcagagtactcaatatgaaaagtgtggaggtggccaaagtgccaaagcactttcagtgaaacaactagaatctcacagagcccctggaccatccacctgtcaaaaggagaaccaacacctggactcccagaaaatggatatgtcaaacatcgttctaatgctgattcagaaactgcttaatgagaaccccttcaaatgtgaggatccatgcgaaggtgagaacaagtgttctgagcccagggcaagcaaagcagcttccatgtccaacagatctgacaaagcggaagaacaatgccaggagcatcaagaacttgactgtaccagtgggatgaagcaagcgaacgggcaatttatagataaactagtagaatctgtgatgaagctctgccttatcatggctaagtatagcaacgatggggcagcccttgctgagttggaagaacaagcagcctcggcaaataagcccaatttcaggggcaccagatgcattcacagtggtgcaatgccacagaactatcaagactctcttggacatgaagtaattgtcaataatcagtgctctacaaatagcttgcagaagcagctccaggctgtcctgcagtggattgcagcctcccagtttaacgtgcccatgctctacttcatgggagataaggatggacaactggaaaagcttcctcaggtttcagctaaagcagcagagaaggggtacagtgtaggaggtcttcttcaagaggtcatgaagtttgccaaggaacggcaaccagatgaagctgtgggaaaggtggccaggaaacagttgctggactggctgctcgctaacctgtgagctgatccttgactcctcttcatcttagcccccctagcagcattccatcccagccagagcacccccaccatcaggccagtcaactgcacaatacacaactgtatttcccaatacacttgagcagttgcctgtgaatgtaagaggtgtcaacaaactgggaaataaaataaaaaaaaataataataaatgtgt

SEQ ID NO: 103098 - DNA, 2864 bp, Homo sapiens
  Payload ID: 110
  Gene Symbol: AKAP4
  Gene Name: A kinase (PRKA) anchor protein 4
  Uniprot ID: Q5JQC9
  ENST ID: ENST00000376064
  CDS Start-End: 144-2681
agtctggtccaacagctgacaggggtggcagccaactgcaggtgcccaagaacttggcacttctcagttccatctaaaggggcacatctcccttctgggtgtcacgttttcagccaaacatctaaaagaacttcatcatcaagatgtctgatgatattgactggttacgcagccacaggggtgtgtgcaaggtagatctctacaacccagaaggacagcaagatcaggaccggaaagtgatatgctttgtcgatgtgtccaccctgaatgtagaagataaagattacaaggatgctgctagttccagctcagaaggcaacttaaacctgggaagtctggaagaaaaagagattatcgtgatcaaggacactgagaagaaagaccagtctaagacagagggatctgtatgccttttcaaacaagctccctctgatcctgtaagtgtcctcaactggcttctcagtgatctccagaagtatgccttgggtttccaacatgcactgagcccctcaacctctacctgtaaacataaagtaggagacacagagggcgaatatcacagagcatcctctgagaactgctacagtgtctatgccgatcaagtgaacatagattatttgatgaacagacctcaaaacctacgtctagaaatgacagcagctaaaaacaccaacaataatcaaagtccttcagctcctccagccaaacctcctagcactcagagagcagtcatttcccctgatggagaatgttctatagatgacctttccttctacgtcaaccgactatcttctctggtaatccagatggcccataaggaaatcaaggagaagttggaaggtaaaagcaaatgccttcatcattcaatctgtccatcccctgggaacaaagagagaatcagtccccgaactcctgcgagcaagattgcttctgaaatggcctatgaagctgtggaactgacagctgcagaaatgcgtggcactggagaggagtccagggaaggtggccagaaaagctttctatatagcgaattatccaacaagagcaaaagtggagacaaacagatgtcccagagagagagcaaagaatttgcagattccatcagcaaggggctcatggtttatgcaaatcaggtggcatctgacatgatggtctctctcatgaagaccttgaaagtgcacagctctgggaagccaattccagcatctgtggtcctgaagagggtgttgctaaggcacaccaaggagattgtgtccgatttgattgattcttgcatgaagaacctgcataatattactggggtcctgatgactgactcagactttgtctcagctgtcaagagaaatctgttcaaccagtggaaacaaaatgctacagacatcatggaggccatgctgaagcgcttggtcagtgcccttataggtgaggagaaggagactaagtctcagagtctgtcatatgcatctttaaaagctgggtcccatgatcccaaatgcaggaatcagagtcttgaattctccaccatgaaagctgaaatgaaagagagggacaaaggcaaaatgaaatcagacccatgcaagtcactgactagtgctgagaaagtcggtgaacacattctcaaagagggcctaaccatctggaaccaaaagcaaggaaactcatgcaaggtggctaccaaagcatgcagcaataaagatgagaaaggagaaaagatcaatgcttccacagattcactggccaaggacctgattgtctctgcccttaagctgatccagtaccatctgacccagcagactaagggcaaagatacatgtgaagaagactgtcctggttccaccatgggctatatggctcagagtactcaatatgaaaagtgtggaggtggccaaagtgccaaagcactttcagtgaaacaactagaatctcacagagcccctggaccatccacctgtcaaaaggagaaccaacacctggactcccagaaaatggatatgtcaaacatcgttctaatgctgattcagaaactgcttaatgagaaccccttcaaatgtgaggatccatgcgaaggtgagaacaagtgttctgagcccagggcaagcaaagcagcttccatgtccaacagatctgacaaagcggaagaacaatgccaggagcatcaagaacttgactgtaccagtgggatgaagcaagcgaacgggcaatttatagataaactagtagaatctgtgatgaagctctgccttatcatggctaagtatagcaacgatggggcagcccttgctgagttggaagaacaagcagcctcggcaaataagcccaatttcaggggcaccagatgcattcacagtggtgcaatgccacagaactatcaagactctcttggacatgaagtaattgtcaataatcagtgctctacaaatagcttgcagaagcagctccaggctgtcctgcagtggattgcagcctcccagtttaacgtgcccatgctctacttcatgggagataaggatggacaactggaaaagcttcctcaggtttcagctaaagcagcagagaaggggtacagtgtaggaggtcttcttcaagaggtcatgaagtttgccaaggaacggcaaccagatgaagctgtgggaaaggtggccaggaaacagttgctggactggctgctcgctaacctgtgagctgatccttgactcctcttcatcttagcccccctagcagcattccatcccagccagagcacccccaccatcaggccagtcaactgcacaatacacaactgtatttcccaatacacttgagcagttgcctgtgaatgtaagaggtgtcaacaaactgggaaataaaataaaaaaaaataataa

SEQ ID NO: 103099 - DNA, 783 bp, Homo sapiens
  Payload ID: 110
  Gene Symbol: AKAP4
  Gene Name: A kinase (PRKA) anchor protein 4
  ENST ID: ENST00000448865
  CDS Start-End: 144-783
agtctggtccaacagctgacaggggtggcagccaactgcaggtgcccaagaacttggcacttctcagttccatctaaaggggcacatctcccttctgggtgtcacgttttcagccaaacatctaaaagaacttcatcatcaagatgtctgatgatattgactggttacgcagccacaggggtgtgtgcaaggtagatctctacaacccagaaggacagcaagatcaggaccggaaagtgatatgctttgtcgatgtgtccaccctgaatgtagaagataaagattacaaggatgctgctagttccagctcagaaggcaacttaaacctgggaagtctggaagaaaaagagattatcgtgatcaaggacactgagaagaaagaccagtctaagacagagggatctgtatgccttttcaaacaagctccctctgatcctgtaagtgtcctcaactggcttctcagtgatctccagaagtatgccttgggtttccaacatgcactgagcccctcaacctctacctgtaaacataaagtaggagacacagagggcgaatatcacagagcatcctctgagaactgctacagtgtctatgccgatcaagtgaacatagattatttgatgaacagacctcaaaacctacgtctagaaatgacagcagctaaaaacaccaacaataatcaaaatacatgtgaagaagactgtcctggttccaccatgggctatatggctcagagtactcaatatgaaaagtgtggaggtggccaaagtgccaaagcacttt

SEQ ID NO: 103100 - DNA, 892 bp, Homo sapiens
  Payload ID: 110
  Gene Symbol: AKAP4
  Gene Name: A kinase (PRKA) anchor protein 4
  ENST ID: ENST00000437370
  CDS Start-End: 130-892
gctgacaggggtggcagccaactgcaggtgcccaagaacttggcacttctcagttccatctaaaggggcacatctcccttctgggtgtcacgttttcagccaaacatctaaaagaacttcatcatcaagatgtctgatgatattgactggttacgcagccacaggggtgtgtgcaaggtagatctctacaacccagaaggacagcaagatcaggaccggaaagtgatatgctttgtcgatgtgtccaccctgaatgtagaagataaagattacaaggatgctgctagttccagctcagaaggcaacttaaacctgggaagtctggaagaaaaagagattatcgtgatcaaggacactgagaagaaagaccagtctaagacagagggatctgtatgccttttcaaacaagctccctctgatcctgtaagtgtcctcaactggcttctcagtgatctccagaagtatgccttgggtttccaacatgcactgagcccctcaacctctacctgtaaacataaagtaggagacacagagggcgaatatcacagagcatcctctgagaactgctacagtgtctatgccgatcaagtgaacatagattatttgatgaacagacctcaaaacctacgtctagaaatgacagcagctaaaaacaccaacaataatcaaagtccttcagctcctccagccaaacctcctagcactcagagagcagtcatttcccctgatggagaatgttctatagatgacctttccttctacgtcaaccgactatcttctctggtaatccagatggcccataaggaaatcaaggagaagttggaaggtaaaagcaaatgccttcatcattcaatctgtccatcccctgggaacaaagagagaatcagtcccc

SEQ ID NO: 103101 - DNA, 2601 bp, Homo sapiens
  Payload ID: 111
  Gene Symbol: AKAP5
  Gene Name: A kinase (PRKA) anchor protein 5
  Uniprot ID: P24588
  ENST ID: ENST00000320636
  CDS Start-End: 1289-2572
tttttttactaatgaaacactgcagattagtatccccaaacaattcattttctgacgaaactcttaaagcccagtttcagaacataagctttaagcaacaagcaatcttgtgttaatctgagctctgttacagctctgccgtaatctcagccaaattgcttcatctgtacgtggtgataccaccatctttgtaatattgtggtgaggattagagatgtatgtaaaagtgcatgcactgcctaatacccaagaattgctcaataaatgtcagctattactactcttactgacttccaactatgtgcagattatggtggaaacatgtgatacagcagatacagtacttaaatgaaaatgtcaaaattgtacaactaatttaagagtgggaaatgacagtaatgctaaattttcctaagaatatgtatgaaaaatagcacttccttgatggaacatacatttttagaacagaaaccttatgttataatggtaaaactagagagtcaaagtctctagttctaactctggctatgaccttatctagttgcatggcttttgacaagacaactgctcccctctggagttcagttttgtcatctggctggatttgagtaatctcaaataatctctaaagtcctttgcagctttaaaattatctattgagtgtgataaagattacatcagcttgcttttcatcctgcacttcatttttggttcttgttgtttgcttaacttgcactttagagtcataagcaattcacacagacaacacaactaaagaactgataatatcagacttgcagggtaatccaaaatgaagtttcaacaaggaggataaaacaaaatagaatcacactgaactctttaatagggccaaagtaaaccccaatgtttattctccagtcatttcattaagttattatatggaaaatatgcctggtagaatcttatacattcactgaaatagtctccacagaaaataataggctcatagtgaaataaaataccactttcttttctctcatcaggttgatctttaaataaagcaaaaatttatccaaagaagggctttcatcaagaaattaaagagagaaattacaagccatagagaaactgggcatttctatactagagaaaccacctaaaacaactgtatggagtaagatgaaaggtatgaatatgcctggaagaaattttacctagtgtgacatttttgctcatctttttgtcacaaaaggctgctaaggaagagagaatacagttttctagagaataagagtgcagtgtaaaaatggaaaccacaatttcagaaattcatgtagaaaacaaggatgagaagagatcagcagaaggtagtcctggggctgaaaggcagaaggaaaaggcatccatgctttgcttcaagagaagaaagaaagcagccaaagcactgaagcccaaagctggctctgaagctgctgatgtggcaaggaagtgtccacaagaagcaggagcttctgatcagccagagcccacacggggggcctgggcctcactcaaacgtcttgtaacacgcaggaaaaggtcagagtcttcaaagcagcaaaagccattggagggtgaaatgcaacctgcaataaatgctgaggatgctgatctttctaagaaaaaggcaaaatctagacttaagattccctgcataaaattcccaagagggccaaaaaggagtaatcattccaaaattatagaagactcagactgcagcatcaaagtccaggaagaagctgaaattttggatatacaaacacagaccccattgaatgatcaggcaacaaaggctaagtcaacccaggatctaagtgaaggcatctcacggaaagatggtgatgaggtctgtgaatcaaatgtgagcaatagcacaacttctggagagaaagtgatttcagtagaacttggattagataatgggcattctgctattcaaacgggaactctaatccttgaagaaattgaaacgatcaaggaaaaacaagatgttcaaccccagcaagcaagcccacttgaaacttcagaaacagaccatcagcagccagtactttctgatgttcctcctttacctgcaattccagatcaacaaattgtggaagaagccagtaacagtaccctagaaagtgcaccaaatggaaaagactatgaaagtacagagattgtagctgaagaaactaagccaaaagatactgaattgagccaagaatcagattttaaagaaaatgggatcactgaagagaaatccaaatcagaagaaagcaaaagaatggagccaattgctattattattacagacactgaaatcagtgaatttgatgttacaaaatctaaaaatgtccctaagcaattcttaatttcagctgaaaatgagcaagtaggggtttttgctaatgataatggttttgaggatagaacttcagaacaatatgaaacactcttaattgaaacagcctcttctctagtcaagaatgctattcagttgtcaatagaacagctggttaatgaaatggcctctgatgataataaaataaacaatcttctacagtgacttactctccagagtcacggcagaaaaaa

SEQ ID NO: 103102 - DNA, 6487 bp, Homo sapiens
  Payload ID: 111
  Gene Symbol: AKAP5
  Gene Name: A kinase (PRKA) anchor protein 5
  Uniprot ID: P24588
  ENST ID: ENST00000394718
  CDS Start-End: 379-1662
gcagagggcgccttgctccgggtgcgaccgcggctccctggaggcctgggcggcgggccccgcgagcgcgccgccacctcgggagcagtgttggccaaggaccccgacgccctacgttgatctttaaataaagcaaaaatttatccaaagaagggctttcatcaagaaattaaagagagaaattacaagccatagagaaactgggcatttctatactagagaaaccacctaaaacaactgtatggagtaagatgaaaggtatgaatatgcctggaagaaattttacctagtgtgacatttttgctcatctttttgtcacaaaaggctgctaaggaagagagaatacagttttctagagaataagagtgcagtgtaaaaatggaaaccacaatttcagaaattcatgtagaaaacaaggatgagaagagatcagcagaaggtagtcctggggctgaaaggcagaaggaaaaggcatccatgctttgcttcaagagaagaaagaaagcagccaaagcactgaagcccaaagctggctctgaagctgctgatgtggcaaggaagtgtccacaagaagcaggagcttctgatcagccagagcccacacggggggcctgggcctcactcaaacgtcttgtaacacgcaggaaaaggtcagagtcttcaaagcagcaaaagccattggagggtgaaatgcaacctgcaataaatgctgaggatgctgatctttctaagaaaaaggcaaaatctagacttaagattccctgcataaaattcccaagagggccaaaaaggagtaatcattccaaaattatagaagactcagactgcagcatcaaagtccaggaagaagctgaaattttggatatacaaacacagaccccattgaatgatcaggcaacaaaggctaagtcaacccaggatctaagtgaaggcatctcacggaaagatggtgatgaggtctgtgaatcaaatgtgagcaatagcacaacttctggagagaaagtgatttcagtagaacttggattagataatgggcattctgctattcaaacgggaactctaatccttgaagaaattgaaacgatcaaggaaaaacaagatgttcaaccccagcaagcaagcccacttgaaacttcagaaacagaccatcagcagccagtactttctgatgttcctcctttacctgcaattccagatcaacaaattgtggaagaagccagtaacagtaccctagaaagtgcaccaaatggaaaagactatgaaagtacagagattgtagctgaagaaactaagccaaaagatactgaattgagccaagaatcagattttaaagaaaatgggatcactgaagagaaatccaaatcagaagaaagcaaaagaatggagccaattgctattattattacagacactgaaatcagtgaatttgatgttacaaaatctaaaaatgtccctaagcaattcttaatttcagctgaaaatgagcaagtaggggtttttgctaatgataatggttttgaggatagaacttcagaacaatatgaaacactcttaattgaaacagcctcttctctagtcaagaatgctattcagttgtcaatagaacagctggttaatgaaatggcctctgatgataataaaataaacaatcttctacagtgacttactctccagagtcacggcagaaaaaacaagcttaatgaagaattcttttatacatttgtggcatttcttactcagtaacaaatgagagatttatcatctctagaacttaaaaggtacaattccagcgcagaagtgctaaagattaagtcaagtttataaaactctaccactgaaatgcagtcacttctggattggaggaagtcagcacagattgcagtgtaaaatgacataacatacagggagttgctaaaatggcatatggagattggagtgctttgggggaggaaggtgtatttattgagcacttatggtatgccataagctttttaatgacctctgatataacaaagtctggtttccttttgataattcagctctgtgtataggctaacatcacattaagtttttaaaaacttattttttacagtgcacatatatgtttaaaatggtgaataaggtgagctacttttgtgaatgtgatttgtaattgttacattcctaagcagcaggcttaactcaaaaaatacattgcattttcccaatttcagcagatagtgtgcagaatatgcatattgatattaaacgtgagtggtttcctagtcttaagtctcttataagcgctatttggccaggggcagtggctcacgcctataatcccagcactttgggaggccaaggcgggtggatcagctaaggtcaggagttcgagaccagcctggccaatgtggtgaaaccccatctctactgaaaatacaaaaattagctgggcgtggtggtgcacgcctgtaatcccagctacttgggaggctgaggcaggagaattgcttgaacccgagaggtggaggttgcagggagccaagattgcaccactgcactccagtctgggcaacagagcgagactccttctcaaaaaaaaaaaaaaaaaaaaagagaaccattcacaaatccttcaatcaggcaaattgttactaagtgcaaaagtgtagaaacagggagagtgggtttttcccccgcttttctttctgcctcaacagatctgtatatatccatttctgcatggatttatctgtgaaaagttaaaaaatgaaacagcaaaaacaaaacaaggggaatattattcttcatccaggagaagggaaaattcccaagtaaattatcacagataatataggattcatcttgcagaattacttctttaagagccatattcatcaacttctctccaaagaggggagagtagattcaaagccagcctggtagtaatggtcctggaaaatcctaataatctagtgcaaatatttattctcggccaaaaatgagccatgaatgtgggtgaatagaaaagtgaaaagttattgctaaagcacattataatttaaatgtcagtattccttcatgtctgtgtgttgagaccagtaaaaagcattttacatgaatattgaaagttaactttttcatcactattttcttttcttttttttttttttttgagatggagtctcactctgtcgcccaggctggagtgcagtggcgcgatcttggctcactgcaagctccacctcctgggttcacaccattcttctgcctcagcctcccaagtagctgggactacaggcgcccactacaacgctcggctaattttttgtatttttagtagagatggggtttcaccgtgttagccaggatggtcttgatctcctgacctcatgatcctcccgcctcggcctcctaaagtgctgggattacaggcatgagccaccgcacccggccttcatcactattttcaatccagatatactttacaaaaatgagaagggcttatttgcatttttatttacatattgaaagggaagcatctgatctcatcaatgattgccatattttttgaaaaagtaatcctatttcaatctttccttgtgtgaaatggccataataccagagtgcacttccctacctcacaggttaggattcaaagtgtgtattcccccattgtgtaaattgagtgattgtgttactacttgaaacagatgaagtaataaagatgaagtatgagatgtaaggtatttgttcaagagctccacttggaggaaataatgcacattagatgattttaaatgatctgggtgaattcttgcattgtgtatggattgcatatagaaagtatttgctactttgtcctacagaatcatcttcatttctttctgtaaatacatattgagacctctaacaaaagaaactaatctgacttggaaattgaaccaaatcatggatattattagcaagattctttgctgaagtgcaaaaatatttcccccagattttcctaccttcatgcttataatccggggaggagggtggaaatcctgagcaagatgaaaagtgtcattcaaaacacatgacccaagaagtcaatttcttttaattgtacaacttttaaacattaaaaacaaaaaagacgagtcatcttctctgaaaacactctttaactcactatatgtggtgctaatggacttggacagctaccagctatcatatttaaaagtgaaccattttaaaaacctgactaaggttggtgcattttacagtgtattgaagaatcctgccctcatttactgcaaggatgcctccaagccaatacacttgcattgtaaatgtttagtaatctcatgaacaagcaaaaagtatagtacttagcagttattggaaatattttgggggatttttaaaaaaacagataaatggtaaatatgtgcaatgaattttttggttaagaaagtaaaattttatctaatactaggtttttacttttttcactgtggtttgatatatatttttggttagaatgtactgattgtttttatgataagatgtatattttacttgcattcattcttaagaggtttctgtttttctattgagaatatctgttgaattaagtaggatttcagttagaaaaaggaattccgaaattaactggtctcaatctgattatatgtgctacatggccaaatcctattacagtgaattctaaggtgattcaaattgttttattgttatagaaatatgcagaaatcagatggcttcagagtcataaaatatttttcttgtaatagtatttaagcaatttgaccttatatgcaaacgttaagtgaatataaataagttctgtttcaattcatgtccatttaacaacattaaaataattattaggaacaccacatgaattttctttacatttgctgtggtataaattctgcttttaatgaatgtttatttatttattagccaaaattcagtttctctttgaacccagaattttgcaaagctgggggttggggagggggattattagctacttgttaactttttcagcatattatcattcctcttttaagactcaagtattattcactttgcttcttacaacccagagaatgtgaaaattctcctctattttatgtagcactattcacttaacattttttcaaagcactttataggatataaaaatagtacccggtaacatttaagtaaaggtagcagaaaacaaaagaactttcaaacagaaattatgttccctgccacctcctccacctcaaagaataataagcatgtggcataaatggagttgttcagaaaagctgtctgcataattttccttcaaggtaatgtatttgacagcatgaagtttgtgatgatcttacttggtctactactcagcggagtcttagaatctcttttatttacttctgagagattgttatttcaccagtatatgtgaacaggcttgctaaaggcattaaagatatggatcatggaggcaccaaatttggcttctgtatgcaatccagcattaacttcatccatacatttctaacttcatccataaatttctaacttcaagttaccttattttttatagttaagaatgtttttcgaggtttacaacagaatttaaaaaataattgttaggctttagaatcccactgtttgaaaagatccttttaatgtcaactttattgaaatatgtagtctactttctaatttcatctgataatatagcaggatttgatttttctgcctgccatttgtgcatttaaaaaaaaatcctcatttaagatttagagttctttaggttcaaattcctatgatgttttattgggtaacatgaactctcttatacataattcaaaatttcaatccatggtatattttatggtacattttgaaaagaaaatttgtaatgctccttagttacaaaaattagaaggaagctacataaaattcaggtgtcctaattaaattcaatttgattcaacacacgtattaggcataactcatacctaacactatttgataagggagacaggctccctgccatccaagaactcaacctagggagcagtgacaacagaaaccgggttgggttaaggcaaagagccatggataatgctgcaacatgagtggcacagaggggagtacacagagagagcaattaatttggtgtggggaaggtggtgatctgaatacagcagcagtttgaaagtgttccgtttttaaataaacagtatgcttattttgatttgtgactaggtgtagaaaaaagcctgcatagtgttacatatttatagtagttctttgtaaaaatgttaagtggatgagctattatgaaagtaaaagtttcattttttctcattaaaattagtactaaattactatggatcagatgataatattaaatagtactctgtagaaaaaaggtttcaagttgaattaatttatgtactgattattaatacagaataaatgttatattgactca

SEQ ID NO: 103103 - DNA, 15006 bp, Homo sapiens
  Payload ID: 112
  Gene Symbol: AKAP6
  Gene Name: A kinase (PRKA) anchor protein 6
  Uniprot ID: Q13023
  ENST ID: ENST00000280979
  CDS Start-End: 171-7130
agtctttcccataatgagctgcatcatctgaactgatgtcacagcatcatgcagcaggtcaaacaaggcatctcctagtattgcatcctacagatgtgctgtaaacatcaaaagaagacggtgggatcaggagatgctgttttggaaagaagtgaggtttagacttctccatgttaaccatgagcgtgacactttcccccctgaggtcacaggacctggatcccatggctactgatgcttcacccatggccatcaacatgacacccactgtggagcagggtgagggagaagaggcaatgaaggacatggactctgaccagcagtatgaaaagccacccccactacacacaggggctgactggaagattgtcctccacttacctgaaattgagacctggctccggatgacctcagagagggtccgagacctaacctattcagtccagcaggattcggacagcaagcatgtggatgtacatctagttcaactaaaggacatttgtgaagatatttctgatcatgttgagcaaatccatgccctccttgaaacagagttctccctaaagctgctgtcttactctgtcaacgtgatagtggacatccacgcagtgcagctcctctggcaccagcttcgagtctcagtgctggttctgcgggagcgcattctgcaaggtctgcaggacgccaatggcaactacactaggcagacggacattctgcaagctttctctgaagagacaaaagagggccggcttgattctctaacagaagtggatgactcaggacaattaaccatcaaatgttctcaaaattacttgtctctggattgtggcattactgcattcgaactgtctgactacagtccaagtgaggatttgctcagtgggctaggtgacatgacctctagccaagtcaaaaccaaaccctttgactcttggagctacagtgagatggaaaaggagtttcctgagcttatccgaagtgttggtttacttacggtagctgctgactctatctctaccaatggcagtgaagcagttactgaggaggtatctcaagtatctctctcagtagacgacaaaggtggatgtgaggaagacaatgcttctgcagtcgaagagcaaccaggcttaacactgggggtgtcatcatcttcaggagaagctctgacaaatgctgctcaaccctcctctgagactgtgcagcaagaatccagttcctcctcccatcatgatgcaaagaatcagcagcctgttccttgtgaaaatgcaacccccaaacgaaccatcagagattgctttaattataacgaggactctcccacgcagcctacattgccaaaaagaggactttttcttaaagaggaaacttttaagaatgatctgaaaggcaatggtggaaagaggcaaatggttgatctaaagcctgagatgagcagaagcaccccttcgctagtagatcctcctgacagatccaaactttgcctggtattgcagtcttcttaccccaacagcccttctgctgccagccagtcttatgagtgtttacacaaggtggggaatgggaaccttgaaaacacagtcaaatttcacattaaagaaatttcttccagcctgggaaggcttaacgactgctataaagagaaatctcgacttaaaaagccacacaagacctcagaagaggtgcctccatgccgaacacctaaacgggggactggttcaggcaaacaagctaaaaatacaaagagctcagcagtgccaaatggagagctttcttatacttccaaggccatagaggggccacaaacaaattctgcttccacatcctcacttgagccttgtaatcagagaagttggaatgccaaattgcaattgcagtcagaaacatccagttcaccagcttttactcagagcagtgaatcctctgttggctcagacaacatcatgtctccggtgccacttctttcaaaacacaaaagcaaaaaaggtcaagcctcctctccaagtcacgtcactaggaatggtgaggttgtggaggcctggtatggctctgatgaatacctagcactgccctctcaccttaagcagacagaagtattggctttgaagttggaaaacctaacaaagcttctgcctcagaaacccagaggagaaaccatccagaatattgatgactgggaactgtctgaaatgaattcagattctgaaatctatccaacctatcatgtcaaaaagaagcatacaaggctaggcagggtgtctccaagctcatctagtgacatagcctcttcactaggggagagcattgaatctgggcccctgagtgacattctttctgatgaggagtccagtatgcctctcgctggcatgaaaaagtatgctgatgagaagtcagaaagagcttcatcctctgagaaaaatgagagccattctgccactaaatcagctttaattcagaaactgatgcaagatattcagcaccaagacaactatgaagccatatgggaaaaaatagaggggtttgtaaacaaactggatgaattcattcaatggttaaatgaagccatggaaactacagaaaattggactccccctaaagcagagatggatgaccttaaactgtatctggagacacacttgagttttaagttgaatgtagacagtcattgtgctctcaaggaagctgtggaggaggaaggacaccaacttcttgagcttattgcatctcacaaagcaggactgaaggacatgctgcggatgattgcaagtcaatggaaggagctgcagaggcaaatcaaacggcagcacagctggattctcagggctctggataccatcaaagccgagatactggctactgatgtgtctgtggaggatgaggaagggactggaagccccaaggctgaggttcaactatgctacctggaagcacaaagagatgctgttgagcagatgtccctcaagctgtacagcgagcagtataccagcagcagcaagcgaaaggaagagtttgctgatatgtcaaaagttcattcagtgggaagcaatgggcttctggactttgattcagaatatcaggagctctgggattggctgattgacatggagtcccttgtgatggacagccacgacctgatgatgtcagaggagcagcagcagcatctttacaagcgatacagtgtggaaatgtccatcagacacctgaaaaagacggagctgcttagtaaggttgaagctttgaagaaaggtggcgttttactaccaaatgatctccttgaaaaagtggattcaattaatgaaaaatgggaactgcttgggaaaaccctaggagagaagatccaggacacaatggcagggcacagtgggtcgagtccacgtgacctgctctctcctgaaagtggaagcctggtaaggcagctggaggtcaggatcaaagaactgaaaggatggctaagagatacagagcttttcatcttcaattcctgtctgagacaagaaaaggaaggaacaatgaatactgagaaacaactgcaatactttaagtccctctgtcgtgaaatcaagcaacgacgtcgaggagttgcctccattctgcgactatgccagcatcttttggatgaccgggagacttgcaatctgaatgcagaccaccagcccatgcagctgatcattgtaaatcttgaaagaaggtgggaagccattgtcatgcaagccgtccagtggcaaacacgtctacaaaagaagatgggaaaggaatctgagactttgaatgtgattgatcctggcttgatggacctaaatgggatgagtgaggatgccctggaatgggatgaaatggacataagtaacaagttaattagtttgaatgaggaatcaaatgaccttgatcaagaactccaacctgttatcccttccttgaagcttggagagacaagtaatgaggaccctggttatgacgaggaggctgataaccatgggggatctcagtatgcctcaaatattactgccccctctagtccacacatttaccaggtgtacagcctccacaatgttgaactctatgaggacaaccacatgccatttctgaaaaacaatccaaaggtcactggcatgacacagcctaatgttttaactaagagtctcagtaaagactcttcattttcatctaccaaatctttgccagatcttctaggtggttccaatttggtaaagccctgcgcatgtcatggaggagacatgagccagaattcaggcagtgagagtggaattgtcagtgaaggagacacagaaaccactaccaactctgaaatgtgcttgctcaatgcagtggatgggtccccaagtaaccttgaaactgaacatctggacccacaaatgggagatgcagttaacgtgttaaagcaaaaatttacagatgagggggaaagcattaagcttccaaatagctctcagtcgtccatttcaccagtgggttgtgtaaatggaaaagttggagatttaaacagtattaccaaacatacccctgactgtttgggagaagaattacaaggaaaacatgatgtgtttacattttatgattactcatacctccaaggctcaaaactcaaattaccaatgataatgaaacagtcacaaagcgaaaaagcgcatgtggaggatcccctgcttcgtggtttttattttgataaaaaatcatgcaaatctaaacatcagactacagagttacaaccagatgtacctccccatgaaaggattttggcaagtgcatctcatgaaatggatcgcatttcatataaaagtggcaatatagaaaagacattcactggcatgcagaatgccaaacagctctcccttttatctcatagttcatctattgagtccctttctccagggggtgatttatttggattgggcatctttaaaaatggcagtgacagcctccagcgaagcacttctttagaaagttggttgacttcctataaaagcaatgaagatctctttagctgtcacagctctggggatataagcgtgagcagtggctcagttggtgaactaagtaaaagaacattagatctcctgaatcgtttggagaatatccagagcccctcagagcaaaagataaaacgaagtgtttctgatatcactcttcaaagcagttcccaaaagatgtcctttactggccagatgtcattggacatagcatcttctatcaatgaagactcagcggcatctctaacagaacttagcagcagtgacgagctctctctttgctcagaggatattgtgttacacaagaacaagatcccggaatcgaatgcatcgttcaggaagcgtctgactcgttcagtggctgatgaaagcgatgtcaatgtcagcatgattgttaatgtctcttgcacctctgcttgcactgatgatgaagatgacagcgacctgctctccagctctacccttaccttgactgaagaagagctgtgcatcaaagatgaggatgacgactccagtattgcaacagatgatgaaatttatgaagactgcaccttgatgtcagggctagactacataaagaatgaattacagacctggattaggccaaaattgtctttgacaagagataagaaaaggtgcaatgtcagtgatgagatgaagggcagtaaagatataagtagcagtgagatgaccaatccctctgatactctgaatattgagacccttctaaatggctctgtaaaacgtgtctctgaaaataatggaaatggtaagaattcatctcatacccatgagttagggacaaagcgtgaaaataagaaaactattttcaaagttaataaagatccatatgtggctgacatggaaaatggcaatattgaaggtattccagaaaggcaaaagggaaaaccgaatgtgacttcaaaggtatcagaaaatcttggttcacatgggaaagagatttcagagagtgagcattgtaagtgtaaagcacttatggatagtttagatgattcaaatactgctggcaaggaatttgtttcccaagatgttagacatcttccaaagaaatgtccaaatcaccaccattttgaaaatcaaagcactgcctctactcccactgagaagtctttctcagaactggctttagaaaccaggtttaacaacagacaagactctgatgcactgaaatcatctgatgatgcaccgagtatggctggaaaatctgctggttgttgcctagcacttgaacaaaacggaacagaggaaaatgcttctatcagcaacatttcctgttgcaactgtgagccagatgttttccatcaaaaagatgccgaagattgttcagtacacaactttgttaaggaaatcattgacatggcttcgacagccctaaaaagtaaatctcaacctgaaaacgaggtggctgctcctacttcattaactcaaatcaaggagaaagtgttggagcattctcaccggcccatccagctgagaaaaggggacttttattcgtacttatctctctcatctcatgacagtgattgtggggaggtcaccaattacatagaagagaaaagcagcactccattgccactagacaccactgactcgggcttagatgacaaggaagatattgaatgcttttttgaggcctgtgttgagggtgactctgatggagaggagccttgtttctctagtgctcctccaaatgaatctgcagttcccagcgaagctgcaatgccactacaagcaacagcatgttcttctgagttcagtgatagttctctttcagctgatgatgcagatacagtggctctttcaagtccttcctctcaggaaagagctgaggttggaaaggaagtgaatggtttgccccaaacttccagtggctgtgcagaaaacttagagtttactccttcaaagcttgacagtgaaaaggaaagttccggaaaaccaggtgaatctggaatgccagaagaacataatgctgcttcagccaaatctaaagttcaagacctctccttgaaggcaaatcagccaacagacaaggccgcattgcatcccagccccaaaactttaacctgtgaagaaaatcttctaaaccttcatgaaaaacgacatagaaatatgcataggtagaatgtaccccctccccaagcatgaaaatcatctcactgaaagatacgcctggctgcaactcaggggtggcctcatcctcccgccctgggctggcctctggttccatcacgtttgtcactgccgtttattacattgacttctcccaagatgaatcttccttccaaatgtgttttctccacacaagccttgtgatctgaatgtgtgcgctggttctctttaggtgatcgtctttgaagttcagcaaagctgcttgttctcccatggattcctgtcccaagctacctctaccaaccctctctctccagctagacttttctctttgcctcctcccttcccttccactctttaaagttctgcagttcaccaactggtagtccattaaattctcctgtctagaatgacccccccaccagtacttgaccaatttcatgtatcaatctggatttttttttaacggtataatgactgtgtttattgaaagagttttacctaaaaagccaacatttgaattggttgcagcatagagaagaaacactggtccttctttcaaaattaagcaactattaaaagcgccattttatttatttcatttaaaaaataatctatgcagcatttcaagaaacaaccatatggtgttgtatattataaactggtgacattctactattgaattatgtacaacattttcattttttatgcttcttgaggtggtaatgagaaaaaagttttttaaaaaagtgtgccttgctgtatttcttataccatttattaaaaagctgctttcacggtaaaattatgttggtttgaaaggaggaaatagcaaggttaagatgtgtgaataatttctgtatatatgtataaccaagtacaaacattgatgtataatgacagtataaaatgctttcatgtttgtgatgtctagtgatgtggaaaatataagccttaaatccattagattgcatggtaattaaaattggcataataaacacagattattgggggaaaaggaaaattagtgatctcttctactatgttctttaccaaattgttgcatctggttctgaaaaagtatagcatgtagcagcttccaaacatattcatattgcttaagaggcttaacattacctaaactagagactagacgtaaagccttcagttttcaaaatctttctggtcactataaagatcttggaacagcaaatgattaaatgtcagttcccctaaaccaataaacatttatactagattttttatttccacttatcattaatgatttaatgttggatttcaggtaccttgtatgtcttaatttattttaaatatttattttgaatgagtttgatagaaagctagtagaaaagtacagaaaatttgactattatttatagatttcaggtatatttatatgtgtaaaagaaattgacaaagaaatatttcatctggcctttactgactcctgttaaatgcagttttaaatttatatcgtaacacctacttaagtgcctgacacagtaggtattcaataaaaatttactgaattaaaggattaaattaggtgacatggtgacatctatccctttattttgacactaaaacatggacacaactagaaagaggtacaatgcaatataaagtcacaatagataatatatatcaaatttctaaaaggtaaagaatgttgtgggttcatgcagtcacaggaatgacaatcattcaacagatagttcagaaacactttttatctgcaaggcactattctagatccagaagatgcaatgttgaacaaacagacaaagccctgccctcagaaggctgtcctgcattaggaacaagtgaacacgcaaatgacatgaagtatttgttgcagagctgaggaacagagcaaatgtagtgatagaagcgcaatgagagaagcagcagtgggtacaaggaggaagaaaaagggcttgcagagagtggaaagttagtggaatattcatgaaacttcattgcaggggtaatagaagaaaaagtaaattgggaggacttaatggaaggtcttttaaaaagttaacttggagcttctgtatgtaaaatgctaggtaataaggacactttgtacaggctgttttgcacctgattttatttatcattagtgccacgccaagatcatttagacgatgcttatctgtaattctaccactttaataactatttgtatttttatgccccttctgatcttttccatatgtatttctaaatggataaattattctaggcttcttaataggtagtaatttgttcaaaagcggttttagccagacatctagttgcagtgttcaagaggattatgggggaaagagattagagataattgtctagttagggggcagctggagaaaataagctaagtttgcaataacagagtacacaagtatagtggcccaggatgtagtgaaagaacaaatcctagagtctttgaaatttctaagggcattctagacctctgttgggatatggtattattttacatactgacacaacctaaattttctttgggtagtaactaatgtcaagtctacatcgactggtaaaacattcaaagaacaaactgacaatgatgttctacctacttgttacatgctcatggaagaccgtgcagtattgaaagtatttgttaattatctgcttagtattaacactaaatttgtagaatgactttcaggtttgttgaacaatgccttttcaggttggaagaagaaaaatagcctcaatctcccaccccatgtaggcactacctccccaattacccttagaaaatgatcacaccaactctgcctacacacttccagtgatagtggctcattgtctgttaaggcaaactgttccactgttgggcatatctctttgttagaaagttctttcttaggttgctaaaatctgcctagtaccccgctaccctgttctgtcttatggagcagcccagattatctttactccctctttctcatggcaaccctgaagataatcaaggccagttactcatcatctcccaaccactgtttcctcaactgcccttcatatgtcatggttttcagatccattccaacctgactgaatgttaacagacagaattcttcacattaaggaactgtcttcatcatcatacatgtagaaaagaatctgaacatttaagtgcgaagttttctctagaaatatattcaagatatgtttattctattattgtaaatttcaaacaataaataaataagaatccatgacttccttcagtggcccagtccagtgcctaagtcatctggaatcttctccttacatcgaatacaaacctaacctgtttccaagtagggcactccctccgcttatttattcatttattcagccattcagcaaacatttattaaatggctacctatgtgaggcactatatttggcattaggtatataaaggcaactaacacatggtatctgtctccaaaggtttacagcttttcttctgaaagtgccttttgtgtccttgaatagagtgattatgacttttgtctcaattaaatgatgacctcatttagtttctgatgaagtttctctacatttaagaaaatctagtgagcaaaacggtatacaaaaaatcatctggatctgactaccagaaaaagtaaagtggttttaattacagaaagaaaaatatttgttagatttctggtcactgaataaatatgcatcttatacaacacagaacaacctaaatttagggcttctggaaacctgagtttgatgactttgttgtgtttggttcatccggactaggtttcacccattctataattcctagaaacaaactagatgaaaatatcaatgaaatgatccaggtctgtcttacaagtcaatttgctttagcttccaaaagaagttgaaattttttagaattttaaagaaaaactcacttttcaagtgtcatataattcttatattttaaatataaatcgaaccaactaaatttaccgctatatttttttctacatattcttttttcaattttcattttgaaaaaattcagacctatgtaaaagttgagagtagaacaaagatacttggtactcatccctcaggttcatttattgttaatatttcaccatatttacttcatctctgtatacacacacacttttttgtatgattaaatcatttgaaattaaattgtagagtatgatacttcatctgcaaatacttcagcatgtgttagctgagaacatgggtattcttctgcaagtctacaataccatcttcatactcaagaaatgtaacattggctggtcatggtggctcacgcctgtaatcccagcactttgggaggccaaggcgtgtggatcacctaaggtcaggagttcgagatcagcctggccaacatggtgaaaccccgtctctactaaaaatacaaaaattagccaggcgtggtagctgtaatcccagctacttgggaggctgaggcaggagaattgcttgaagccaggaggcagaggttgcagtgagccgagattgcaccactgcactccagcctgggcaagaagagtgaaattttgtctcaaaaaaaaaaatgtaatattaatacaataatacctgatagtttatattcaagtttctctaactacccaaattatgtcctcttatagttgtttttgttttaatacagtattcaaacaaagatcacacactgcttttagtttccaagtctttttttttttttttttttttaaatcttgcatagtttccctgtgcttttactctatttttctttgggcttttataacatcgacagttctgaaaagtccaggccagttttgcagaatgatccacaatcttgatgggtctagttgttttctcattgttaaactcagggtaaacttttttttgtcaagtaaatacataggtgactttgcattcacagccactctttaatgaagattgattgaataactgacattcctgatatgttttaaagttcacagcttactctttcagcccatgcttcatccatctaaggcaagggtcagcaaactgtggcacgtgggccaaattcagctcgttgcctgttctggtttgacccatttgaacaattgacgagcttcaaacaatttttacattttttagtagttaaacaaaagaatacttcatgacatgtgaaaatcatatgaaatttaaattttggtgtccatgtataaagttttattagaacacatccacgcacatttgtttccatagtctacggatgctttgacactatacaaagttacgtacttgcaacaaaagccatatggcctgcaaaacctaaaacatttactatctggatcattacagaaagttttctgatccctggtctatgatattctaaattccgacacattttcttaggatagatttccatttgcaaattcagtgtaagacataaacaccggcaatagttgtgttttttttttctttttacttcctagattttattgcattctcaacttgtttcatattaccttaaaaaataaagtgcacttaaagattgtttcacatccacagtttgtttaaggatttaaatttagttcactattactgcctggctttgattgatttagagggttagtcaattacagactaaataattagttcaatcaaaaccatcagaaaaattgacacaaactcacttccatgcaccagtaaactggaatcctttctttaaatgtttttctaaagcaatccgaggaattaaattcaggccatttcacagtcagtttttttcaaattcatttttcaactcaaaggcaaaaccatgatcaaaatattgtatatagtacaccttcagttcccaactgctgaatttaccaaggaattaagtattcaccacaaaccctggtgtggccataggtggacactctaattaaaaagaagatgttcaaaaagaatagtccttcttttctttcttaaattcacctttgatagcactgccacacttctgggaagggaacgttcaaggaaaccgtatagccacttcttttttaaaagcagccacataccttctatataacaatggccctttagtttgagagttgccacatatttgcatttccagagtaaaataataggatgacatgggcaggtcaggcccacaatagtatggtttctttggcaaaggcattttggccaatgccgtaagaccattctggcccttgattaatgggttctcaccaaagcagaaattacgcagagcttatttgtccttgcattttgaagtaaatcattgcctgcataaagcaactcttttgtctcttttccattgcaacacacaggagttggaatgtgttcatacgtgtaagactgtcttagtctgcccagactgcttggactgtgttgtttataaacaacagaatttactgctcaaagttctggagactgggaagttcaagatcaagatgctagcagattcagtgtctgaggagggctcactttctgtttcattgatgcaccttactgcatcctcatctggtggaaggggcagtgaacaagctcccttgggccccttttacgaaagcactaattccattcatgaagacttcacaacttaatcacctcccaaaggctccatctcttaatacgatcacattggggattaggtttcaacataccaattttgggggtacacaaatattgaggtgatagacacttccaggcttttgccaaacattagtaaacaatttccagtgaatactctgccccattctctcctactcaagcagagtatcttaaggcagcagattggagtgacgttactttaagggtaactttgaagccaatctaattcatactcaaaaaagtattccaaaattttggtactctattatgggttacaaaccccttgtgacaccatatttaagagccactgctattgaggcttgcactctcttgcttgaaatgaggtgctcccaaacctgggagatggctcccaaagaacaagagaatcaaccccatcgtgcatttatgtgctgccccaggtaatccacaggcacaaagaacttgagcttcctggtgtgttcttcagaaaaaaaggaattcaaaaagcaaatgtaaaatggaacagaacttggcctcaaagtgatgttggaaaaatagccagtcctgatgacttggtcgaggtaacttgctttgcccactgttaactacagagccatatgataatggaacatcaaggttttccagataaacccaaagccttttgtgtctataccttgtaacctgtcatgttcatcaacgttttagactgtaccattgctctttctcccttctttattcattttatatggggacgtttgactaggatcaccagatgtagatttggtaatttttccataccattaagatgtatgataatggattttattaatttaacacaaatgcataaaaatatgatgtaataagaaacaatcctgaaattattaaaacatttctttgtccttacttaaacctaacctgccattttaaaagacacctaactctataaacaaatgggccattacagacgtaaaacaaatattattcagtgaaatttattcaaggacttaaaatgattgaaggcattaggaacataaaaatgcataagatcctcttttaaatcccaatattccctaaccactggtttataaaaaatactctaaggtttatagaattagtttggttccgttagttgatcaagttacttacactaagtcagcaattcaaaacaaataattccctctgtgtgtgtttgtttgcttgcaaatatgtttcattttaaagtgtctttttatatagaaagccaagttggtggaatttatcttgtcattaaaatgatgtgaaaatc

SEQ ID NO: 103104 - DNA, 5259 bp, Homo sapiens
  Payload ID: 112
  Gene Symbol: AKAP6
  Gene Name: A kinase (PRKA) anchor protein 6
  Uniprot ID: Q13023
  ENST ID: ENST00000557354
  CDS Start-End: 100-3327
ctcctagtattgcatcctacagatgtgctgtaaacatcaaaagaagacggtgggatcaggagatgctgttttggaaagaagtgaggtttagacttctccatgttaaccatgagcgtgacactttcccccctgaggtcacaggacctggatcccatggctactgatgcttcacccatggccatcaacatgacacccactgtggagcagggtgagggagaagaggcaatgaaggacatggactctgaccagcagtatgaaaagccacccccactacacacaggggctgactggaagattgtcctccacttacctgaaattgagacctggctccggatgacctcagagagggtccgagacctaacctattcagtccagcaggattcggacagcaagcatgtggatgtacatctagttcaactaaaggacatttgtgaagatatttctgatcatgttgagcaaatccatgccctccttgaaacagagttctccctaaagctgctgtcttactctgtcaacgtgatagtggacatccacgcagtgcagctcctctggcaccagcttcgagtctcagtgctggttctgcgggagcgcattctgcaaggtctgcaggacgccaatggcaactacactaggcagacggacattctgcaagctttctctgaagagacaaaagagggccggcttgattctctaacagaagtggatgactcaggacaattaaccatcaaatgttctcaaaattacttgtctctggattgtggcattactgcattcgaactgtctgactacagtccaagtgaggatttgctcagtgggctaggtgacatgacctctagccaagtcaaaaccaaaccctttgactcttggagctacagtgagatggaaaaggagtttcctgagcttatccgaagtgttggtttacttacggtagctgctgactctatctctaccaatggcagtgaagcagttactgaggaggtatctcaagtatctctctcagtagacgacaaaggtggatgtgaggaagacaatgcttctgcagtcgaagagcaaccaggcttaacactgggggtgtcatcatcttcaggagaagctctgacaaatgctgctcaaccctcctctgagactgtgcagcaagaatccagttcctcctcccatcatgatgcaaagaatcagcagcctgttccttgtgaaaatgcaacccccaaacgaaccatcagagattgctttaattataacgaggactctcccacgcagcctacattgccaaaaagaggactttttcttaaagaggaaacttttaagaatgatctgaaaggcaatggtggaaagaggcaaatggttgatctaaagcctgagatgagcagaagcaccccttcgctagtagatcctcctgacagatccaaactttgcctggtattgcagtcttcttaccccaacagcccttctgctgccagccagtcttatgagtgtttacacaaggtggggaatgggaaccttgaaaacacagtcaaatttcacattaaagaaatttcttccagcctgggaaggcttaacgactgctataaagagaaatctcgacttaaaaagccacacaagacctcagaagaggtgcctccatgccgaacacctaaacgggggactggttcaggcaaacaagctaaaaatacaaagagctcagcagtgccaaatggagagctttcttatacttccaaggccatagaggggccacaaacaaattctgcttccacatcctcacttgagccttgtaatcagagaagttggaatgccaaattgcaattgcagtcagaaacatccagttcaccagcttttactcagagcagtgaatcctctgttggctcagacaacatcatgtctccggtgccacttctttcaaaacacaaaagcaaaaaaggtcaagcctcctctccaagtcacgtcactaggaatggtgaggttgtggaggcctggtatggctctgatgaatacctagcactgccctctcaccttaagcagacagaagtattggctttgaagttggaaaacctaacaaagcttctgcctcagaaacccagaggagaaaccatccagaatattgatgactgggaactgtctgaaatgaattcagattctgaaatctatccaacctatcatgtcaaaaagaagcatacaaggctaggcagggtgtctccaagctcatctagtgacatagcctcttcactaggggagagcattgaatctgggcccctgagtgacattctttctgatgaggagtccagtatgcctctcgctggcatgaaaaagtatgctgatgagaagtcagaaagagcttcatcctctgagaaaaatgagagccattctgccactaaatcagctttaattcagaaactgatgcaagatattcagcaccaagacaactatgaagccatatgggaaaaaatagaggggtttgtaaacaaactggatgaattcattcaatggttaaatgaagccatggaaactacagaaaattggactccccctaaagcagagatggatgaccttaaactgtatctggagacacacttgagttttaagttgaatgtagacagtcattgtgctctcaaggaagctgtggaggaggaaggacaccaacttcttgagcttattgcatctcacaaagcaggactgaaggacatgctgcggatgattgcaagtcaatggaaggagctgcagaggcaaatcaaacggcagcacagctggattctcagggctctggataccatcaaagccgagatactggctactgatgtgtctgtggaggatgaggaagggactggaagccccaaggctgaggttcaactatgctacctggaagcacaaagagatgctgttgagcagatgtccctcaagctgtacagcgagcagtataccagcagcagcaagcgaaaggaagagtttgctgatatgtcaaaagttcattcagtgggaagcaatgggcttctggactttgattcagaatatcaggagctctgggattggctgattgacatggagtcccttgtgatggacagccacgacctgatgatgtcagaggagcagcagcagcatctttacaagcgatacagtgtggaaatgtccatcagacacctgaaaaagacggagctgcttagtaaggttgaagctttgaagaaaggtggcgttttactaccaaatgatctccttgaaaaagtggattcaattaatgaaaaatgggaactgcttggggtatttgcatttttattactgtttgtaggttatgtgtacattttttgcgtagtgaagtactctgtccgatttctaatttgaggcacaaatatctctctctttcaattcactacctacgtttcaaacaagctattcatgctattatgggaaagacactgcttttcctcttctgttgattttttttttttctgagcttgtcccctctcagattttaataattttggttctttaatacatgaaaaagtaagtaaaatatgccatgtattatgggtatgcaccaagtcaactataatacagtatatctgatatatactgactgtcatgcttgaatgaatgttaatagaatttattctgaaggtacatgtgagagacatctactgtttaactatttactgtacccttaagatgaaaagtggagttgtcactacagctttcaagtcacactaaagccaccaaaacaaagatgcaaatttgacccaaatctgaattgcagaattgaatcagcctgtgttttgtgcctcaatttccagctcacttttaacaaaagccaaaaaaaaaaaaagtttcatgtaattcatttcacgcaatgatgggctgggtctcagccaaagactgagatgcaagaatctggcaaaaaggcaatatagagattctgttacccagagaccaggatggcactgtgcaggagacagtactgtccttttgttggaagacagctgagagaaaagttaaactgtattttttcatcagcttctctcctaaattgccttcacttcaaatcaagggtaagctatatttgtcaattacctaaataattaattataacagccaagtatggacgatgtcagttatggagcataattttgcatgccttccatttttctaccttttaaaaaaaattttagataaataatactccaaaaatattttgaataaaaagctcttcatgtaccttgatgatttggaggaatgccagtattctgtttatgccatgcctaatctaggagattaaaaaactgcaggtttaagtccttgtttctcatttaaattcactacactctgcagttgtgcaaagtaacttaaaatgttaaaagtttttcatctaacatattgttgccttttaataataattaatggctttcactttataatacggtgacttaaatcaaaacctgccgtattctacagcattcattgatctcaaacaggagaaatgtggttagtgtatgacattttaaaaggttgtttactacatagataagaatggcaaccttatgtgcttgataaagtagcgataagtctgtttacattgcattttaatatatccattggtaatttgataaataacaataatatttttagaaaattgtttaagttatgtcacatgtattgcttcctcaacagaattttaagtcaacattattttgaaaaaagaaataatatttagctatcctttatgaatcagagactttaaaaatagttgccattttgacaaaaacatcattcaaatacaacatgcaggtttgcagtgagagagtagggtgagggaagatttttttaaatcctgtaccacactaacaccaccaggcatactgttttaattggcatgattacattttaattggcatgaaaaaaattaaagacaaggattttaacttctaacaatagtaaaatagaggtatatggtttttaatattactttcatctaaggtgaacagtgtggaatggaaatacattagaatgaaatgtcagtggtgcgtacagtttaatctgtgaaattgtgtcccctgtgctgcatattactctgtctcaattgcatattaaacaaccctatcaaggcaggcattggcatctgctgtgctgacacaaattgtgaattaaatgaaattgatgtcctctgtcgtatatttatgaagacggaccattctctgaagtattctgtttatgaagaatttatgattgcaaactgttccagaacaaaaaagtggcaataaattcttttttgtgacccta

SEQ ID NO: 103105 - DNA, 562 bp, Homo sapiens
  Payload ID: 112
  Gene Symbol: AKAP6
  Gene Name: A kinase (PRKA) anchor protein 6
  ENST ID: ENST00000557102
  CDS Start-End: 239-562
agtattgcatcctacagatgtgctgtaaacatcaaaagaagacggtgggatcaggagatgtttggacagctctttattcagaacatcaaggactgttgacagttgaataaaaagggcggaggcttatgggattgctaatgagatacaaagccaccttggaataaaaataaatttctctctgttggctcctccggccatggagagctgttttggaaagaagtgaggtttagacttctccatgttaaccatgagcgtgacactttcccccctgaggtcacaggacctggatcccatggctactgatgcttcacccatggccatcaacatgacacccactgtggagcagggtgagggagaagaggcaatgaaggacatggactctgaccagcagtatgaaaagccacccccactacacacaggggctgactggaagattgtcctccacttacctgaaattgagacctggctccggatgacctcagagagggtccgagacctaacctattcagtccagcaggattcggacagcaagcatgtggatgtacatctagttcaactaaag

SEQ ID NO: 103106 - DNA, 2274 bp, Homo sapiens
  Payload ID: 112
  Gene Symbol: AKAP6
  Gene Name: A kinase (PRKA) anchor protein 6
  ENST ID: ENST00000553547
  CDS Start-End: 1205-2274
acatatgtggctttcatcccagcacattgggcaggacaccactgttttcttcgtttggttaatagttacacttccttgacacctcatacagctgggtcatggatctgctgctgttctcaatgtgagcatcactgtctttttttctttttctttttctttttttgggacaggatctctgtcacccaggctggagtgcggtggcacgatctcagctcactgcagcctccacctcctgggttcaagcgattctcctgcctcagcctctcaagtagctgggattacaggcatgcaccaccgtgcctggctaatttttgtatttttggtagaaacggggtttcactatgttggccaggctggtctcaaactcctgatctcaggtgatccacccgcctcggcctcccaaagtgctgggattacaggtgtgagccacggtgcccagcccactgtcttttttcatcaatgctaagagaatttaattctttccacatgaagcgattctacttcctcaacacgtgtttcgttttgtgacacaacaacttggaggaggtgaaattcattaacaaggaataaatatcttctctttatggagccacttccttaacccctcaaatcttcctagaccacttccatccaacgtagaataagtgaaccatatgaaattgctgtttttgtgggtcaaaggcaattgaatggtagtctcacatggttcaacatctgtatacaagcaagttctctgatgaaaaagctgagtgactgcgagtaccattcttagaattctttaggagagaagaaagatttcaaggacatttgtgaagatatttctgatcatgttgagcaaatccatgccctccttgaaacagagttctccctaaagctgctgtcttactctgtcaacgtgatagtggacatccacgcagtgcagctcctctggcaccagcttcgagtctcagtgctggttctgcgggagcgcattctgcaaggtctgcaggacgccaatggcaactacactaggcagacggacattctgcaagctttctctgaagagacaaaagagggccggcttgattctctaacagaagtggatgactcaggacaattaaccatcaaatgttctcaaaattacttgtctctggattgtggcattactgcattcgaactgtctgactacagtccaagtgaggatttgctcagtgggctaggtgacatgacctctagccaagtcaaaaccaaaccctttgactcttggagctacagtgagatggaaaaggagtttcctgagcttatccgaagtgttggtttacttacggtagctgctgactctatctctaccaatggcagtgaagcagttactgaggaggtatctcaagtatctctctcagtagacgacaaaggtggatgtgaggaagacaatgcttctgcagtcgaagagcaaccaggcttaacactgggggtgtcatcatcttcaggagaagctctgacaaatgctgctcaaccctcctctgagactgtgcagcaagaatccagttcctcctcccatcatgatgcaaagaatcagcagcctgttccttgtgaaaatgcaacccccaaacgaaccatcagagattgctttaattataacgaggactctcccacgcagcctacattgccaaaaagaggactttttcttaaagaggaaacttttaagaatgatctgaaaggcaatggtggaaagaggcaaatggttgatctaaagcctgagatgagcagaagcaccccttcgctagtagatcctcctgacagatccaaactttgcctggtattgcagtcttcttaccccaacagcccttctgctgccagccagtcttatgagtgtttacacaaggtggggaatgggaaccttgaaaacacagtcaaatttcacattaaagaaatttcttccagcctgggaaggcttaacgactgctataaagagaaatctcgacttaaaaagccacacaagacctcagaagaggtgcctccatgccgaacacctaaacgggggactggttcaggcaaacaagctaaaaatacaaagagctcagcagtgccaaatggagagctttcttatacttccaaggccatagaggggccacaaacaaattctgcttccacatcctcacttgagccttgtaatcagagaagttggaatgccaaattgcaattgcagtcagaaacatccagttcaccagcttttactcagagcagtgaatcctctgttggctcagacaacatcatgtctccggtgccacttctttc

SEQ ID NO: 103107 - DNA, 582 bp, Homo sapiens
  Payload ID: 112
  Gene Symbol: AKAP6
  Gene Name: A kinase (PRKA) anchor protein 6
  ENST ID: ENST00000554410
  CDS Start-End: 507-582
accatgagtagggtgttgatgatgaagttggaagatttgtgaatttatcctgtgttacttctgggattcagaatgctcagtgctggcatggaggaactcacatcgacatttgtgaagatatttctgatcatgttgagcaaatccatgccctccttgaaacagagttctccctaaagctgctgtcttactctgtcaacgtgatagtggacatccacgcagtgcagctcctctggcaccagcttcgagtctcagtgctggttctgcgggagcgcattctgcaaggtctgcaggacgccaatggcaactacactaggcagacggacattctgcaagctttctctgaagagacaaaagagggccggcttgattctctaacagaagtggatgactcaggacaattaaccatcaaatgttctcaaaattacttgtctctggattgtggcattactgcattcgaactgtctgactacagtccaagtgaggatttgctcagtgggctaggtgacatgacctctagccaagtcaaaaccaaaccctttgactcttggagctacagtgagatggaaaaggagtttcctgagc

SEQ ID NO: 103108 - DNA, 4601 bp, Homo sapiens
  Payload ID: 112
  Gene Symbol: AKAP6
  Gene Name: A kinase (PRKA) anchor protein 6
  ENST ID: ENST00000557272
  CDS Start-End: 44-3781
caggagatgctgttttggaaagaagtgaggtttagacttctccatgttaaccatgagcgtgacactttcccccctgaggtcacaggacctggatcccatggctactgatgcttcacccatggccatcaacatgacacccactgtggagcagggtgagggagaagaggcaatgaaggacatggactctgaccagcagtatgaaaagccacccccactacacacaggggctgactggaagattgtcctccacttacctgaaattgagacctggctccggatgacctcagagagggtccgagacctaacctattcagtccagcaggattcggacagcaagcatgtggatgtacatctagttcaactaaaggacatttgtgaagatatttctgatcatgttgagcaaatccatgccctccttgaaacagagttctccctaaagctgctgtcttactctgtcaacgtgatagtggacatccacgcagtgcagctcctctggcaccagcttcgagtctcagtgctggttctgcgggagcgcattctgcaaggtctgcaggacgccaatggcaactacactaggcagacggacattctgcaagctttctctgaagagacaaaagagggccggcttgattctctaacagaagtggatgactcaggacaattaaccatcaaatgttctcaaaattacttgtctctggattgtggcattactgcattcgaactgtctgactacagtccaagtgaggatttgctcagtgggctaggtgacatgacctctagccaagtcaaaaccaaaccctttgactcttggagctacagtgagatggaaaaggagtttcctgagcttatccgaagtgttggtttacttacggtagctgctgactctatctctaccaatggcagtgaagcagttactgaggaggtatctcaagtatctctctcagtagacgacaaaggtggatgtgaggaagacaatgcttctgcagtcgaagagcaaccaggcttaacactgggggtgtcatcatcttcaggagaagctctgacaaatgctgctcaaccctcctctgagactgtgcagcaagaatccagttcctcctcccatcatgatgcaaagaatcagcagcctgttccttgtgaaaatgcaacccccaaacgaaccatcagagattgctttaattataacgaggactctcccacgcagcctacattgccaaaaagaggactttttcttaaagaggaaacttttaagaatgatctgaaaggcaatggtggaaagaggcaaatggttgatctaaagcctgagatgagcagaagcaccccttcgctagtagatcctcctgacagatccaaactttgcctggtattgcagtcttcttaccccaacagcccttctgctgccagccagtcttatgagtgtttacacaaggtggggaatgggaaccttgaaaacacagtcaaatttcacattaaagaaatttcttccagcctgggaaggcttaacgactgctataaagagaaatctcgacttaaaaagccacacaagacctcagaagaggtgcctccatgccgaacacctaaacgggggactggttcaggcaaacaagctaaaaatacaaagagctcagcagtgccaaatggagagctttcttatacttccaaggccatagaggggccacaaacaaattctgcttccacatcctcacttgagccttgtaatcagagaagttggaatgccaaattgcaattgcagtcagaaacatccagttcaccagcttttactcagagcagtgaatcctctgttggctcagacaacatcatgtctccggtgccacttctttcaaaacacaaaagcaaaaaaggtcaagcctcctctccaagtcacgtcactaggaatggtgaggttgtggaggcctggtatggctctgatgaatacctagcactgccctctcaccttaagcagacagaagtattggctttgaagttggaaaacctaacaaagcttctgcctcagaaacccagaggagaaaccatccagaatattgatgactgggaactgtctgaaatgaattcagattctgaaatctatccaacctatcatgtcaaaaagaagcatacaaggctaggcagggtgtctccaagctcatctagtgacatagcctcttcactaggggagagcattgaatctgggcccctgagtgacattctttctgatgaggagtccagtatgcctctcgctggcatgaaaaagtatgctgatgagaagtcagaaagagcttcatcctctgagaaaaatgagagccattctgccactaaatcagctttaattcagaaactgatgcaagatattcagcaccaagacaactatgaagccatatgggaaaaaatagaggggtttgtaaacaaactggatgaattcattcaatggttaaatgaagccatggaaactacagaaaattggactccccctaaagcagagatggatgaccttaaactgtatctggagacacacttgagttttaagttgaatgtagacagtcattgtgctctcaaggaagctgtggaggaggaaggacaccaacttcttgagcttattgcatctcacaaagcaggactgaaggacatgctgcggatgattgcaagtcaatggaaggagctgcagaggcaaatcaaacggcagcacagctggattctcagggctctggataccatcaaagccgagatactggctactgatgtgtctgtggaggatgaggaagggactggaagccccaaggctgaggttcaactatgctacctggaagcacaaagagatgctgttgagcagatgtccctcaagctgtacagcgagcagtataccagcagcagcaagcgaaaggaagagtttgctgatatgtcaaaagttcattcagtgggaagcaatgggcttctggactttgattcagaatatcaggagctctgggattggctgattgacatggagtcccttgtgatggacagccacgacctgatgatgtcagaggagcagcagcagcatctttacaagcgatacagtgtggaaatgtccatcagacacctgaaaaagacggagctgcttagtaaggttgaagctttgaagaaaggtggcgttttactaccaaatgatctccttgaaaaagtggattcaattaatgaaaaatgggaactgcttgggaaaaccctaggagagaagatccaggacacaatggcagggcacagtgggtcgagtccacgtgacctgctctctcctgaaagtggaagcctggtaaggcagctggaggtcaggatcaaagaactgaaaggatggctaagagatacagagcttttcatcttcaattcctgtctgagacaagaaaaggaaggaacaatgaatactgagaaacaactgcaatactttaagtccctctgtcgtgaaatcaagcaacgacgtcgaggagttgcctccattctgcgactatgccagcatcttttggatgaccgggagacttgcaatctgaatgcagaccaccagcccatgcagctgatcattgtaaatcttgaaagaaggtgggaagccattgtcatgcaagccgtccagtggcaaacacgtctacaaaagaagatgggaaaggaatctatacgcctggctgcaactcaggggtggcctcatcctcccgccctgggctggcctctggttccatcacgtttgtcactgccgtttattacattgacttctcccaagatgaatcttccttccaaatgtgttttctccacacaagccttgtgatctgaatgtgtgcgctggttctctttaggtgatcgtctttgaagttcagcaaagctgcttgttctcccatggattcctgtcccaagctacctctaccaaccctctctctccagctagacttttctctttgcctcctcccttcccttccactctttaaagttctgcagttcaccaactggtagtccattaaattctcctgtctagaatgacccccccaccagtacttgaccaatttcatgtatcaatctggatttttttttaacggtataatgactgtgtttattgaaagagttttacctaaaaagccaacatttgaattggttgcagcatagagaagaaacactggtccttctttcaaaattaagcaactattaaaagcgccattttatttatttcatttaaaaaataatctatgcagcatttcaagaaacaaccatatggtgttgtatattataaactggtgacattctactattgaattatgtacaacattttcattttttatgcttcttgaggtggtaatgagaaaaaagttttttaaaaaagtgtgccttgctgtatttcttataccatttattaaaaagctgctttcacggtaaaattatgttggtttgaaaggaggaaatagcaaggttaagatgtgtgaataatttctgtatatatgtataaccaagtacaaacattgatgtataatgacagtataaaatgctttcatgtttgtgatgtctagtgatgtggaaaatataagccttaaatccattagattgcatggtaattaaaattggcataataaacacagattattgggggaaaaggaaaa

SEQ ID NO: 103109 - DNA, 356 bp, Homo sapiens
  Payload ID: 112
  Gene Symbol: AKAP6
  Gene Name: A kinase (PRKA) anchor protein 6
  ENST ID: ENST00000554740
  CDS Start-End: 1-356
tgaatactgagaaacaactgcaatactttaagtccctctgtcgtgaaatcaagcaacgacgtcgaggagttgcctccattctgcgactatgccagcatcttttggatgaccgggagacttgcaatctgaatgcagaccaccagcccatgcagctgatcattgtaaatcttgaaagaaggtgggaagccattgtcatgcaagccgtccagtggcaaacacgtctacaaaagaagatgggaaaggaatctgtgagtgatgctttttttaagcataattgtctgtcattttctcagacaaaaaataattctttcaggcttggaaacggtgttcatcttataaatggttttactaactaa

SEQ ID NO: 103110 - DNA, 876 bp, Homo sapiens
  Payload ID: 112
  Gene Symbol: AKAP6
  Gene Name: A kinase (PRKA) anchor protein 6
  ENST ID: ENST00000556638
  CDS Start-End: 736-876
agtctgggagctgagtgactgaggatttgaaaccttgctatagttacagttcataacaagtgtctaggcagttagaccttaagtgttcaggtatggaaagaaagtcatatgttatgttttagattctgtttgtaaagctggttaactagagacagctgatgaaaaaccaaatcgacttgagttacaagatctgggctttctctgctctgctttcaacctgttggttggtggtggagtagctgacagaagcgaatggcttggctgagggacatgaagtgacagcagcctgtttaggaccacaccacattttggacctcttgctgtgcagttcaggacatttgtgaagatatttctgatcatgttgagcaaatccatgccctccttgaaacagagttctccctaaagctgctgtcttactctgtcaacgtgatagtggacatccacgcagtgcagctcctctggcaccagcttcgagtctcagtgctggttctgcgggagcgcattctgcaaggtctgcaggacgccaatggcaactacactaggcagacggacattctgcaagctttctctgaagagacaaaagagggccggcttgattctctaacagaagtggatgactcaggacaattaaccatcaaatgttctcaaaattacttgtctctggattgtggcattactgcattcgaactgtctgactacagtccaagtgaggatttgctcagtgggctaggtgacatgacctctagccaagtcaaaaccaaaccctttgactcttggagctacagtgagatggaaaaggagtttcctgagcttatccgaagtgttggtttacttacggtagctgctgactctatctctaccaatggcagtgaagca

SEQ ID NO: 103111 - DNA, 2238 bp, Homo sapiens
  Payload ID: 113
  Gene Symbol: AKAP7
  Gene Name: A kinase (PRKA) anchor protein 7
  ENST ID: ENST00000263050
  CDS Start-End: 175-429
tatctttcttgttttgctttcaaatggattgtcctcttccaagtggtttcaaacttaatcacagaatgacaatcagtggtgaagggagtgaaaaaaatagatcctgatttatatgaaaagtttatcagtcacagatttggagaagaaatattatatcgcatagatctttgctccatgctgaagaaaaaacaaagtaatggttattatcactgtgaatcttccattgtgattggtgaaaagaacggaggggagcccgatgacgctgaactagtaaggctcagtaagaggctggtggagaacgcggtgctcaaggctgtccagcagtatctggaggaaacacagaataaaaacaagccgggggaggggagctctgtgaaaaccgaagcagctgatcagaatggcaatgacaatgagaacaacaggaaatgagcccggaacgcaggcccccatgtctctgtgcaaagcctccctgcttccctctgctgagtctagggactgacttgcagcgtgctgtttaagttaagtttctctggtgcaatctgtgaagattgcctaatacttttcatgatcgatgtgttcgcattgctgaaacacaacagaagaaaaatggagtgctgggactggcagaggaaattaattgatgaaagaagaatggcccaagtttcattcgccctcagccacgcacaagggaaagggaactttgggttatgcctcctggacgcaaattaaaggccgagaaagaggccttgccatcaatggaatactgccatttatattgcttagcagggcatttgactactttatctgaggccagaactctcacacacagctatcaagtgctaagtttaaaataatcactgttggaattgtcatctgtacaattagtccataatgtttcatgtttgtcctaagtgtgctgttgctatgcagtgtgatctttatttatagtaaattatgtttcatgtaaatgatatatttttggtgaaatgcaaccttttctataaaatgtgggcaacattttaaagtttttttaaaatcctattttgataagtcagtatgccatatttaatgaaatgttattatataatttttttttcttaggcaagaaacctattggaattcgagacttaattaatgaagctttgcatcgagaaacgatgggtctgaagtccaaagtgaaacagataaaggaacttttattaaagcctgagactcaggccagaattaggagggagctttttgaaggaagacttattaacaacagtaattcagcaaatgacgttgatttcagcacaactttgacataagctctacattgcgattgtgacaacatagcttatgaaatcttttcagcttattaagtagctctttggtaaacaccaaagaagtttctgatagtgtctgcacaacagcaaaccaacatttggtgaggaattagcaatttcttgccaaagaaaattgattctgcccaattattttttgagctacacttgtgttttagaatatctgtttctgtaatattgagagttattttatagaaatgatttcttaattagctgttgtgagatatttctcgggtccttgcagaaaaaaacatacagactgtgaacaaatcattcacaaacagaataaaacagagccaacaacagtattttaagggtcacttgcctcctgttgacacaattgttgctaaatcaaaagaagcgttgtccaggtgtgtctacatctagtgttacttttaatgagaatttgaatgtttattgaacaatagtacttgaatgaacatttataaatgtaattattgcgatcactggttaagaatgttttatatatccttataatatttttcactgatcaaaatgttgttctgctttttcatttcttaaggaatacatgtttgggatttttattttttacgtgtccgaagataagctccaggtcttatcgtatcccttgccatctgaacttgtttgcactgcttctgtttgaaagagcatcttgaaaaacttccccggtatgatgattgttggtaacaactttttctatagtcattgatggagtagatcatgatggaggggaaatcactggagatcaaatatgtaaaatcatttcaaatataaaatccagtttactcatggattttagctattttttcactgggtaaattatactacatttatttacaaatgagtttatgcattttcatggctcttaataaacatattgttttcccttgtt

SEQ ID NO: 103112 - DNA, 2461 bp, Homo sapiens
  Payload ID: 113
  Gene Symbol: AKAP7
  Gene Name: A kinase (PRKA) anchor protein 7
  Uniprot ID: O43687
  ENST ID: ENST00000342266
  CDS Start-End: 410-655
aattactgcagttgtctgtaggagaaagggctcattgtggtttttctcgactacctttcttaaagacatatgcaaatagccagacagaacacatggcactgacctatggccagggactcacagttttgtgagaatacgggagcgtatagccacttccttcactgaatgccagtcccagagcagttgcattaggctggaggactggaggtggagccttttttgctcacggcagcaagttcccttctcctttctctcccccggcggcgtgtgcattggctcttcaagctgcctgtgctgctccgtggagtgaaaaaggcagggtgtgctcgcagactgtgctataaactgcaatttctatttggggtcctcacggagaagaacaccaggaaagacagacaggaccagtgccatgggccagctttgctgctttcctttctcaagagatgaaggaaaaatcagtgaaaagaacggaggggagcccgatgacgctgaactagtaaggctcagtaagaggctggtggagaacgcggtgctcaaggctgtccagcagtatctggaggaaacacagaataaaaacaagccgggggaggggagctctgtgaaaaccgaagcagctgatcagaatggcaatgacaatgagaacaacaggaaatgagcccggaacgcaggcccccatgtctctgtgcaaagcctccctgcttccctctgctgagtctagggactgacttgcagcgtgctgtttaagttaagtttctctggtgcaatctgtgaagattgcctaatacttttcatgatcgatgtgttcgcattgctgaaacacaacagaagaaaaatggagtgctgggactggcagaggaaattaattgatgaaagaagaatggcccaagtttcattcgccctcagccacgcacaagggaaagggaactttgggttatgcctcctggacgcaaattaaaggccgagaaagaggccttgccatcaatggaatactgccatttatattgcttagcagggcatttgactactttatctgaggccagaactctcacacacagctatcaagtgctaagtttaaaataatcactgttggaattgtcatctgtacaattagtccataatgtttcatgtttgtcctaagtgtgctgttgctatgcagtgtgatctttatttatagtaaattatgtttcatgtaaatgatatatttttggtgaaatgcaaccttttctataaaatgtgggcaacattttaaagtttttttaaaatcctattttgataagtcagtatgccatatttaatgaaatgttattatataatttttttttcttaggcaagaaacctattggaattcgagacttaattaatgaagctttgcatcgagaaacgatgggtctgaagtccaaagtgaaacagataaaggaacttttattaaagcctgagactcaggccagaattaggagggagctttttgaaggaagacttattaacaacagtaattcagcaaatgacgttgatttcagcacaactttgacataagctctacattgcgattgtgacaacatagcttatgaaatcttttcagcttattaagtagctctttggtaaacaccaaagaagtttctgatagtgtctgcacaacagcaaaccaacatttggtgaggaattagcaatttcttgccaaagaaaattgattctgcccaattattttttgagctacacttgtgttttagaatatctgtttctgtaatattgagagttattttatagaaatgatttcttaattagctgttgtgagatatttctcgggtccttgcagaaaaaaacatacagactgtgaacaaatcattcacaaacagaataaaacagagccaacaacagtattttaagggtcacttgcctcctgttgacacaattgttgctaaatcaaaagaagcgttgtccaggtgtgtctacatctagtgttacttttaatgagaatttgaatgtttattgaacaatagtacttgaatgaacatttataaatgtaattattgcgatcactggttaagaatgttttatatatccttataatatttttcactgatcaaaatgttgttctgctttttcatttcttaaggaatacatgtttgggatttttattttttacgtgtccgaagataagctccaggtcttatcgtatcccttgccatctgaacttgtttgcactgcttctgtttgaaagagcatcttgaaaaacttccccggtatgatgattgttggtaacaactttttctatagtcattgatggagtagatcatgatggaggggaaatcactggagatcaaatatgtaaaatcatttcaaatataaaatccagtttactcatggattttagctattttttcactgggtaaattatactacatttatttacaaatgagtttatgcattttcatggctcttaataaacatattgttttccctt

SEQ ID NO: 103113 - DNA, 2954 bp, Homo sapiens
  Payload ID: 113
  Gene Symbol: AKAP7
  Gene Name: A kinase (PRKA) anchor protein 7
  Uniprot ID: Q9P0M2
  ENST ID: ENST00000431975
  CDS Start-End: 99-1145
gccctggcctccgcctcggcctcgcctccagccccgggacgcggcccgccaccgccgctgccgccagcccagacgcgccgcccgcatgcgccgcgaccatggagcgccccgaagcgggaggaattaattccaatgagtgtgaaaatgtatcaagaaaaaagaaaatgtcagaggaatttgaagccaatactatggattctctggtagacatgccatttgctactgtagatattcaggatgactgtggaatcactgatgaacctcaaataaatttgaagagaagtcaagaaaatgaatgggtcaagagtgatcaagtaaagaagaggaaaaaaaagagaaaagattatcaacccaactatttcctgtccattccaatcaccaacaaagagattataaaaggaattaagatcctgcagaatgcaataatacaacaagatgagcgactggccaaagcaatggtcagtgatggttcctttcatattaccctgctggtgatgcaattattaaatgaagatgaagtaaacattggtattgatgctcttttggaattgaaaccattcatagaagaactcctccagggaaaacatttgactttgccctttcaagggattggtacttttggaaatcaggttggatttgtgaagctggcagaaggagatcatgtaaactcacttttggagatagcagagactgcaaataggacatttcaagaaaaaggcatcctggtaggagagagcagaagttttaaacctcatttgaccttcatgaagttgtcaaaatcaccgtggctccgtaagaatggagtgaaaaaaatagatcctgatttatatgaaaagtttatcagtcacagatttggagaagaaatattatatcgcatagatctttgctccatgctgaagaaaaaacaaagtaatggttattatcactgtgaatcttccattgtgattggtgaaaagaacggaggggagcccgatgacgctgaactagtaaggctcagtaagaggctggtggagaacgcggtgctcaaggctgtccagcagtatctggaggaaacacagaataaaaacaagccgggggaggggagctctgtgaaaaccgaagcagctgatcagaatggcaatgacaatgagaacaacaggaaatgagcccggaacgcaggcccccatgtctctgtgcaaagcctccctgcttccctctgctgagtctagggactgacttgcagcgtgctgtttaagttaagtttctctggtgcaatctgtgaagattgcctaatacttttcatgatcgatgtgttcgcattgctgaaacacaacagaagaaaaatggagtgctgggactggcagaggaaattaattgatgaaagaagaatggcccaagtttcattcgccctcagccacgcacaagggaaagggaactttgggttatgcctcctggacgcaaattaaaggccgagaaagaggccttgccatcaatggaatactgccatttatattgcttagcagggcatttgactactttatctgaggccagaactctcacacacagctatcaagtgctaagtttaaaataatcactgttggaattgtcatctgtacaattagtccataatgtttcatgtttgtcctaagtgtgctgttgctatgcagtgtgatctttatttatagtaaattatgtttcatgtaaatgatatatttttggtgaaatgcaaccttttctataaaatgtgggcaacattttaaagtttttttaaaatcctattttgataagtcagtatgccatatttaatgaaatgttattatataatttttttttcttaggcaagaaacctattggaattcgagacttaattaatgaagctttgcatcgagaaacgatgggtctgaagtccaaagtgaaacagataaaggaacttttattaaagcctgagactcaggccagaattaggagggagctttttgaaggaagacttattaacaacagtaattcagcaaatgacgttgatttcagcacaactttgacataagctctacattgcgattgtgacaacatagcttatgaaatcttttcagcttattaagtagctctttggtaaacaccaaagaagtttctgatagtgtctgcacaacagcaaaccaacatttggtgaggaattagcaatttcttgccaaagaaaattgattctgcccaattattttttgagctacacttgtgttttagaatatctgtttctgtaatattgagagttattttatagaaatgatttcttaattagctgttgtgagatatttctcgggtccttgcagaaaaaaacatacagactgtgaacaaatcattcacaaacagaataaaacagagccaacaacagtattttaagggtcacttgcctcctgttgacacaattgttgctaaatcaaaagaagcgttgtccaggtgtgtctacatctagtgttacttttaatgagaatttgaatgtttattgaacaatagtacttgaatgaacatttataaatgtaattattgcgatcactggttaagaatgttttatatatccttataatatttttcactgatcaaaatgttgttctgctttttcatttcttaaggaatacatgtttgggatttttattttttacgtgtccgaagataagctccaggtcttatcgtatcccttgccatctgaacttgtttgcactgcttctgtttgaaagagcatcttgaaaaacttccccggtatgatgattgttggtaacaactttttctatagtcattgatggagtagatcatgatggaggggaaatcactggagatcaaatatgtaaaatcatttcaaatataaaatccagtttactcatggattttagctattttttcactgggtaaattatactacatttatttacaaatgagtttatgcattttcatggctcttaataaacatattgttttcccttgtt

SEQ ID NO: 103114 - DNA, 670 bp, Homo sapiens
  Payload ID: 113
  Gene Symbol: AKAP7
  Gene Name: A kinase (PRKA) anchor protein 7
  Uniprot ID: O43687
  ENST ID: ENST00000474850
  CDS Start-End: 139-453
attggctcttcaagctgcctgtgctgctccgtggagtgaaaaaggcagggtgtgctcgcagactgtgctataaactgcaatttctatttggggtcctcacggagaagaacaccaggaaagacagacaggaccagtgccatgggccagctttgctgctttcctttctcaagagatgaaggaaaaatcagtgagttggaaagctcgtcctctgcagtcctacagagatacagcaaggatatacccagttggtcaagtggtgaaaagaacggaggggagcccgatgacgctgaactagtaaggctcagtaagaggctggtggagaacgcggtgctcaaggctgtccagcagtatctggaggaaacacagaataaaaacaagccgggggaggggagctctgtgaaaaccgaagcagctgatcagaatggcaatgacaatgagaacaacaggaaatgagcccggaacgcaggcccccatgtctctgtgcaaagcctccctgcttccctctgctgagtctagggactgacttgcagcgtgctgtttaagttaagtttctctggtgcaatctgtgaagattgcctaatacttttcatgatcgatgtgttcgcattgctgaaacacaacagaagaaaaatggagtgctgggactggcagaggaaattaattgatgaaa

SEQ ID NO: 103115 - DNA, 2008 bp, Homo sapiens
  Payload ID: 113
  Gene Symbol: AKAP7
  Gene Name: A kinase (PRKA) anchor protein 7
  ENST ID: ENST00000541650
  CDS Start-End: 28-1080
gacgcgccgcccgcatgcgccgcgaccatggagcgccccgaagcgggaattaattccaatgagtgtgaaaatgtatcaagaaaaaagaaaatgtcagaggaatttgaagccaatactatggattctctggtagacatgccatttgctactgtagatattcaggatgactgtggaatcactgatgaacctcaaataaatttgaagagaagtcaagaaaatgaatgggtcaagagtgatcaagtaaagaagaggaaaaaaaagagaaaagattatcaacccaactatttcctgtccattccaatcaccaacaaagagattataaaaggaattaagatcctgcagaatgcaataatacaacaagatgagcgactggccaaagcaatggtcagtgatggttcctttcatattaccctgctggtgatgcaattattaaatgaagatgaagtaaacattggtattgatgctcttttggaattgaaaccattcatagaagaactcctccagggaaaacatttgactttgccctttcaagggattggtacttttggaaatcaggttggatttgtgaagctggcagaaggagatcatgtaaactcacttttggagatagcagagactgcaaataggacatttcaagaaaaaggcatcctggtaggagagagcagaagttttaaacctcatttgaccttcatgaagttgtcaaaatcaccgtggctccgtaagaatggagtgaaaaaaatagatcctgatttatatgaaaagtttatcagtcacagatttggagaagaaatattatatcgcatagatctttgctccatgctgaagaaaaaacaaagtaatggttattatcactgtgaatcttccattgtgattggcaagaaacctattggaattcgagacttaattaatgaagctttgcatcgagaaacgatgggtctgaagtccaaagtgaaacagataaaggaacttttattaaagcctgagactcaggccagaattaggagggagctttttgaaggaagacttattaacaacagtaattcagcaaatgacgttgatttcagcacaactttgacataagctctacattgcgattgtgacaacatagcttatgaaatcttttcagcttattaagtagctctttggtaaacaccaaagaagtttctgatagtgtctgcacaacagcaaaccaacatttggtgaggaattagcaatttcttgccaaagaaaattgattctgcccaattattttttgagctacacttgtgttttagaatatctgtttctgtaatattgagagttattttatagaaatgatttcttaattagctgttgtgagatatttctcgggtccttgcagaaaaaaacatacagactgtgaacaaatcattcacaaacagaataaaacagagccaacaacagtattttaagggtcacttgcctcctgttgacacaattgttgctaaatcaaaagaagcgttgtccaggtgtgtctacatctagtgttacttttaatgagaatttgaatgtttattgaacaatagtacttgaatgaacatttataaatgtaattattgcgatcactggttaagaatgttttatatatccttataatatttttcactgatcaaaatgttgttctgctttttcatttcttaaggaatacatgtttgggatttttattttttacgtgtccgaagataagctccaggtcttatcgtatcccttgccatctgaacttgtttgcactgcttctgtttgaaagagcatcttgaaaaacttccccggtatgatgattgttggtaacaactttttctatagtcattgatggagtagatcatgatggaggggaaatcactggagatcaaatatgtaaaatcatttcaaatataaaatccagtttactcatggattttagctattttttcactgggtaaattatactacatttatttacaaatgagtttatgcattttcatggctcttaataaacatattgttttccctt

SEQ ID NO: 103116 - DNA, 535 bp, Homo sapiens
  Payload ID: 113
  Gene Symbol: AKAP7
  Gene Name: A kinase (PRKA) anchor protein 7
  ENST ID: ENST00000479599
  CDS Start-End: 1-155
tcactgatgaacctcaaataaatttgaagagaagtcaagaaaatgaatgggtcaagagtgatcaagtaaagaagaggaaaaaaaagagaaaagattatcaacccaactatttcctgtccattccaatcaccaacaaagagaggagcaggtgctgagagaggaagggagatggtggaccaggtctgtggggatttctcctggatgcagattctgtttttctaatgtgtgcatttggacttctttgcaactcttcatggtaatgcccctccccacagattataaaaggaattaagatcctgcagaatgcaataatacaacaagatgagcgactggccaaagcaatggtcagtgatggttcctttcatattaccctgctggtgatgcaattattaaatgaagatgaagtaaacattggtattgatgctcttttggaattgaaaccattcatagaagaactcctccagggaaaacatttgactttgccctttcaagggattggtacttttggaaatcaggttggatttgtgaagctggc

SEQ ID NO: 103117 - DNA, 1006 bp, Homo sapiens
  Payload ID: 113
  Gene Symbol: AKAP7
  Gene Name: A kinase (PRKA) anchor protein 7
  ENST ID: ENST00000537868
  CDS Start-End: 163-426
cttcctgtcgctcttcaaggtttccaaaagaccatctttcagcagttgcctcaattaaggccttggaaccagggagtgaaaaaaatagatcctgatttatatgaaaagtttatcagtcacagatttggagaagaaatattatatcgcatagatctttgctccatgctgaagaaaaaacaaagtaatggttattatcactgtgaatcttccattgtgattggcaagaaacctattggaattcgagacttaattaatgaagctttgcatcgagaaacgatgggtctgaagtccaaagtgaaacagataaaggaacttttattaaagcctgagactcaggccagaattaggagggagctttttgaaggaagacttattaacaacagtaattcagcaaatgacgttgatttcagcacaactttgacataagctctacattgcgattgtgacaacatagcttatgaaatcttttcagcttattaagtagctctttggtaaacaccaaagaagtttctgatagtgtctgcacaacagcaaaccaacatttggtgaggaattagcaatttcttgccaaagaaaattgattctgcccaattattttttgagctacacttgtgttttagaatatctgtttctgtaatattgagagttattttatagaaatgatttcttaattagctgttgtgagatatttctcgggtccttgcagaaaaaaacatacagactgtgaacaaatcattcacaaacagaataaaacagagccaacaacagtattttaagggtcacttgcctcctgttgacacaattgttgctaaatcaaaagaagcgttgtccaggtgtgtctacatctagtgttacttttaatgagaatttgaatgtttattgaacaatagtacttgaatgaacatttataaatgtaattattgcgatcactggttaagaatgttttatatatccttataatatttttcactgatcaaaatgttgttctgctttttcatttcttaag

SEQ ID NO: 103118 - DNA, 3670 bp, Homo sapiens
  Payload ID: 114
  Gene Symbol: AKAP8
  Gene Name: A kinase (PRKA) anchor protein 8
  Uniprot ID: O43823
  ENST ID: ENST00000269701
  CDS Start-End: 62-2140
tgaacgcatgcgtgctgtggtcgcctagtaaacggggctgctggtgggccgcgtcgaagacatggaccagggctacggaggctacggggcgtggagtgctggacctgccaacacccagggtgcatatggaactggtgtggccagctggcaaggttatgaaaactacaattactatggcgcccagaacaccagtgtcaccacaggcgcaacctacagctacggcccagcctcgtgggaggccgccaaggccaatgatggcggcctggcggccggggcccctgccatgcacatggcctcttacggcccagagccatgcaccgacaattccgactccctcattgccaagatcaaccagcgtttggacatgatgtccaaggaaggaggcaggggcgggagcggcggcggtggggagggcatacaggaccgggagagctccttccgcttccagccgttcgagtcctatgactccaggccctgcctgccggagcacaacccctaccgccccagctacagctacgactatgagttcgacctggggtccgaccgcaatggcagctttggggggcagtacagtgaatgccgagacccagcccgggagcggggctcccttgatggcttcatgcggggccggggccagggccgcttccaggaccggagcaaccctggcaccttcatgcgcagcgaccccttcgtgccccccgctgcgtcctctgagcccctgtccacgccctggaacgagctgaactacgtgggtggacggggcctgggagggccctcccccagccggccacctccgtccctcttctcccagtccatggctcccgactacggcgtgatgggcatgcagggggcgggcggctatgacagcaccatgccctacggatgtggccgctcgcagcctcggatgcgggatcgggatcggcccaagaggagagggtttgaccgcttcggaccagatggcacgggcaggaaacggaagcagttccaactttacgaggagccagacaccaaactggcccgggttgacagtgaaggagatttctccgaaaatgatgacgcagctggtgacttccgctcaggagatgaagaattcaagggtgaggatgaactctgcgactctgggaggcaaagaggagagaaggaggacgaggacgaggatgtgaagaagagaagggaaaagcaaaggagaagagacaggacgcgggaccgtgcagccgacagaattcagtttgcctgttctgtatgcaagttccgtagctttgatgacgaagagatccagaagcatctgcaaagcaaatttcacaaagagaccctgcggttcataagcaccaagctgcccgacaagaccgtggagttcctccaggaatacattgtaaacagaaataagaaaattgagaagcggcgtcaggaattgatggagaaagaaaccgcaaaaccaaaaccagatcctttcaaagggattggccaggagcacttcttcaagaagatcgaggctgctcactgcctggcctgcgacatgctaattcctgcacagccgcagctcctccagcggcacctgcactccgtggaccacaatcacaaccgcaggttggctgctgaacagttcaagaaaaccagtctccatgtggctaagagtgttttgaacaacagacatatagtgaagatgctggaaaaatacctcaagggtgaggaccctttcaccagtgaaactgttgatccagaaatggaaggagatgacaatttaggaggtgaggataagaaagagacacctgaggaggtggccgcggacgtcttagcagaggtgattacagcagcagtgagggccgtagatggggaaggagcgcccgctccagagagcagcggggagccggctgaggacgaaggccccacggacacagcggaggccggtagtgatcctcaagccgaacagctgctggaagagcaggtgccctgtggaacggcacatgagaagggcgtccccaaggccagaagtgaggctgcagaggctggaaatggcgccgagacaatggcagcagaggcagaaagtgcccaaaccagagttgctcctgccccagctgccgcggatgctgaagtggaacaaactgatgcagagtctaaagacgctgttcccacagaatgatgctcatttccctgttccagggaaggcgttgggatgatggatgcgttggtctttctcccttggtttgtaagcagtacaagggcgtgtgctcccagaatatgctgtaatctaattttggtgaagagacccagcgtttcctcctgagcagtgcctctcacggcttgtctcatgcagtcgtgtggcttcttgcccaggtttcaaagctgaagtacattgtccttagcggctgtaacatgtctcttgacagtagtgcacttggaataataaaggttgggtgattatatcttgatgatacattacttgttcaatacagccactgatggaatgcttccttttttatttttttccttaatttttttttttatttggttgggaacagctgaatactaggaatatatcttgctctatagaggatttttttttgtatgtttcaagcttcagcctttaacctatacctttgtagtgcaccatatggtgtgtgactttcacaggacttcgcagcacctggttcacatgtggcactgaccgcgtcacatccacgcactcccaaaggccagaagtatctgaccgacctacgccactggaaacacacccaccgcaacctcaagaaccagactgtgcagagggcattgcgtcccaatctttagtccttgctgaatcagttctctaatattttacctcatttgtgttccacctctagattacttcaggtttttttcctttaaaattagttactaccactcaaatgtatttacaaagagaatttggccaggcacggtgatgcatacctataatcccagcacttcgggaggccgtggtgagaggatagcttaagcccaggagttcaagaccaacctggacaacatagcaagaccccatctcttaaaaaaaaaggaaagaaaacttgatgtgattgccataggtggaataatccaacataaattgccatagatagaaggtatctgtaatatatatatatatatataaaatgaaatatatgtttcattttagagaaataactattactttagatctttccaaatctgagaaagggaggctagcatgtgttcaaggttagcacgcaacagaatttcctaaaatcagaagaattggaagatcctccccttttgaaatggccctgctgtgtcagtttccctgtggccttttgaactgtacatctcacatgttgggaaacgctggccactgggaaatcattagaaaggaggctgtagaatatttgccgagcctctactgtataccaggggctaactcaccaagcacattctaggaattgggccctgctcatgaggagccttagtggagattccaggtgaatatttatgaaaaagtcaacattagaactgaaaatggaaataaactgcttgaaaagacgatggtgcctctgggtcatttctgctcagcatccgtttgtgttgtgtagatgcgtcttaatcgcagggtgagcatgccttttaagcttgttctcttaaggcaaaaatgtcggtagcattaaacagtagtgcagaaaaa

SEQ ID NO: 103119 - DNA, 860 bp, Homo sapiens
  Payload ID: 114
  Gene Symbol: AKAP8
  Gene Name: A kinase (PRKA) anchor protein 8
  ENST ID: ENST00000599883
  CDS Start-End: 68-469
gtgcgctgaacgcatgcgtgctgtggtcgcctagtaaacggggctgctggtgggccgcgtcgaagacatggaccagggctacggaggctacggggcgtggagtgctggacctgccaacacccagggtgcatatggaactggtgtggccagctggcaagctccttccgcttccagccgttcgagtcctatgactccaggccctgcctgccggagcacaacccctaccgccccagctacagctacgactatgagttcgacctggggtccgaccgcaatggcagctttggggggcagtacagtgaatgccgagacccagcccgggagcggggctcccttgatggcttcatgcggggccggggccagggccgcttccaggaccggagcaaccctggcaccttcatgcgcagcgaccccttcgtgccccccgctgcgtcctctgagcccctgtccacgccctggaacgagctgaactacgtgggtggacggggcctgggagggccctcccccagccggccacctccgtccctcttctcccagtccatggctcccgactacggcgtgatgggcatgcagggggcgggcggctatgacagcaccatgccctacggatgtggccgctcgcagcctcggatgcgggatcgggatcggcccaagaggagagggtttgaccgcttcggaccagatggcacgggcaggaaacggaagcagttccaactttacgaggagccagacaccaaactggcccgggttgacagtgaaggagatttctccgaaaatgatgacgcagctggtgacttccgctcaggagatgaagaattcaagggtgaggatgaactctgcgactctgggaggcaaagagg

SEQ ID NO: 103120 - DNA, 3071 bp, Homo sapiens
  Payload ID: 114
  Gene Symbol: AKAP8
  Gene Name: A kinase (PRKA) anchor protein 8
  ENST ID: ENST00000598597
  CDS Start-End: 1-535
gcggggccggggccagggccgcttccaggaccggagcaaccctggcaccttcatgcgcagcgaccccttcgtgccccccgctgcgtcctctgagcccctgtccacgccctggaacgagctgaactacgtgggtggacggggcctgggagggccctcccccagccggccacctccgtccctcttctcccagtccatggctcccgactacggcgtgatgggcatgcagggggcgggcggctatgacagcaccatgccctacggatgtggccgctcgcagcctcggatgcgggatcgggatcggcccaagaggagagggtttgaccgcttcggaccagatggcacgggcaggaaacggaagcagttccaactttacgaggagccagacaccaaactggcccgggttgacagtgaaggagatttctccgaaaatgatgacgcagctggtgacttccgctcaggagatgaagaattcaagggtgaggatgaactctgcgactctgggaggcaaagaggtcctgctacctacccgggatgactttgctattaaacagcagtcatagtttcaggcagtgacctcttgccaaaaatcccacacgcccttttgagaggcttctgagcagcgcacgccggtcgccatcttcgtgggacagtctcgggactggcatcaggggagagaaggaggacgaggacgaggatgtgaagaagagaagggaaaagcaaaggagaagagacaggacgcgggaccgtgcagccgacagaattcagtttgcctgttctgtatgcaagttccgtagctttgatgacgaagagatccagaagcatctgcaaagcaaatttcacaaagagaccctgcggttcataagcaccaagctgcccgacaagaccgtggagttcctccaggaatacattgtaaacagaaataagaaaattgagaagcggcgtcaggaattgatggagaaagaaaccgcaaaaccaaaaccagatcctttcaaagggattggccaggagcacttcttcaagaagatcgaggctgctcactgcctggcctgcgacatgctaattcctgcacagccgcagctcctccagcggcacctgcactccgtggaccacaatcacaaccgcaggttggctgctgaacagttcaagaaaaccagtctccatgtggctaagagtgttttgaacaacagacatatagtgaagatgctggaaaaatacctcaagggtgaggaccctttcaccagtgaaactgttgatccagaaatggaaggagatgacaatttaggaggtgaggataagaaagagacacctgaggaggtggccgcggacgtcttagcagaggtgattacagcagcagtgagggccgtagatggggaaggagcgcccgctccagagagcagcggggagccggctgaggacgaaggccccacggacacagcggaggccggtagtgatcctcaagccgaacagctgctggaagagcaggtgccctgtggaacggcacatgagaagggcgtccccaaggccagaagtgaggctgcagaggctggaaatggcgccgagacaatggcagcagaggcagaaagtgcccaaaccagagttgctcctgccccagctgccgcggatgctgaagtggaacaaactgatgcagagtctaaagacgctgttcccacagaatgatgctcatttccctgttccagggaaggcgttgggatgatggatgcgttggtctttctcccttggtttgtaagcagtacaagggcgtgtgctcccagaatatgctgtaatctaattttggtgaagagacccagcgtttcctcctgagcagtgcctctcacggcttgtctcatgcagtcgtgtggcttcttgcccaggtttcaaagctgaagtacattgtccttagcggctgtaacatgtctcttgacagtagtgcacttggaataataaaggttgggtgattatatcttgatgatacattacttgttcaatacagccactgatggaatgcttccttttttatttttttccttaatttttttttttatttggttgggaacagctgaatactaggaatatatcttgctctatagaggatttttttttgtatgtttcaagcttcagcctttaacctatacctttgtagtgcaccatatggtgtgtgactttcacaggacttcgcagcacctggttcacatgtggcactgaccgcgtcacatccacgcactcccaaaggccagaagtatctgaccgacctacgccactggaaacacacccaccgcaacctcaagaaccagactgtgcagagggcattgcgtcccaatctttagtccttgctgaatcagttctctaatattttacctcatttgtgttccacctctagattacttcaggtttttttcctttaaaattagttactaccactcaaatgtatttacaaagagaatttggccaggcacggtgatgcatacctataatcccagcacttcgggaggccgtggtgagaggatagcttaagcccaggagttcaagaccaacctggacaacatagcaagaccccatctcttaaaaaaaaaggaaagaaaacttgatgtgattgccataggtggaataatccaacataaattgccatagatagaaggtatctgtaatatatatatatatatataaaatgaaatatatgtttcattttagagaaataactattactttagatctttccaaatctgagaaagggaggctagcatgtgttcaaggttagcacgcaacagaatttcctaaaatcagaagaattggaagatcctccccttttgaaatggccctgctgtgtcagtttccctgtggccttttgaactgtacatctcacatgttgggaaacgctggccactgggaaatcattagaaaggaggctgtagaatatttgccgagcctctactgtataccaggggctaactcaccaagcacattctaggaattgggccctgctcatgaggagccttagtggagattccaggtgaatatttatgaaaaagtcaacattagaactgaaaatggaaataaactgcttgaaaagacga

SEQ ID NO: 103121 - DNA, 2146 bp, Homo sapiens
  Payload ID: 115
  Gene Symbol: AKAP8L
  Gene Name: A kinase (PRKA) anchor protein 8-like
  Uniprot ID: Q9ULX6
  ENST ID: ENST00000397410
  CDS Start-End: 132-2072
gagccaatgcggtcgggaggcggggctcgggtgtgtgtggaggggaccctgtggttagcagcagctatcgcagcgtcggatgttcagagcagcagaagccggcgtcgtcggatgttgtgttgcccgccaccatgagctacacaggctttgtccagggatctgaaaccactttgcagtcgacatactcggataccagcgctcagcccacctgtgattatggatatggaacttggaactctgggacaaatagaggctacgagggctatggctatggctatggctatggccaggataacaccaccaactatgggtatggtatggccacttcacactcttgggaaatgcctagctctgacacaaatgcaaacactagtgcctcgggtagcgccagtgccgattccgttttatccagaattaaccagcgcttagatatggtgccgcatttggagacagacatgatgcaaggaggcgtgtacggctcaggtggagaaaggtatgactcttatgagtcctgcgactcgagggccgtcctgagtgagcgcgacctgtaccggtcaggctatgactacagcgagcttgaccctgagatggaaatggcctatgagggccaatacgatgcctaccgcgaccagttccgcatgcgtggcaacgacaccttcggtcccagggcacagggctgggcccgggatgcccggagcggccggccaatggcctcaggctatgggcgcatgtgggaagaccccatgggggcccggggccagtgcatgtctggtgcctctcggctgccctccctcttctcccagaacatcatccccgagtacggcatgttccagggcatgcgaggtgggggcgccttcccgggcggctcccgctttggtttcgggtttggcaatggcatgaagcagatgaggcggacctggaagacctggaccacagccgacttccgaaccaagaagaagaagagaaagcagggcggcagtcctgatgagccagatagcaaagccacccgcacggactgctcggacaacagcgactcagacaatgatgagggcaccgagggggaagccacagagggccttgaaggcaccgaggctgtggagaagggctccagagtggacggagaggatgaggagggaaaagaggatgggagagaagaaggcaaagaggatccagagaagggggccctaaccacccaggatgaaaatggccagaccaagcgcaagttgcaggcaggcaagaagagtcaggacaagcagaaaaagcggcagcgagaccgcatggtggaaaggatccagtttgtgtgttctctgtgcaaataccggaccttctatgaggacgagatggccagccatcttgacagcaagttccacaaggaacactttaagtacgtaggcaccaagctccctaagcagacggctgactttctgcaggagtacgtcactaacaagaccaagaagacagaggagctccgaaaaaccgtggaggaccttgatggcctcatccagcaaatctacagagaccaggatctgacccaggaaattgccatggagcattttgtgaagaaggtggaggcagcccattgtgcagcctgcgacctcttcattcccatgcagtttgggatcatccagaagcatctgaagaccatggatcacaaccggaaccgcaggctcatgatggagcagtccaagaagtcctccctcatggtggcccgcagtattctcaacaacaagctcatcagcaagaagctggagcgctacctgaagggcgagaaccctttcaccgacagccccgaggaggagaaggagcaggaggaggctgagggcggtgccctggacgagggggcgcagggcgaagcggcagggatctcggagggcgcagagggcgtgccggcgcagcctcccgtgcccccagagccagcccccggggccgtgtcgccgccaccgccgccgcccccagaggaggaggaggagggcgccgtgcccttgctgggaggggcgctgcaacgccagatccgcggcatcccgggcctcgacgtggaggacgacgaggagggcggcgggggcgccccgtgacccgagctcggggcgggcggagcccgcgtggccgaagctggaaaccaaacctaataaagttttcccatcccacc

SEQ ID NO: 103122 - DNA, 553 bp, Homo sapiens
  Payload ID: 115
  Gene Symbol: AKAP8L
  Gene Name: A kinase (PRKA) anchor protein 8-like
  ENST ID: ENST00000596195
  CDS Start-End: 66-553
atcgcagcgtcggatgttcagagcagcagaagccggcgtcgtcggatgttgtgttgcccgccaccatgagctacacaggctttgtccagggatctgaaaccactttgcagtcgacatactcggataccagcgctcagcccacctgtgattatggctacgagggctatggctatggctatggctatggccaggataacaccaccaactatgggtatggtatggccacttcacactcttgggaaatgcctagctctgacacaaatgcaaacactagtgcctcgggtagcgccagtgccgattccgttttatccagaattaaccagcgcttagatatggtgccgcatttggagacagacatgatgcaaggaggcgtgtacggctcaggtggagaaaggtatgactcttatgagtcctgcgactcgagggccgtcctgagtgagcgcgacctgtaccggtcaggctatgactacagcgagcttgaccctgagatggaaatggcctatgagggccaatacgatgcctaccgcgaccagttccgcatgcgtggcaacga

SEQ ID NO: 103123 - DNA, 2251 bp, Homo sapiens
  Payload ID: 115
  Gene Symbol: AKAP8L
  Gene Name: A kinase (PRKA) anchor protein 8-like
  ENST ID: ENST00000594594
  CDS Start-End: 199-399
actgatatgaggaggcatagagatagacagcggttccttccaatagacgtgaagccgaggccggtatgagccaatgcggtcgggaggcggggctcgggtgtgtgtggaggggaccctgtggttagcagcagctatcgcagcgtcggatgttcagagcagcagaagccggcgtcgtcggatgttgtgttgcccgccaccatgagctacacaggctttgtccagggatctgaaaccactttgcagtcgacatactcggataccagcgctcagcccacctgtgattatggatatggaacttggaactctgggacaaatagaggctacgagggctatggctatggctatggctatggccaggataacaccaccaactatgggtatgaattaaccagcgcttagatatggtgccgcatttggagacagacatgatgcaaggaggcgtgtacggctcaggtggagaaaggtatgactcttatgagtcctgcgactcgagggccgtcctgagtgagcgcgacctgtaccggtcaggctatgactacagcgagcttgaccctgagatggaaatggcctatgagggccaatacgatgcctaccgcgaccagttccgcatgcgtggcaacgacaccttcggtcccagggcacagggctgggcccgggatgcccggagcggccggccaatggcctcaggctatgggcgcatgtgggaagaccccatgggggcccggggccagtgcatgtctggtgcctctcggctgccctccctcttctcccagaacatcatccccgagtacggcatgttccagggcatgcgaggtgggggcgccttcccgggcggctcccgctttggtttcgggtttggcaatggcatgaagcagatgaggcggacctggaagacctggaccacagccgacttccgaaccaagaagaagaagagaaagcagggcggcagtcctgatgagccagatagcaaagccacccgcacggactgctcggacaacagcgactcagacaatgatgagggcaccgagggggaagccacagagggccttgaaggcaccgaggctgtggagaagggctccagagtggacggagaggatgaggagggaaaagaggatgggagagaagaaggcaaagaggatccagagaagggggccctaaccacccaggatgaaaatggccagaccaagcgcaagttgcaggcaggcaagaagagtcaggacaagcagaaaaagcggcagcgagaccgcatggtggaaagggctcccgcactggcgcttgcctcctccgcctcagactcttgctcttgctggaccttcctcagcctcgccggcgcccggcccctgggctctccagacaaagctgaccccgtggcccagataaggacgtccggcagaggatccagtttgtgtgttctctgtgcaaataccggaccttctatgaggacgagatggccagccatcttgacagcaagttccacaaggaacactttaagtacgtaggcaccaagctccctaagcagacggctgactttctgcaggagtacgtcactaacaagaccaagaagacagaggagctccgaaaaaccgtggaggaccttgatggcctcatccagcaaatctacagagaccaggatctgacccaggaaattgccatggagcattttgtgaagaaggtggaggcagcccattgtgcagcctgcgacctcttcattcccatgcagtttgggatcatccagaagcatctgaagaccatggatcacaaccggaaccgcaggctcatgatggagcagtccaagaagtcctccctcatggtggcccgcagtattctcaacaacaagctcatcagcaagaagctggagcgctacctgaagggcgagaaccctttcaccgacagccccgaggaggagaaggagcaggaggaggctgagggcggtgccctggacgagggggcgcagggcgaagcggcagggatctcggagggcgcagagggcgtgccggcgcagcctcccgtgcccccagagccagcccccggggccgtgtcgccgccaccgccgccgcccccagaggaggaggaggagggcgccgtgcccttgctgggaggggcgctgcaacgccagatccgcggcatcccgggcctcgacgtggaggacgacgaggagggcggcgggggcgccccgtgacccgagctcggggcgggcggagcccgcgtggccgaagctggaaaccaaacctaataaagttttcccatccca

SEQ ID NO: 103124 - DNA, 548 bp, Homo sapiens
  Payload ID: 115
  Gene Symbol: AKAP8L
  Gene Name: A kinase (PRKA) anchor protein 8-like
  ENST ID: ENST00000595067
  CDS Start-End: 66-548
atcgcagcgtcggatgttcagagcagcagaagccggcgtcgtcggatgttgtgttgcccgccaccatgagctacacaggctttgtccagggatctgaaaccactttgcagtcgacatactcggataccagcgctcagcccacctgtgattatgatacccttgtatctgtgtttgtctctgtctctgtctgcctcccctctgcctgcccccaccatctgtctgtctctgtctccctcactgcaggctacgagggctatggctatggctatggctatggccaggataacaccaccaactatgggtatggtatggccacttcacactcttgggaaatgcctagctctgacacaaatgcaaacactagtgcctcgggtagcgccagtgccgattccgttttatccagaattaaccagcgcttagatatggtgccgcatttggagacagacatgatgcaaggaggcgtgtacggctcaggtggagaaaggtatgactcttatgagtcctgcgactcgagggccgtcctgagtgagcgcgacctgtaccggtca

SEQ ID NO: 103125 - DNA, 1933 bp, Homo sapiens
  Payload ID: 115
  Gene Symbol: AKAP8L
  Gene Name: A kinase (PRKA) anchor protein 8-like
  Uniprot ID: Q9ULX6
  ENST ID: ENST00000595465
  CDS Start-End: 104-1861
gggtgtgtgtggaggggaccctgtggttagcagcagctatcgcagcgtcggatgttcagagcagcagaagccggcgtcgtcggatgttgtgttgcccgccaccatgagctacacaggctttgtccagggatctgaaaccactttgcagtcgacatactcggataccagcgctcagcccacctgtgattatggatatggaacttggaactctgggacaaatagaggctacgagggctatggctatggctatggctatggccaggataacaccaccaactatgggtatgactcttatgagtcctgcgactcgagggccgtcctgagtgagcgcgacctgtaccggtcaggctatgactacagcgagcttgaccctgagatggaaatggcctatgagggccaatacgatgcctaccgcgaccagttccgcatgcgtggcaacgacaccttcggtcccagggcacagggctgggcccgggatgcccggagcggccggccaatggcctcaggctatgggcgcatgtgggaagaccccatgggggcccggggccagtgcatgtctggtgcctctcggctgccctccctcttctcccagaacatcatccccgagtacggcatgttccagggcatgcgaggtgggggcgccttcccgggcggctcccgctttggtttcgggtttggcaatggcatgaagcagatgaggcggacctggaagacctggaccacagccgacttccgaaccaagaagaagaagagaaagcagggcggcagtcctgatgagccagatagcaaagccacccgcacggactgctcggacaacagcgactcagacaatgatgagggcaccgagggggaagccacagagggccttgaaggcaccgaggctgtggagaagggctccagagtggacggagaggatgaggagggaaaagaggatgggagagaagaaggcaaagaggatccagagaagggggccctaaccacccaggatgaaaatggccagaccaagcgcaagttgcaggcaggcaagaagagtcaggacaagcagaaaaagcggcagcgagaccgcatggtggaaaggatccagtttgtgtgttctctgtgcaaataccggaccttctatgaggacgagatggccagccatcttgacagcaagttccacaaggaacactttaagtacgtaggcaccaagctccctaagcagacggctgactttctgcaggagtacgtcactaacaagaccaagaagacagaggagctccgaaaaaccgtggaggaccttgatggcctcatccagcaaatctacagagaccaggatctgacccaggaaattgccatggagcattttgtgaagaaggtggaggcagcccattgtgcagcctgcgacctcttcattcccatgcagtttgggatcatccagaagcatctgaagaccatggatcacaaccggaaccgcaggctcatgatggagcagtccaagaagtcctccctcatggtggcccgcagtattctcaacaacaagctcatcagcaagaagctggagcgctacctgaagggcgagaaccctttcaccgacagccccgaggaggagaaggagcaggaggaggctgagggcggtgccctggacgagggggcgcagggcgaagcggcagggatctcggagggcgcagagggcgtgccggcgcagcctcccgtgcccccagagccagcccccggggccgtgtcgccgccaccgccgccgcccccagaggaggaggaggagggcgccgtgcccttgctgggaggggcgctgcaacgccagatccgcggcatcccgggcctcgacgtggaggacgacgaggagggcggcgggggcgccccgtgacccgagctcggggcgggcggagcccgcgtggccgaagctggaaaccaaacctaataaagttttcccatccca

SEQ ID NO: 103126 - DNA, 608 bp, Homo sapiens
  Payload ID: 115
  Gene Symbol: AKAP8L
  Gene Name: A kinase (PRKA) anchor protein 8-like
  ENST ID: ENST00000599137
  CDS Start-End: 98-235
gtgtggaggggaccctgtggttagcagcagctatcgcagcgtcggatgttcagagcagcagaagccggcgtcgtcggatgttgtgttgcccgccaccatgagctacacaggctttgtccagggatctgaaaccactttgcagtcgacatactcggataccagcgctcagcccacctgtgattatggatatggaacttggaactctgggacaaatagagaattaaccagcgcttagatatggtgccgcatttggagacagacatgatgcaaggaggcgtgtacggctcaggtggagaaaggtatgactcttatgagtcctgcgactcgagggccgtcctgagtgagcgcgacctgtaccggtcaggctatgactacagcgagcttgaccctgagatggaaatggcctatgagggccaatacgatgcctaccgcgaccagttccgcatgcgtggcaacgacaccttcggtcccagggcacagggctgggcccgggatgcccggagcggccggccaatggcctcaggctatgggcgcatgtgggaagaccccatgggggcccggggccagtgcatgtctggtgcctctcggctgccctccctcttctccca

SEQ ID NO: 103127 - DNA, 583 bp, Homo sapiens
  Payload ID: 115
  Gene Symbol: AKAP8L
  Gene Name: A kinase (PRKA) anchor protein 8-like
  ENST ID: ENST00000600247
  CDS Start-End: 257-583
attgccagcagcttccagccactgatatgaggaggcatagagatagacagcggttccttccaatagacgtgaagccgaggccggctttgtccagggatctgaaaccactttgcagtcgacatactcggataccagcgctcagcccacctgtgattatggatatggaacttggaactctgggacaaatagaggctacgagggctatggctatggctatggctatggccaggataacaccaccaactatgggtatggtatggccacttcacactcttgggaaatgcctagctctgacacaaatgcaaacactagtgcctcgggtagcgccagtgccgattccgttttatccagaattaaccagcgcttagatatggtgccgcatttggagacagacatgatgcaaggaggcgtgtacggctcaggtggagaaaggtatgactcttatgagtcctgcgactcgagggccgtcctgagtgagcgcgacctgtaccggtcaggctatgactacagcgagcttgaccctgagatggaaatggcctatgagggccaatacgatgcctaccgcgaccagttccgcatgcgt

SEQ ID NO: 103128 - DNA, 2113 bp, Homo sapiens
  Payload ID: 115
  Gene Symbol: AKAP8L
  Gene Name: A kinase (PRKA) anchor protein 8-like
  ENST ID: ENST00000609519
  CDS Start-End: 66-1361
atcgcagcgtcggatgttcagagcagcagaagccggcgtcgtcggatgttgtgttgcccgccaccatgagctacacaggctttgtccagggatctgaaaccactttgcagtcgacatactcggataccagcgctcagcccacctgtgattatggatatggaacttggaactctgggacaaatagaggctacgagggctatggctatggctatggctatggccaggataacaccaccaactatggaattaaccagcgcttagatatggtgccgcatttggagacagacatgatgcaaggaggcgtgtacggctcaggtggagaaaggtatgactcttatgagtcctgcgactcgagggccgtcctgagtgagcgcgacctgtaccggtcaggctatgactacagcgagcttgaccctgagatggaaatggcctatgagggccaatacgatgcctaccgcgaccagttccgcatgcgtggcaacgacaccttcggtcccagggcacagggctgggcccgggatgcccggagcggccggccaatggcctcaggctatgggcgcatgtgggaagaccccatgggggcccggggccagtgcatgtctggtgcctctcggctgccctccctcttctcccagaacatcatccccgagtacggcatgttccagggcatgcgaggtgggggcgccttcccgggcggctcccgctttggtttcgggtttggcaatggcatgaagcagatgaggcggacctggaagacctggaccacagccgacttccgaaccaagaagaagaagagaaagcagggcggcagtcctgatgagccagatagcaaagccacccgcacggactgctcggacaacagcgactcagacaatgatgagggcaccgagggggaagccacagagggccttgaaggcaccgaggctgtggagaagggctccagagtggacggagaggatgaggagggaaaagaggatgggagagaagaaggcaaagaggatccagagaagggggccctaaccacccaggatgaaaatggccagaccaagcgcaagttgcaggcaggcaagaagagtcaggacaagcagaaaaagcggcagcgagaccgcatggtggaaagggctcccgcactggcgcttgcctcctccgcctcagactcttgctcttgctggaccttcctcagcctcgccggcgcccggcccctgggctctccagacaaagctgaccccgtggcccagataaggacgtccggcagaggatccagtttgtgtgttctctgtgcaaataccggaccttctatgaggacgagatggccagccatcttgacagcaagttccacaaggaacactttaagtacgtaggcaccaagctccctaagcagacggctgactttctgcaggagtacgtcactaacaagaccaagaagacagaggagctccgaaaaaccgtggaggaccttgatggcctcatccagcaaatctacagagaccaggatctgacccaggaaattgccatggagcattttgtgaagaaggtggaggcagcccattgtgcagcctgcgacctcttcattcccatgcagtttgggatcatccagaagcatctgaagaccatggatcacaaccggaaccgcaggctcatgatggagcagtccaagaagtcctccctcatggtggcccgcagtattctcaacaacaagctcatcagcaagaagctggagcgctacctgaagggcgagaaccctttcaccgacagccccgaggaggagaaggagcaggaggaggctgagggcggtgccctggacgagggggcgcagggcgaagcggcagggatctcggagggcgcagagggcgtgccggcgcagcctcccgtgcccccagagccagcccccggggccgtgtcgccgccaccgccgccgcccccagaggaggaggaggagggcgccgtgcccttgctgggaggggcgctgcaacgccagatccgcggcatcccgggcctcgacgtggaggacgacgaggagggcggcgggggcgccccgtgacccgagctcggggcgggcggagcccgcgtggccgaagctggaaaccaaacctaataaagttttcccatccca

SEQ ID NO: 103129 - DNA, 12471 bp, Homo sapiens
  Payload ID: 116
  Gene Symbol: AKAP9
  Gene Name: A kinase (PRKA) anchor protein 9
  Uniprot ID: Q99996
  ENST ID: ENST00000356239
  CDS Start-End: 234-11957
tacgtggagacgaagatggcggcggcggcggcggtgacggcgcttcccgtgcggctgaggacgatccgccagtgagcgcggagactgcttccacttcgggcgggggagcgccggaccgaatcggctctctaggccgtggagcttgccgtcccacctccgtccaaatcgacctttcctttctatccccaaccacccctcaacccctgttttcccctgccttccttgcagaggccatggaggacgaggagagacagaagaagctggaggccggcaaagccaagcttgcccagtttcgacaaagaaaagctcagtcggatgggcagagtccttccaagaagcagaaaaaaaagagaaaaacgtcaagcagtaaacatgatgtgtcagcacaccatgatttgaatattgatcaatcacagtgtaatgaaatgtacataaatagttctcagagagtagaatcaactgtgattcctgaatctacaataatgagaactctacatagtggagaaataaccagtcatgagcagggcttctctgtggaactggaaagtgaaatttcaaccacagcagatgactgcagttcagaggtaaatggttgcagttttgtgatgagaacaggaaagcctacaaatttattaagggaagaagaatttggtgttgatgattcttattctgaacaaggagcacaagacagtccgactcatctagagatgatggaaagtgagttggctgggaagcagcatgagattgaagagctaaacagagagctggaagaaatgagggttacctatgggactgaaggactgcagcagttacaagaatttgaagctgccattaaacaaagagatggcattataacccagctcactgctaatttacaacaagcaagaagagaaaaggatgagacaatgagagaatttttagagttgacagaacagagtcaaaaattacagattcaatttcagcaattacaggctagtgaaactctgagaaacagcactcatagtagcacagctgcagacttactacaagccaaacaacagatcctcactcatcaacagcagcttgaagaacaagaccacttattagaagattatcagaaaaagaaagaagacttcacaatgcaaattagtttcttgcaagagaaaattaaagtatatgaaatggaacaagataaaaaagtagaaaactcaaataaagaagaaatacaggaaaaggagacaatcattgaagaattaaacacaaaaataatagaagaagaaaagaaaactcttgagctaaaggataaattaacaactgctgataaattactaggagaattacaagaacagattgtgcaaaagaaccaagaaataaaaaacatgaaattagagctgactaattctaagcaaaaagaaagacagtcttctgaagaaataaaacagttaatggggacagtcgaagaacttcagaagagaaatcataaagacagccagttcgaaactgatatagtacaacgaatggaacaagaaacacaaagaaagttagaacaactccgggcagagctggatgagatgtatgggcagcagatagtgcaaatgaaacaagaattaataagacaacacatggcacagatggaggaaatgaaaacacggcataagggagaaatggagaatgctttaaggtcatattcaaatattacagttaatgaagatcagataaagttaatgaatgtggcaataaatgaactgaatataaaattgcaagatactaactctcaaaaggaaaaactcaaggaagaactaggactaattttagaagaaaagtgtgctctacagagacagcttgaagaccttgttgaagaattgagcttttcaagggaacagattcagagagctagacagacaatagctgaacaagaaagtaaacttaatgaagcacataagtcccttagtacagtggaagatttgaaagctgagattgtttctgcatctgaatccagaaaggaactagaattaaaacatgaagcagaagttacaaattacaagataaaacttgaaatgttagaaaaagaaaagaatgctgtgttagacagaatggctgaatcacaagaagctgaattagagaggctgagaacacagcttctatttagtcacgaagaagagctttccaaactgaaggaagatttagaaattgaacatcgaataaatattgaaaaacttaaagataatttaggcattcactataaacagcagatagatggtttacagaatgaaatgagtcaaaagatagaaaccatgcagtttgaaaaggacaatttgataactaagcagaatcaattaattttggaaatttcaaagctaaaagatttacagcagtctcttgtaaattcaaagtcagaagaaatgactcttcaaatcaatgaacttcaaaaagaaattgaaatactcagacaagaagaaaaagaaaagggtacacttgaacaagaagttcaagaattacaacttaaaacagaattgttagaaaaacagatgaaggaaaaagagaatgatcttcaagaaaaatttgcacaacttgaagcagagaatagcattcttaaagatgaaaagaaaacccttgaagacatgttgaaaatacatactcctgttagccaagaagaaagattgattttcttagactccattaagtccaaatccaaagactctgtgtgggaaaaagaaatagaaatacttatagaggaaaatgaggacctcaaacaacaatgtattcagctaaatgaagagattgaaaagcaaaggaacactttttcatttgctgaaaaaaactttgaagttaactatcaagagttacaagaggagtatgcttgccttctcaaagtaaaagatgatttagaagacagtaaaaataaacaggaattagagtataaaagtaaacttaaagcacttaatgaagagcttcatttgcaaagaataaatccaactacagtgaaaatgaaaagttctgtctttgatgaagacaaaacttttgtagcagaaacattggaaatgggtgaggttgttgaaaaggatacaacagaactcatggaaaaacttgaggtaaccaagcgagagaaattagagctgtcacagagactgtctgatctttctgaacaattgaaacagaaacatggtgagattagttttctaaatgaagaagttaaatctttaaagcaagagaaagaacaagtttcattgagatgtagagagctagaaatcattattaaccacaacagggcagaaaatgtacagtcatgtgatactcaagtaagctctttattagatggagttgtgaccatgacaagcaggggtgctgaaggatcagtttctaaagtaaataaaagttttggtgaagaatcaaaaataatggtggaagataaagtttcttttgaaaatatgactgttggagaagaaagtaagcaagaacagttgattttggatcacttaccatctgtaacaaaggaatcatcacttagagcaactcaaccaagtgaaaatgataaacttcagaaagaactcaatgtacttaaatcagaacagaatgatttaaggctacagatggaagcccaacgcatttgcctctctctggtttattcaactcatgtggatcaggttcgtgaatatatggaaaatgaaaaagataaagctctttgcagtcttaaagaagagcttatttttgctcaagaggaaaagatcaaggaacttcagaaaatacaccagttagaactacagactatgaaaacacaagaaacaggtgatgaaggaaagcctttacatctgctcattggaaaacttcaaaaggcagtgtctgaagaatgttcttattttttacagactttatgcagtgtccttggtgaatattatactcctgctttaaaatgtgaagtaaatgcagaagacaaagagaattctggtgattacatttctgaaaatgaagatccagaattacaagattatagatatgaagttcaagactttcaagaaaatatgcacactcttctcaacaaagtaacagaagaatacaacaaactcttggtacttcaaacacgactaagcaagatctggggacagcagacagatggtatgaaacttgaatttggagaagaaaaccttccaaaagaggaaacagagtttttatcaatccattctcagatgaccaatttggaagacattgatgtcaatcataaaagcaagttatcttctctgcaagatcttgaaaaaactaaacttgaagaacaagttcaagaattagaaagcctcatatcctctttgcagcaacagttgaaagaaactgaacaaaactatgaggcagagatccactgtttacagaagaggcttcaagctgttagtgagtccacggttccgccaagcttacctgttgattcggtggtaattacagaatctgatgcacagagaacaatgtaccctggaagttgtgtgaaaaagaatattgatggtacaatagagttttctggtgaatttggagtgaaagaggaaacaaatatcgttaagttgcttgaaaaacaataccaagaacaattagaagaagaagtagctaaggttattgtgtcaatgagtatagcatttgctcaacaaactgaactgtctagaatatctgggggaaaagaaaatactgcatcatcaaagcaagcacatgctgtgtgtcagcaagaacaacattattttaatgaaatgaaattatcacaggatcaaattggttttcagacttttgagacagtggatgtgaaatttaaagaagaatttaaaccacttagtaaagagttaggagaacatggaaaggaaattttattatcaaatagtgatccccatgatataccagaatcaaaggactgtgtgctgactatttcagaagaaatgttctccaaagataaaacatttatagttagacagtctattcatgatgagatttcagtgtcaagcatggatgcttctagacaactaatgttgaatgaagaacagttggaagatatgagacaggaacttgtacgacaataccaagaacatcaacaggcaacggaattgttaaggcaagcacatatgcggcaaatggagagacagcgagaagaccaggaacagctacaagaagagattaagagacttaatagacaattagcccagagatcctccatagataatgaaaacctggtttcagagagagagagggtgcttttagaggagctggaagcactaaagcagctgtctttagctggaagagagaagctgtgttgtgagctgcgcaacagcagtacgcaaacacagaatggaaatgaaaaccaaggagaagttgaagaacaaacatttaaagaaaaggaattagacagaaaacctgaagatgtgcctcctgagattttgtctaatgaaaggtatgcactccagaaagctaataatagacttttgaagatcctcttagaagttgtaaagacaacagcagctgttgaagaaacaattggtcgccatgtccttgggattctagatagatctagtaaaagccagtcatctgccagcctaatttggaggtcagaagcagaggcatctgtaaagtcatgtgtccatgaggaacatacaagagttacagatgaatccattccctcttattctggaagtgatatgccaagaaatgacattaacatgtggtcaaaagtaactgaggaaggaacagagctgtcacaacgacttgtgaggagtggttttgctggaactgaaatagaccctgaaaatgaagaacttatgctgaacattagctctcgactacaagcagcagttgaaaaactcctagaagccataagtgaaactagcagtcagcttgaacatgcgaaagtgacacagacagagttgatgcgtgagtcatttagacagaaacaagaagcaacagagtcccttaagtgccaagaggaacttcgagagcgccttcatgaggagtccagggccagagaacagctagctgtggagctcagtaaggctgagggcgtcattgatggctatgcagatgaaaaaactctttttgaaaggcaaattcaggaaaaaactgatataatagatcgtcttgagcaggagttgttatgtgcaagtaacaggttgcaagaattggaggcagagcaacagcagatccaagaagaaagagaattactgtccagacaaaaggaagctatgaaagcagaggcaggcccagttgaacaacaattactacaggagacagaaaaattaatgaaggaaaaactagaagtacaatgtcaagctgaaaaagtacgtgatgaccttcaaaaacaagtgaaagctctagaaatagatgtggaagaacaagtcagtaggtttatagagctggaacaagaaaaaaatactgaactaatggatttaagacagcaaaaccaagcattggaaaagcagttagaaaaaatgagaaaatttttagatgagcaagccattgacagagaacatgagagagatgtattccaacaggaaatacagaaactagaacagcaacttaaggttgttcctcgattccagcctatcagtgaacatcaaactagagaggttgaacagttagcaaatcatctgaaagaaaaaacagacaaatgcagtgagcttttgctctctaaagagcagcttcaaagggatatacaagaaaggaatgaagaaatagagaaactggagttcagagtaagagaactggagcaggcgcttcttgtgagtgcagatacttttcaaaaggtagaggaccgaaaacactttggagctgtagaagctaaaccagaattgtccctagaagtacaattgcaggctgaacgagatgccatagacagaaaggaaaaagagattacaaacttagaagagcaattagaacagtttagagaagaactggaaaataagaatgaagaagttcaacaattacatatgcaattagaaatacagaaaaaggaatctactacccgcctacaagaacttgaacaggaaaacaaattatttaaggatgacatggagaaactgggacttgccataaaggaatctgatgccatgtctactcaagaccaacatgtgctatttgggaaatttgctcaaataatacaggaaaaagaggtagaaattgaccaattaaatgaacaagttacgaaactccagcagcaacttaaaattacaacagataacaaggttattgaagaaaaaaatgaactgataagggatcttgaaacccaaatagaatgtttgatgagtgatcaagaatgtgtgaagagaaatagagaagaagaaatagagcagctcaatgaagtgattgaaaaacttcaacaggaattggcaaatattggacagaagacatcaatgaatgctcattccctctcagaagaagcagacagtttaaaacatcaattggatgtggttatagctgaaaagctggccttggaacagcaagtagaaaccgctaatgaagaaatgaccttcatgaaaaatgtacttaaagaaaccaattttaaaatgaatcagctaacacaggaattattcagcttaaagagagaacgtgaaagtgtggaaaagattcaaagcataccagagaatagtgttaacgtggctatagatcatctgagcaaagacaaacctgaactagaagtagtccttacagaggatgctcttaaatccctagaaaatcagacatacttcaaatcttttgaagaaaatggcaaaggttccataattaatttggaaacaaggttgctacaacttgagagcactgttagtgcaaaggacttagaacttacccagtgttataaacaaataaaagacatgcaagaacaaggccagtttgaaacagaaatgcttcaaaagaagattgtaaacctacagaaaatagttgaagaaaaagtggctgctgctcttgtcagtcaaatccaacttgaggcagttcaggaatatgcaaaattctgtcaagataatcaaacaatttcatcagaacctgaaagaacaaatattcagaatttaaatcaactaagagaagatgagttggggtcagatatatcagcattaaccttgagaatatcagaattagaaagccaggttgttgaaatgcatactagtttgattttagaaaaagaacaagtagaaattgcagaaaaaaatgttttagaaaaagaaaagaagctgctagaactacagaagctattggagggcaatgagaaaaaacagagagagaaagaaaagaaaagaagccctcaagatgttgaagttctcaagacaactactgagctatttcatagcaatgaagaaagtggattttttaatgaactcgaggctcttagagctgaatcagtggctaccaaagcagaacttgccagttataaagaaaaggctgaaaaacttcaagaagagcttttggtaaaagaaacaaatatgacatctcttcagaaagacttaagccaagttagggatcacctcgcagaggcaaaagagaaattgtccattttagaaaaagaagatgagactgaggtacaagaaagcaaaaaggcctgcatgtttgagccacttcctataaaactgagtaagagcattgcatcccagacagatgggactctgaagatcagtagcagcaatcagactccacaaattcttgttaaaaatgcaggaatacaaattaatttacagagtgaatgttcctcagaagaagttactgaaataatcagtcagtttactgaaaaaattgagaagatgcaagaactacatgctgctgaaattttggacatggaatccagacatatttcagaaactgaaaccttaaagagggaacactatgttgccgttcagttactgaaagaggaatgtggtaccttgaaggcagtgatacagtgtctgagaagtaaagagggatcctcaattcctgagctagcacattctgatgcttaccagactagagaaatatgctccagtgattctggatcagactggggtcagggaatttatcttacacacagtcagggatttgacatagcatcagaaggccgaggagaagaaagtgaaagtgcaacagattcctttccaaagaaaataaagggattactgagagctgtccataatgaaggcatgcaggtgctttctctcactgagtctccctatagtgatggagaggaccattctattcagcaggtttcagaaccttggctagaagagagaaaagcttacatcaatacaatctcatctctaaaggatttaattacaaagatgcaactgcaaagagaagccgaggtttatgatagttctcaatctcatgagagcttctcagactggcgaggtgaactactgcttgcccttcaacaagttttcttagaagagcgtagtgttttactagcagcatttcggacggagctgacagctctaggtactacagatgcagttggtttactaaactgtttggaacagagaatacaagaacagggtgttgaatatcaagcagctatggaatgcctccagaaagcagatagaaggagtttgttatctgaaattcaggcactgcatgcacaaatgaatggtaggaaaattactctgaaaagagaacaagagagtgagaaaccaagccaagaactcttggaatataatatacagcagaagcagtctcaaatgctggagatgcaagtggagctcagcagtatgaaagacagagcaacggaactgcaggagcagctgagttctgagaaaatggtggttgctgaactgaagagtgagcttgcacaaactaaattggaactagaaacaacactcaaggcacagcataaacacctaaaagaattggaggctttcaggttggaagttaaagataagacagatgaagtacatttgcttaatgacacattagcaagtgaacagaaaaaatcaagagagctccagtgggctttggagaaagagaaagccaagttgggacgcagtgaagaacgggataaagaagaacttgaggatctgaagttttcacttgagagtcagaaacaaaggaatcttcagctaaatctacttttggaacaacagaaacaactactgaacgaatcccagcaaaaaatagaatcacagagaatgctatatgatgcccagttgtcagaagaacaaggtcgaaacttagagcttcaggtacttcttgaatctgagaaagttcgaattcgggaaatgagtagtaccctagatagggagcgggaattgcacgcacagctgcagagcagtgatggtactggacagtctcggccacccttgccctcagaggacctactgaaagagctgcagaaacagctagaggaaaaacacagtcgcatagtagaattgttaaatgagactgaaaaatataaactggattctttgcaaacacgacagcaaatggaaaaagataggcaggttcacaggaaaacactgcagacagaacaggaggccaacactgagggacagaaaaaaatgcatgagctccagtccaaagtggaagatcttcagcgccagctggaagagaaaagacaacaagtttataagttagaccttgaaggacagcgactacaaggaatcatgcaggaattccagaagcaagaactagaacgagaagaaaaacgagaaagtagaagaattctgtatcagaaccttaatgagccaaccacgtggagcttaaccagtgatagaactagaaattgggttcttcaacagaaaatagaaggagaaacaaaagaatcaaactacgctaaattgattgaaatgaatggaggaggaaccggctgtaatcatgaattagaaatgatcagacaaaagcttcaatgtgtagcttcaaaactacaggttctaccccagaaagcctctgagagactacagtttgaaacagcagatgatgaagatttcatttgggttcaggaaaatattgatgaaattattttacaactacagaaattaactggccagcaaggtgaagagcccagcttggtgtccccaagtacttcttgtggctcattgactgaaagactactgagacaaaatgctgagctgacagggcatatcagtcaactgactgaagagaagaatgacttaaggaacatggttatgaagctggaagagcagatcaggtggtatcgacagacaggagctggtagagataattcttccaggttttcattgaatggtggtgccaacattgaagccatcattgcctctgaaaaagaagtatggaacagagaaaaattgactctccagaaatctttgaaaagggcagaggctgaagtatacaaactgaaagctgaactaagaaatgactctttacttcaaactctgagccctgattctgaacatgtcactttaaagagaatttatggtaaatacttgagggcagaaagttttcgaaaggctctcatttaccagaagaaatacctgctgctgttactgggtgggttccaggaatgtgaagatgccaccttggccctgcttgcccggatgggggggcagccagctttcacggatctagaggtgatcaccaatcgcccaaagggcttcaccaggtttcggtcggccgtcagagtatccattgcaatttccagaatgaaatttttggttcgacggtggcatcgagtcacaggttctgtttccatcaatattaacagagatggctttggactgaatcaaggtgcagaaaagactgactcattttatcattcttctggtgggctggagttatatggagaaccaagacatactacgtatcgctcaagatcagatctggactatattaggtcccctttaccatttcagaataggtacccaggcactccagctgatttcaatcctggttctttagcatgttctcagcttcagaattacgatcctgacagagccctaacagattatatcactcggctagaggcactgcaaagacgacttggaactatacagtcaggttcaactactcaatttcatgctggcatgagaagataatcctttgaaacatcattaattgaagtgattttaaatagatttccttttgtaaatcaatggttcttttgtgcttttgtattgtgaatattcaatgggaccaatatgaacacagcttatgattgtatacaaatcccttgccagcacatgaaaacaaactggaatttgtatatataagcattgtgtatgtattcatgcacaataattattgaattacctgtatatttgtggaatgctaatttaaaacattaaattataaaccttgtgtatttatcaaatgggtgaaaagattaaacttttacgcattacaatactgctgaatgtgtagctcgaggtgtcctgcacttttcttataaggctactgaagttacatgttttgcctaatatattctactggtgatgaagacagataatatcacttgtagagacctatttttgtataatggtagaagttttgaattttatggggtattttgtcaagtactgaaataaaaatgacttcaccattttcaccaca

SEQ ID NO: 103130 - DNA, 10309 bp, Homo sapiens
  Payload ID: 116
  Gene Symbol: AKAP9
  Gene Name: A kinase (PRKA) anchor protein 9
  ENST ID: ENST00000358100
  CDS Start-End: 1-9381
atggaggacgaggagagacagaagaagctggaggccggcaaagccaagcttgcccagtttcgacaaagaaaagctcagtcggatgggcagagtccttccaagaagcagaaaaaaaagagaaaaacgtcaagcagtaaacatgatgtgtcagcacaccatgatttgaatattgatcaatcacagtgtaatgaaatgtacataaatagttctcagagagtagaatcaactgtgattcctgaatctacaataatgagaactctacatagtggagaaataaccagtcatgagcagggcttctctgtggaactggaaagtgaaatttcaaccacagcagatgactgcagttcagaggtaaatggttgcagttttgtgatgagaacaggaaagcctacaaatttattaagggaagaagaatttggtgttgatgattcttattctgaacaaggagcacaagacagtccgactcatctagagatgatggaaagtgagttggctgggaagcagcatgagattgaagagctaaacagagagctggaagaaatgagggttacctatgggactgaaggactgcagcagttacaagaatttgaagctgccattaaacaaagagatggcattataacccagctcactgctaatttacaacaagcaagaagagaaaaggatgagacaatgagagaatttttagagttgacagaacagagtcaaaaattacagattcaatttcagcaattacaggctagtgaaactctgagaaacagcactcatagtagcacagctgcagacttactacaagccaaacaacagatcctcactcatcaacagcagcttgaagaacaagaccacttattagaagattatcagaaaaagaaagaagacttcacaatgcaaattagtttcttgcaagagaaaattaaagtatatgaaatggaacaagataaaaaagtagaaaactcaaataaagaagaaatacaggaaaaggagacaatcattgaagaattaaacacaaaaataatagaagaagaaaagaaaactcttgagctaaaggataaattaacaactgctgataaattactaggagaattacaagaacagattgtgcaaaagaaccaagaaataaaaaacatgaaattagagctgactaattctaagcaaaaagaaagacagtcttctgaagaaataaaacagttaatggggacagtcgaagaacttcagaagagaaatcataaagacagccagttcgaaactgatatagtacaacgaatggaacaagaaacacaaagaaagttagaacaactccgggcagagctggatgagatgtatgggcagcagatagtgcaaatgaaacaagaattaataagacaacacatggcacagatggaggaaatgaaaacacggcataagggagaaatggagaatgctttaaggtcatattcaaatattacagttaatgaagatcagataaagttaatgaatgtggcaataaatgaactgaatataaaattgcaagatactaactctcaaaaggaaaaactcaaggaagaactaggactaattttagaagaaaagtgtgctctacagagacagcttgaagaccttgttgaagaattgagcttttcaagggaacagattcagagagctagacagacaatagctgaacaagaaagtaaacttaatgaagcacataagtcccttagtacagtggaagatttgaaagctgagattgtttctgcatctgaatccagaaaggaactagaattaaaacatgaagcagaagttacaaattacaagataaaacttgaaatgttagaaaaagaaaagaatgctgtgttagacagaatggctgaatcacaagaagctgaattagagaggctgagaacacagcttctatttagtcacgaagaagagctttccaaactgaaggaagatttagaaattgaacatcgaataaatattgaaaaacttaaagataatttaggcattcactataaacagcagatagatggtttacagaatgaaatgagtcaaaagatagaaaccatgcagtttgaaaaggacaatttgataactaagcagaatcaattaattttggaaatttcaaagctaaaagatttacagcagtctcttgtaaattcaaagtcagaagaaatgactcttcaaatcaatgaacttcaaaaagaaattgaaatactcagacaagaagaaaaagaaaagggtacacttgaacaagaagttcaagaattacaacttaaaacagaattgttagaaaaacagatgaaggaaaaagagaatgatcttcaagaaaaatttgcacaacttgaagcagagaatagcattcttaaagatgaaaagaaaacccttgaagacatgttgaaaatacatactcctgttagccaagaagaaagattgattttcttagactccattaagtccaaatccaaagactctgtgtgggaaaaagaaatagaaatacttatagaggaaaatgaggacctcaaacaacaatgtattcagctaaatgaagagattgaaaagcaaaggaacactttttcatttgctgaaaaaaactttgaagttaactatcaagagttacaagaggagtatgcttgccttctcaaagtaaaagatgatttagaagacagtaaaaataaacaggaattagagtataaaagtaaacttaaagcacttaatgaagagcttcatttgcaaagaataaatccaactacagtgaaaatgaaaagttctgtctttgatgaagacaaaacttttgtagcagaaacattggaaatgggtgaggttgttgaaaaggatacaacagaactcatggaaaaacttgaggtaaccaagcgagagaaattagagctgtcacagagactgtctgatctttctgaacaattgaaacagaaacatggtgagattagttttctaaatgaagaagttaaatctttaaagcaagagaaagaacaagtttcattgagatgtagagagctagaaatcattattaaccacaacagggcagaaaatgtacagtcatgtgatactcaagtaagctctttattagatggagttgtgaccatgacaagcaggggtgctgaaggatcagtttctaaagtaaataaaagttttggtgaagaatcaaaaataatggtggaagataaagtttcttttgaaaatatgactgttggagaagaaagtaagcaagaacagttgattttggatcacttaccatctgtaacaaaggaatcatcacttagagcaactcaaccaagtgaaaatgataaacttcagaaagaactcaatgtacttaaatcagaacagaatgatttaaggctacagatggaagcccaacgcatttgcctctctctggtttattcaactcatgtggatcaggttcgtgaatatatggaaaatgaaaaagataaagctctttgcagtcttaaagaagagcttatttttgctcaagaggaaaagatcaaggaacttcagaaaatacaccagttagaactacagactatgaaaacacaagaaacaggtgatgaaggaaagcctttacatctgctcattggaaaacttcaaaaggcagtgtctgaagaatgttcttattttttacagactttatgcagtgtccttggtgaatattatactcctgctttaaaatgtgaagtaaatgcagaagacaaagagaattctggtgattacatttctgaaaatgaagatccagaattacaagattatagatatgaagttcaagactttcaagaaaatatgcacactcttctcaacaaagtaacagaagaatacaacaaactcttggtacttcaaacacgactaagcaagatctggggacagcagacagatggtatgaaacttgaatttggagaagaaaaccttccaaaagaggaaacagagtttttatcaatccattctcagatgaccaatttggaagacattgatgtcaatcataaaagcaagttatcttctctgcaagatcttgaaaaaactaaacttgaagaacaagttcaagaattagaaagcctcatatcctctttgcagcaacagttgaaagaaactgaacaaaactatgaggcagagatccactgtttacagaagaggcttcaagctgttagtgagtccacggttccgccaagcttacctgttgattcggtggtaattacagaatctgatgcacagagaacaatgtaccctggaagttgtgtgaaaaagaatattgatggtacaatagagttttctggtgaatttggagtgaaagaggaaacaaatatcgttaagttgcttgaaaaacaataccaagaacaattagaagaagaagtagctaaggttattgtgtcaatgagtatagcatttgctcaacaaactgaactgtctagaatatctgggggaaaagaaaatactgcatcatcaaagcaagcacatgctgtgtgtcagcaagaacaacattattttaatgaaatgaaattatcacaggatcaaattggttttcagacttttgagacagtggatgtgaaatttaaagaagaatttaaaccacttagtaaagagttaggagaacatggaaaggaaattttattatcaaatagtgatccccatgatataccagaatcaaaggactgtgtgctgactatttcagaagaaatgttctccaaagataaaacatttatagttagacagtctattcatgatgagatttcagtgtcaagcatggatgcttctagacaactaatgttgaatgaagaacagttggaagatatgagacaggaacttgtacgacaataccaagaacatcaacaggcaacggaattgttaaggcaagcacatatgcggcaaatggagagacagcgagaagaccaggaacagctacaagaagagattaagagacttaatagacaattagcccagaatggaaatgaaaaccaaggagaagttgaagaacaaacatttaaagaaaaggaattagacagaaaacctgaagatgtgcctcctgagattttgtctaatgaaaggtatgcactccagaaagctaataatagacttttgaagatcctcttagaagttgtaaagacaacagcagctgttgaagaaacaattggtcgccatgtccttgggattctagatagatctagtaaaagccagtcatctgccagcctaatttggaggtcagaagcagaggcatctgtaaagtcatgtgtccatgaggaacatacaagagttacagatgaatccattccctcttattctggaagtgatatgccaagaaatgacattaacatgtggtcaaaagtaactgaggaaggaacagagctgtcacaacgacttgtgaggagtggttttgctggaactgaaatagaccctgaaaatgaagaacttatgctgaacattagctctcgactacaagcagcagttgaaaaactcctagaagccataagtgaaactagcagtcagcttgaacatgcgaaagtgacacagacagagttgatgcgtgagtcatttagacagaaacaagaagcaacagagtcccttaagtgccaagaggaacttcgagagcgccttcatgaggagtccagggccagagaacagctagctgtggagctcagtaaggctgagggcgtcattgatggctatgcagatgaaaaaactctttttgaaaggcaaattcaggaaaaaactgatataatagatcgtcttgagcaggagttgttatgtgcaagtaacaggttgcaagaattggaggcagagcaacagcagatccaagaagaaagagaattactgtccagacaaaaggaagctatgaaagcagaggcaggcccagttgaacaacaattactacaggagacagaaaaattaatgaaggaaaaactagaagtacaatgtcaagctgaaaaagtacgtgatgaccttcaaaaacaagtgaaagctctagaaatagatgtggaagaacaagtcagtaggtttatagagctggaacaagaaaaaaatactgaactaatggatttaagacagcaaaaccaagcattggaaaagcagttagaaaaaatgagaaaatttttagatgagcaagccattgacagagaacatgagagagatgtattccaacaggaaatacagaaactagaacagcaacttaaggttgttcctcgattccagcctatcagtgaacatcaaactagagaggttgaacagttagcaaatcatctgaaagaaaaaacagacaaatgcagtgagcttttgctctctaaagagcagcttcaaagggatatacaagaaaggaatgaagaaatagagaaactggagttcagagtaagagaactggagcaggcgcttcttgtgagtgcagatacttttcaaaaggtagaggaccgaaaacactttggagctgtagaagctaaaccagaattgtccctagaagtacaattgcaggctgaacgagatgccatagacagaaaggaaaaagagattacaaacttagaagagcaattagaacagtttagagaagaactggaaaataagaatgaagaagttcaacaattacatatgcaattagaaatacagaaaaaggaatctactacccgcctacaagaacttgaacaggaaaacaaattatttaaggatgacatggagaaactgggacttgccataaaggaatctgatgccatgtctactcaagaccaacatgtgctatttgggaaatttgctcaaataatacaggaaaaagaggtagaaattgaccaattaaatgaacaagttacgaaactccagcagcaacttaaaattacaacagataacaaggttattgaagaaaaaaatgaactgataagggatcttgaaacccaaatagaatgtttgatgagtgatcaagaatgtgtgaagagaaatagagaagaagaaatagagcagctcaatgaagtgattgaaaaacttcaacaggaattggcaaatattggacagaagacatcaatgaatgctcattccctctcagaagaagcagacagtttaaaacatcaattggatgtggttatagctgaaaagctggccttggaacagcaagtagaaaccgctaatgaagaaatgaccttcatgaaaaatgtacttaaagaaaccaattttaaaatgaatcagctaacacaggaattattcagcttaaagagagaacgtgaaagtgtggaaaagattcaaagcataccagagaatagtgttaacgtggctatagatcatctgagcaaagacaaacctgaactagaagtagtccttacagaggatgctcttaaatccctagaaaatcagacatacttcaaatcttttgaagaaaatggcaaaggttccataattaatttggaaacaaggttgctacaacttgagagcactgttagtgcaaaggacttagaacttacccagtgttataaacaaataaaagacatgcaagaacaaggccagtttgaaacagaaatgcttcaaaagaagattgtaaacctacagaaaatagttgaagaaaaagtggctgctgctcttgtcagtcaaatccaacttgaggcagttcaggaatatgcaaaattctgtcaagataatcaaacaatttcatcagaacctgaaagaacaaatattcagaatttaaatcaactaagagaagatgagttggggtcagatatatcagcattaaccttgagaatatcagaattagaaagccaggttgttgaaatgcatactagtttgattttagaaaaagaacaagtagaaattgcagaaaaaaatgttttagaaaaagaaaagaagctgctagaactacagaagctattggagggcaatgagaaaaaacagagagagaaagaaaagaaaagaagccctcaagatgttgaagttctcaagacaactactgagctatttcatagcaatgaagaaagtggattttttaatgaactcgaggctcttagagctgaatcagtggctaccaaagcagaacttgccagttataaagaaaaggctgaaaaacttcaagaagagcttttggtaaaagaaacaaatatgacatctcttcagaaagacttaagccaagttagggatcacctcgcagaggcaaaagagaaattgtccattttagaaaaagaagatgagactgaggtacaagaaagcaaaaaggcctgcatgtttgagccacttcctataaaactgagtaagagcattgcatcccagacagatgggactctgaagatcagtagcagcaatcagactccacaaattcttgttaaaaatgcaggaatacaaattaatttacagagtgaatgttcctcagaagaagttactgaaataatcagtcagtttactgaaaaaattgagaagatgcaagaactacatgctgctgaaattttggacatggaatccagacatatttcagaaactgaaaccttaaagagggaacactatgttgccgttcagttactgaaagaggaatgtggtaccttgaaggcagtgatacagtgtctgagaagtaaagagggatcctcaattcctgagctagcacattctgatgcttaccagactagagaaatatgctccagtgattctggatcagactggggtcagggaatttatcttacacacagtcagggatttgacatagcatcagaaggccgaggagaagaaagtgaaagtgcaacagattcctttccaaagaaaataaagggattactgagagctgtccataatgaaggcatgcaggtgctttctctcactgagtctccctatagtgatggagaggaccattctattcagcaggtttcagaaccttggctagaagagagaaaagcttacatcaatacaatctcatctctaaaggatttaattacaaagatgcaactgcaaagagaagccgaggtttatgatagttctcaatctcatgagagcttctcagactggcgaggtgaactactgcttgcccttcaacaagttttcttagaagagcgtagtgttttactagcagcatttcggacggagctgacagctctaggtactacagatgcagttggtttactaaactgtttggaacagagaatacaagaacagggtgttgaatatcaagcagctatggaatgcctccagaaagcagatagaaggagtttgttatctgaaattcaggcactgcatgcacaaatgaatggtaggaaaattactctgaaaagagaacaagagagtgagaaaccaagccaaggtatgttgtatgacaagctcatatggttacacaaacaggtgaaaagatttcactttgttttctttcttattattattaagttaaaacatattttcttggtcacattttcttctcattctcataatgttaaggatacaatctatattaattactctaggggttagaggattgtctaattggtttaaacagctacgttgactttaaaataaactgccattcccctgataaggttaagcccattggattcattctttttctttattttagagctgtatgttaagaaaacagtctttccaatcataaaacagaaaatactctttagaggaaaatccacaatgcatgtaactaattattttttaatccttttttaaaaaaattgtgagccataacatacagaaaattacaaattgcaaatatgcagtatgacgcatttttaaatgagtatctatggaaacatcacccatgtgaatatagccagtatcccaacagccccttctcccaagcacatgctcctctgagtaacttagaggtaatcattgttctgatttttctttagttttactatctatttatatattcctaaaacatttaagtttcaagtttttttctgtttttgaactttatcaatctgtatgtattttttatcttgtttctttcacctctctgtaacattcttccaacattcttccaagttactgcatttttcaagttactgcattcttccaaattagtagtagaacattcttccaagttactgcatttatctctagttcattcattcttgttactctataactctatgaccctgtgtagggccaggcacggtggcttacacctgtaatcccagcactttgggaggctgacgtgggtggatcacgaggtcagaagttcaagatgagcctagccaaaatggtgaaacccagtctctactaaaaatacaaaaattagccaggcgtggtggcgggtgcctgtaaggccagccactcaggagactgaagcagagaattacttgaacccagaaggtggaggttgcagtgagctgaaatcacaccactgcactctagcctgagcgacagagcaagactccatctc

SEQ ID NO: 103131 - DNA, 12247 bp, Homo sapiens
  Payload ID: 116
  Gene Symbol: AKAP9
  Gene Name: A kinase (PRKA) anchor protein 9
  ENST ID: ENST00000359028
  CDS Start-End: 1-11733
atggaggacgaggagagacagaagaagctggaggccggcaaagccaaggtaggagagcccgagggttattttcttttttctcttgcccagtttcgacaaagaaaagctcagtcggatgggcagagtccttccaagaagcagaaaaaaaagagaaaaacgtcaagcagtaaacatgatgtgtcagcacaccatgatttgaatattgatcaatcacagtgtaatgaaatgtacataaatagttctcagagagtagaatcaactgtgattcctgaatctacaataatgagaactctacatagtggagaaataaccagtcatgagcagggcttctctgtggaactggaaagtgaaatttcaaccacagcagatgactgcagttcagaggtaaatggttgcagttttgtgatgagaacaggaaagcctacaaatttattaagggaagaagaatttggtgttgatgattcttattctgaacaaggagcacaagacagtccgactcatctagagatgatggaaagtgagttggctgggaagcagcatgagattgaagagctaaacagagagctggaagaaatgagggttacctatgggactgaaggactgcagcagttacaagaatttgaagctgccattaaacaaagagatggcattataacccagctcactgctaatttacaacaagcaagaagagaaaaggatgagacaatgagagaatttttagagttgacagaacagagtcaaaaattacagattcaatttcagcaattacaggctagtgaaactctgagaaacagcactcatagtagcacagctgcagacttactacaagccaaacaacagatcctcactcatcaacagcagcttgaagaacaagaccacttattagaagattatcagaaaaagaaagaagacttcacaatgcaaattagtttcttgcaagagaaaattaaagtatatgaaatggaacaagataaaaaagtagaaaactcaaataaagaagaaatacaggaaaaggagacaatcattgaagaattaaacacaaaaataatagaagaagaaaagaaaactcttgagctaaaggataaattaacaactgctgataaattactaggagaattacaagaacagattgtgcaaaagaaccaagaaataaaaaacatgaaattagagctgactaattctaagcaaaaagaaagacagtcttctgaagaaataaaacagttaatggggacagtcgaagaacttcagaagagaaatcataaagacagccagttcgaaactgatatagtacaacgaatggaacaagaaacacaaagaaagttagaacaactccgggcagagctggatgagatgtatgggcagcagatagtgcaaatgaaacaagaattaataagacaacacatggcacagatggaggaaatgaaaacacggcataagggagaaatggagaatgctttaaggtcatattcaaatattacagttaatgaagatcagataaagttaatgaatgtggcaataaatgaactgaatataaaattgcaagatactaactctcaaaaggaaaaactcaaggaagaactaggactaattttagaagaaaagtgtgctctacagagacagcttgaagaccttgttgaagaattgagcttttcaagggaacagattcagagagctagacagacaatagctgaacaagaaagtaaacttaatgaagcacataagtcccttagtacagtggaagatttgaaagctgagattgtttctgcatctgaatccagaaaggaactagaattaaaacatgaagcagaagttacaaattacaagataaaacttgaaatgttagaaaaagaaaagaatgctgtgttagacagaatggctgaatcacaagaagctgaattagagaggctgagaacacagcttctatttagtcacgaagaagagctttccaaactgaaggaagatttagaaattgaacatcgaataaatattgaaaaacttaaagataatttaggcattcactataaacagcagatagatggtttacagaatgaaatgagtcaaaagatagaaaccatgcagtttgaaaaggacaatttgataactaagcagaatcaattaattttggaaatttcaaagctaaaagatttacagcagtctcttgtaaattcaaagtcagaagaaatgactcttcaaatcaatgaacttcaaaaagaaattgaaatactcagacaagaagaaaaagaaaagggtacacttgaacaagaagttcaagaattacaacttaaaacagaattgttagaaaaacagatgaaggaaaaagagaatgatcttcaagaaaaatttgcacaacttgaagcagagaatagcattcttaaagatgaaaagaaaacccttgaagacatgttgaaaatacatactcctgttagccaagaagaaagattgattttcttagactccattaagtccaaatccaaagactctgtgtgggaaaaagaaatagaaatacttatagaggaaaatgaggacctcaaacaacaatgtattcagctaaatgaagagattgaaaagcaaaggaacactttttcatttgctgaaaaaaactttgaagttaactatcaagagttacaagaggagtatgcttgccttctcaaagtaaaagatgatttagaagacagtaaaaataaacaggaattagagtataaaagtaaacttaaagcacttaatgaagagcttcatttgcaaagaataaatccaactacagtgaaaatgaaaagttctgtctttgatgaagacaaaacttttgtagcagaaacattggaaatgggtgaggttgttgaaaaggatacaacagaactcatggaaaaacttgaggtaaccaagcgagagaaattagagctgtcacagagactgtctgatctttctgaacaattgaaacagaaacatggtgagattagttttctaaatgaagaagttaaatctttaaagcaagagaaagaacaagtttcattgagatgtagagagctagaaatcattattaaccacaacagggcagaaaatgtacagtcatgtgatactcaagtaagctctttattagatggagttgtgaccatgacaagcaggggtgctgaaggatcagtttctaaagtaaataaaagttttggtgaagaatcaaaaataatggtggaagataaagtttcttttgaaaatatgactgttggagaagaaagtaagcaagaacagttgattttggatcacttaccatctgtaacaaaggaatcatcacttagagcaactcaaccaagtgaaaatgataaacttcagaaagaactcaatgtacttaaatcagaacagaatgatttaaggctacagatggaagcccaacgcatttgcctctctctggtttattcaactcatgtggatcaggttcgtgaatatatggaaaatgaaaaagataaagctctttgcagtcttaaagaagagcttatttttgctcaagaggaaaagatcaaggaacttcagaaaatacaccagttagaactacagactatgaaaacacaagaaacaggtgatgaaggaaagcctttacatctgctcattggaaaacttcaaaaggcagtgtctgaagaatgttcttattttttacagactttatgcagtgtccttggtgaatattatactcctgctttaaaatgtgaagtaaatgcagaagacaaagagaattctggtgattacatttctgaaaatgaagatccagaattacaagattatagatatgaagttcaagactttcaagaaaatatgcacactcttctcaacaaagtaacagaagaatacaacaaactcttggtacttcaaacacgactaagcaagatctggggacagcagacagatggtatgaaacttgaatttggagaagaaaaccttccaaaagaggaaacagagtttttatcaatccattctcagatgaccaatttggaagacattgatgtcaatcataaaagcaagttatcttctctgcaagatcttgaaaaaactaaacttgaagaacaagttcaagaattagaaagcctcatatcctctttgcagcaacagttgaaagaaactgaacaaaactatgaggcagagatccactgtttacagaagaggcttcaagctgttagtgagtccacggttccgccaagcttacctgttgattcggtggtaattacagaatctgatgcacagagaacaatgtaccctggaagttgtgtgaaaaagaatattgatggtacaatagagttttctggtgaatttggagtgaaagaggaaacaaatatcgttaagttgcttgaaaaacaataccaagaacaattagaagaagaagtagctaaggttattgtgtcaatgagtatagcatttgctcaacaaactgaactgtctagaatatctgggggaaaagaaaatactgcatcatcaaagcaagcacatgctgtgtgtcagcaagaacaacattattttaatgaaatgaaattatcacaggatcaaattggttttcagacttttgagacagtggatgtgaaatttaaagaagaatttaaaccacttagtaaagagttaggagaacatggaaaggaaattttattatcaaatagtgatccccatgatataccagaatcaaaggactgtgtgctgactatttcagaagaaatgttctccaaagataaaacatttatagttagacagtctattcatgatgagatttcagtgtcaagcatggatgcttctagacaactaatgttgaatgaagaacagttggaagatatgagacaggaacttgtacgacaataccaagaacatcaacaggcaacggaattgttaaggcaagcacatatgcggcaaatggagagacagcgagaagaccaggaacagctacaagaagagattaagagacttaatagacaattagcccagagatcctccatagataatgaaaacctggtttcagagagagagagggtgcttttagaggagctggaagcactaaagcagctgtctttagctggaagagagaagctgtgttgtgagctgcgcaacagcagtacgcaaacacagaatggaaatgaaaaccaaggagaagttgaagaacaaacatttaaagaaaaggaattagacagaaaacctgaagatgtgcctcctgagattttgtctaatgaaaggtatgcactccagaaagctaataatagacttttgaagatcctcttagaagttgtaaagacaacagcagctgttgaagaaacaattggtcgccatgtccttgggattctagatagatctagtaaaagccagtcatctgccagcctaatttggaggtcagaagcagaggcatctgtaaagtcatgtgtccatgaggaacatacaagagttacagatgaatccattccctcttattctggaagtgatatgccaagaaatgacattaacatgtggtcaaaagtaactgaggaaggaacagagctgtcacaacgacttgtgaggagtggttttgctggaactgaaatagaccctgaaaatgaagaacttatgctgaacattagctctcgactacaagcagcagttgaaaaactcctagaagccataagtgaaactagcagtcagcttgaacatgcgaaagtgacacagacagagttgatgcgtgagtcatttagacagaaacaagaagcaacagagtcccttaagtgccaagaggaacttcgagagcgccttcatgaggagtccagggccagagaacagctagctgtggagctcagtaaggctgagggcgtcattgatggctatgcagatgaaaaaactctttttgaaaggcaaattcaggaaaaaactgatataatagatcgtcttgagcaggagttgttatgtgcaagtaacaggttgcaagaattggaggcagagcaacagcagatccaagaagaaagagaattactgtccagacaaaaggaagctatgaaagcagaggcaggcccagttgaacaacaattactacaggagacagaaaaattaatgaaggaaaaactagaagtacaatgtcaagctgaaaaagtacgtgatgaccttcaaaaacaagtgaaagctctagaaatagatgtggaagaacaagtcagtaggtttatagagctggaacaagaaaaaaatactgaactaatggatttaagacagcaaaaccaagcattggaaaagcagttagaaaaaatgagaaaatttttagatgagcaagccattgacagagaacatgagagagatgtattccaacaggaaatacagaaactagaacagcaacttaaggttgttcctcgattccagcctatcagtgaacatcaaactagagaggttgaacagttagcaaatcatctgaaagaaaaaacagacaaatgcagtgagcttttgctctctaaagagcagcttcaaagggatatacaagaaaggaatgaagaaatagagaaactggagttcagagtaagagaactggagcaggcgcttcttgtgagtgcagatacttttcaaaaggtagaggaccgaaaacactttggagctgtagaagctaaaccagaattgtccctagaagtacaattgcaggctgaacgagatgccatagacagaaaggaaaaagagattacaaacttagaagagcaattagaacagtttagagaagaactggaaaataagaatgaagaagttcaacaattacatatgcaattagaaatacagaaaaaggaatctactacccgcctacaagaacttgaacaggaaaacaaattatttaaggatgacatggagaaactgggacttgccataaaggaatctgatgccatgtctactcaagaccaacatgtgctatttgggaaatttgctcaaataatacaggaaaaagaggtagaaattgaccaattaaatgaacaagttacgaaactccagcagcaacttaaaattacaacagataacaaggttattgaagaaaaaaatgaactgataagggatcttgaaacccaaatagaatgtttgatgagtgatcaagaatgtgtgaagagaaatagagaagaagaaatagagcagctcaatgaagtgattgaaaaacttcaacaggaattggcaaatattggacagaagacatcaatgaatgctcattccctctcagaagaagcagacagtttaaaacatcaattggatgtggttatagctgaaaagctggccttggaacagcaagtagaaaccgctaatgaagaaatgaccttcatgaaaaatgtacttaaagaaaccaattttaaaatgaatcagctaacacaggaattattcagcttaaagagagaacgtgaaagtgtggaaaagattcaaagcataccagagaatagtgttaacgtggctatagatcatctgagcaaagacaaacctgaactagaagtagtccttacagaggatgctcttaaatccctagaaaatcagacatacttcaaatcttttgaagaaaatggcaaaggttccataattaatttggaaacaaggttgctacaacttgagagcactgttagtgcaaaggacttagaacttacccagtgttataaacaaataaaagacatgcaagaacaaggccagtttgaaacagaaatgcttcaaaagaagattgtaaacctacagaaaatagttgaagaaaaagtggctgctgctcttgtcagtcaaatccaacttgaggcagttcaggaatatgcaaaattctgtcaagataatcaaacaatttcatcagaacctgaaagaacaaatattcagaatttaaatcaactaagagaagatgagttggggtcagatatatcagcattaaccttgagaatatcagaattagaaagccaggttgttgaaatgcatactagtttgattttagaaaaagaacaagtagaaattgcagaaaaaaatgttttagaaaaagaaaagaagctgctagaactacagaagctattggagggcaatgagaaaaaacagagagagaaagaaaagaaaagaagccctcaagatgttgaagttctcaagacaactactgagctatttcatagcaatgaagaaagtggattttttaatgaactcgaggctcttagagctgaatcagtggctaccaaagcagaacttgccagttataaagaaaaggctgaaaaacttcaagaagagcttttggtaaaagaaacaaatatgacatctcttcagaaagacttaagccaagttagggatcacctcgcagaggcaaaagagaaattgtccattttagaaaaagaagatgagactgaggtacaagaaagcaaaaaggcctgcatgtttgagccacttcctataaaactgagtaagagcattgcatcccagacagatgggactctgaagatcagtagcagcaatcagactccacaaattcttgttaaaaatgcaggaatacaaattaatttacagagtgaatgttcctcagaagaagttactgaaataatcagtcagtttactgaaaaaattgagaagatgcaagaactacatgctgctgaaattttggacatggaatccagacatatttcagaaactgaaaccttaaagagggaacactatgttgccgttcagttactgaaagaggaatgtggtaccttgaaggcagtgatacagtgtctgagaagtaaagaggtatttggtttttataatatgtgtttttcaacattgtgtgattctggatcagactggggtcagggaatttatcttacacacagtcagggatttgacatagcatcagaaggccgaggagaagaaagtgaaagtgcaacagattcctttccaaagaaaataaagggattactgagagctgtccataatgaaggcatgcaggtgctttctctcactgagtctccctatagtgatggagaggaccattctattcagcaggtttcagaaccttggctagaagagagaaaagcttacatcaatacaatctcatctctaaaggatttaattacaaagatgcaactgcaaagagaagccgaggtttatgatagttctcaatctcatgagagcttctcagactggcgaggtgaactactgcttgcccttcaacaagttttcttagaagagcgtagtgttttactagcagcatttcggacggagctgacagctctaggtactacagatgcagttggtttactaaactgtttggaacagagaatacaagaacagggtgttgaatatcaagcagctatggaatgcctccagaaagcagatagaaggagtttgttatctgaaattcaggcactgcatgcacaaatgaatggtaggaaaattactctgaaaagagaacaagagagtgagaaaccaagccaagaactcttggaatataatatacagcagaagcagtctcaaatgctggagatgcaagtggagctcagcagtatgaaagacagagcaacggaactgcaggagcagctgagttctgagaaaatggtggttgctgaactgaagagtgagcttgcacaaactaaattggaactagaaacaacactcaaggcacagcataaacacctaaaagaattggaggctttcaggttggaagttaaagataagacagatgaagtacatttgcttaatgacacattagcaagtgaacagaaaaaatcaagagagctccagtgggctttggagaaagagaaagccaagttgggacgcagtgaagaacgggataaagaagaacttgaggatctgaagttttcacttgagagtcagaaacaaaggaatcttcagctaaatctacttttggaacaacagaaacaactactgaacgaatcccagcaaaaaatagaatcacagagaatgctatatgatgcccagttgtcagaagaacaaggtcgaaacttagagcttcaggtacttcttgaatctgagaaagttcgaattcgggaaatgagtagtaccctagatagggagcgggaattgcacgcacagctgcagagcagtgatggtactggacagtctcggccacccttgccctcagaggacctactgaaagagctgcagaaacagctagaggaaaaacacagtcgcatagtagaattgttaaatgagactgaaaaatataaactggattctttgcaaacacgacagcaaatggaaaaagataggcaggttcacaggaaaacactgcagacagaacaggaggccaacactgagggacagaaaaaaatgcatgagctccagtccaaagtggaagatcttcagcgccagctggaagagaaaagacaacaagtttataagttagaccttgaaggacagcgactacaaggaatcatgcaggaattccagaagcaagaactagaacgagaagaaaaacgagaaagtagaagaattctgtatcagaaccttaatgagccaaccacgtggagcttaaccagtgatagaactagaaattgggttcttcaacagaaaatagaaggagaaacaaaagaatcaaactacgctaaattgattgaaatgaatggaggaggaaccggctgtaatcatgaattagaaatgatcagacaaaagcttcaatgtgtagcttcaaaactacaggttctaccccagaaagcctctgagagactacagtttgaaacagcagatgatgaagatttcatttgggttcaggaaaatattgatgaaattattttacaactacagaaattaactggccagcaaggtgaagagcccagcttggtgtccccaagtacttcttgtggctcattgactgaaagactactgagacaaaatgctgagctgacagggcatatcagtcaactgactgaagagaagaatgacttaaggaacatggttatgaagctggaagagcagatcaggtggtatcgacagacaggagctggtagagataattcttccaggttttcattgaatggtggtgccaacattgaagccatcattgcctctgaaaaagaagtatggaacagagaaaaattgactctccagaaatctttgaaaagggcagaggctgaagtatacaaactgaaagctgaactaagaaatgactctttacttcaaactctgagccctgattctgaacatgtcactttaaagagaatttatggtaaatacttgagggcagaaagttttcgaaaggctctcatttaccagaagaaatacctgctgctgttactgggtgggttccaggaatgtgaagatgccaccttggccctgcttgcccggatgggggggcagccagctttcacggatctagaggtgatcaccaatcgcccaaagggcttcaccaggtttcggtcggccgtcagagtatccattgcaatttccagaatgaaatttttggttcgacggtggcatcgagtcacaggttctgtttccatcaatattaacagagatggctttggactgaatcaaggtgcagaaaagactgactcattttatcattcttctggtgggctggagttatatggagaaccaagacatactacgtatcgctcaagatcagatctggactatattaggtcccctttaccatttcagaataggtacccaggcactccagctgatttcaatcctggttctttagcatgttctcagcttcagaattacgatcctgacagagccctaacagattatatcactcggctagaggcactgcaaagacgacttggaactatacagtcaggttcaactactcaatttcatgctggcatgagaagataatcctttgaaacatcattaattgaagtgattttaaatagatttccttttgtaaatcaatggttcttttgtgcttttgtattgtgaatattcaatgggaccaatatgaacacagcttatgattgtatacaaatcccttgccagcacatgaaaacaaactggaatttgtatatataagcattgtgtatgtattcatgcacaataattattgaattacctgtatatttgtggaatgctaatttaaaacattaaattataaaccttgtgtatttatcaaatgggtgaaaagattaaacttttacgcattacaatactgctgaatgtgtagctcgaggtgtcctgcacttttcttataaggctactgaagttacatgttttgcctaatatattctactggtgatgaagacagataatatcacttgtagagacctatttttgtataatggtagaagttttgaattttatggggtattttgtcaagtactgaaataaaaatgacttcaccattttcaccaca

SEQ ID NO: 103132 - DNA, 5652 bp, Homo sapiens
  Payload ID: 116
  Gene Symbol: AKAP9
  Gene Name: A kinase (PRKA) anchor protein 9
  ENST ID: ENST00000394534
  CDS Start-End: 1-5310
gagaaactggagttcagagtaagagaactggagcaggcgcttcttgtagaggaccgaaaacactttggagctgtagaagctaaaccagaattgtccctagaagtacaattgcaggctgaacgagatgccatagacagaaaggaaaaagagattacaaacttagaagagcaattagaacagtttagagaagaactggaaaataagaatgaagaagttcaacaattacatatgcaattagaaatacagaaaaaggaatctactacccgcctacaagaacttgaacaggaaaacaaattatttaaggatgacatggagaaactgggacttgccataaaggaatctgatgccatgtctactcaagaccaacatgtgctatttgggaaatttgctcaaataatacaggaaaaagaggtagaaattgaccaattaaatgaacaagttacgaaactccagcagcaacttaaaattacaacagataacaaggttattgaagaaaaaaatgaactgataagggatcttgaaacccaaatagaatgtttgatgagtgatcaagaatgtgtgaagagaaatagagaagaagaaatagagcagctcaatgaagtgattgaaaaacttcaacaggaattggcaaatattggacagaagacatcaatgaatgctcattccctctcagaagaagcagacagtttaaaacatcaattggatgtggttatagctgaaaagctggccttggaacagcaagtagaaaccgctaatgaagaaatgaccttcatgaaaaatgtacttaaagaaaccaattttaaaatgaatcagctaacacaggaattattcagcttaaagagagaacgtgaaagtgtggaaaagattcaaagcataccagagaatagtgttaacgtggctatagatcatctgagcaaagacaaacctgaactagaagtagtccttacagaggatgctcttaaatccctagaaaatcagacatacttcaaatcttttgaagaaaatggcaaaggttccataattaatttggaaacaaggttgctacaacttgagagcactgttagtgcaaaggacttagaacttacccagtgttataaacaaataaaagacatgcaagaacaaggccagtttgaaacagaaatgcttcaaaagaagattgtaaacctacagaaaatagttgaagaaaaagtggctgctgctcttgtcagtcaaatccaacttgaggcagttcaggaatatgcaaaattctgtcaagataatcaaacaatttcatcagaacctgaaagaacaaatattcagaatttaaatcaactaagagaagatgagttggggtcagatatatcagcattaaccttgagaatatcagaattagaaagccaggttgttgaaatgcatactagtttgattttagaaaaagaacaagtagaaattgcagaaaaaaatgttttagaaaaagaaaagaagctgctagaactacagaagctattggagggcaatgagaaaaaacagagagagaaagaaaagaaaagaagccctcaagatgttgaagttctcaagacaactactgagctatttcatagcaatgaagaaagtggattttttaatgaactcgaggctcttagagctgaatcagtggctaccaaagcagaacttgccagttataaagaaaaggctgaaaaacttcaagaagagcttttggtaaaagaaacaaatatgacatctcttcagaaagacttaagccaagttagggatcacctcgcagaggcaaaagagaaattgtccattttagaaaaagaagatgagactgaggtacaagaaagcaaaaaggcctgcatgtttgagccacttcctataaaactgagtaagagcattgcatcccagacagatgggactctgaagatcagtagcagcaatcagactccacaaattcttgttaaaaatgcaggaatacaaattaatttacagagtgaatgttcctcagaagaagttactgaaataatcagtcagtttactgaaaaaattgagaagatgcaagaactacatgctgctgaaattttggacatggaatccagacatatttcagaaactgaaaccttaaagagggaacactatgttgccgttcagttactgaaagaggaatgtggtaccttgaaggcagtgatacagtgtctgagaagtaaagagggatcctcaattcctgagctagcacattctgatgcttaccagactagagaaatatgctccagtgattctggatcagactggggtcagggaatttatcttacacacagtcagggatttgacatagcatcagaaggccgaggagaagaaagtgaaagtgcaacagattcctttccaaagaaaataaagggattactgagagctgtccataatgaaggcatgcaggtgctttctctcactgagtctccctatagtgatggagaggaccattctattcagcaggtttcagaaccttggctagaagagagaaaagcttacatcaatacaatctcatctctaaaggatttaattacaaagatgcaactgcaaagagaagccgaggtttatgatagttctcaatctcatgagagcttctcagactggcgaggtgaactactgcttgcccttcaacaagttttcttagaagagcgtagtgttttactagcagcatttcggacggagctgacagctctaggtactacagatgcagttggtttactaaactgtttggaacagagaatacaagaacagggtgttgaatatcaagcagctatggaatgcctccagaaagcagatagaaggagtttgttatctgaaattcaggcactgcatgcacaaatgaatggtaggaaaattactctgaaaagagaacaagagagtgagaaaccaagccaagaactcttggaatataatatacagcagaagcagtctcaaatgctggagatgcaagtggagctcagcagtatgaaagacagagcaacggaactgcaggagcagctgagttctgagaaaatggtggttgctgaactgaagagtgagcttgcacaaactaaattggaactagaaacaacactcaaggcacagcataaacacctaaaagaattggaggctttcaggttggaagttaaagataagacagatgaagtacatttgcttaatgacacattagcaagtgaacagaaaaaatcaagagagctccagtgggctttggagaaagagaaagccaagttgggacgcagtgaagaacgggataaagaagaacttgaggatctgaagttttcacttgagagtcagaaacaaaggaatcttcagctaaatctacttttggaacaacagaaacaactactgaacgaatcccagcaaaaaatagaatcacagagaatgctatatgatgcccagttgtcagaagaacaaggtcgaaacttagagcttcaggtacttcttgaatctgagaaagttcgaattcgggaaatgagtagtaccctagatagggagcgggaattgcacgcacagctgcagagcagtgatggtactggacagtctcggccacccttgccctcagaggacctactgaaagagctgcagaaacagctagaggaaaaacacagtcgcatagtagaattgttaaatgagactgaaaaatataaactggattctttgcaaacacgacagcaaatggaaaaagataggcaggttcacaggaaaacactgcagacagaacaggaggccaacactgagggacagaaaaaaatgcatgagctccagtccaaagtggaagatcttcagcgccagctggaagagaaaagacaacaagtttataagttagaccttgaaggacagcgactacaaggaatcatgcaggaattccagaagcaagaactagaacgagaagaaaaacgagaaagtagaagaattctgtatcagaaccttaatgagccaaccacgtggagcttaaccagtgatagaactagaaattgggttcttcaacagaaaatagaaggagaaacaaaagaatcaaactacgctaaattgattgaaatgaatggaggaggaaccggctgtaatcatgaattagaaatgatcagacaaaagcttcaatgtgtagcttcaaaactacaggttctaccccagaaagcctctgagagactacagtttgaaacagcagatgatgaagatttcatttgggttcaggaaaatattgatgaaattattttacaactacagaaattaactggccagcaaggtgaagagcccagcttggtgtccccaagtacttcttgtggctcattgactgaaagactactgagacaaaatgctgagctgacagggcatatcagtcaactgactgaagagaagaatgacttaaggaacatggttatgaagctggaagagcagatcaggtggtatcgacagacaggagctggtagagataattcttccaggttttcattgaatggtggtgccaacattgaagccatcattgcctctgaaaaagaagtatggaacagagaaaaattgactctccagaaatctttgaaaagggcagaggctgaagtatacaaactgaaagctgaactaagaaatgactctttacttcaaactctgagccctgattctgaacatgtcactttaaagagaatttatggtaaatacttgagggcagaaagttttcgaaaggctctcatttaccagaagaaatacctgctgctgttactgggtgggttccaggaatgtgaagatgccaccttggccctgcttgcccggatgggggggcagccagctttcacggatctagaggtgatcaccaatcgcccaaagggcttcaccaggtttcggtcggccgtcagagtatccattgcaatttccagaatgaaatttttggttcgacggtggcatcgagtcacaggttctgtttccatcaatattaacagagatggctttggactgaatcaaggtgcagaaaagactgactcattttatcattcttctggtgggctggagttatatggagaaccaagacatactacgtatcgctcaagatcagatctggactatattaggtcccctttaccatttcagaataggtacccaggcactccagctgatttcaatcctggttctttagcatgttctcagcttcagaattacgatcctgacagagccctaacagattatatcactcggctagaggcactgcaaagacgacttggaactatacagtcaggtgctctgagtttaaccacatcttggcagcaccacagtgcgagacccacagctcccctttctttgaaattctttcacactcattaggataatcaaagcttccagtttagtgcatgagctaattattaagttagccaaagcttaaactcttgtaaccagcagagaaactgactttaaataatttaagtgaaaatatgatttatcaccccagatcccactcctcccaaaaatgatttcctactatgttcattcagcggactgatgacacaaaatgcacaatgagcaccagtgtgcaaggtactctgagtctacagagcctaactggagaacgtattcctaagtagcgcatggcagaaagtggtaaggccgtgccgcagcactccagcctgggcagcagagcgagaccctgtctcaaagaaaaaaaaaaaa

SEQ ID NO: 103133 - DNA, 1356 bp, Homo sapiens
  Payload ID: 116
  Gene Symbol: AKAP9
  Gene Name: A kinase (PRKA) anchor protein 9
  ENST ID: ENST00000394564
  CDS Start-End: 175-1119
gacgatccgccagtgagcgcggagactgcttccacttcgggcgggggagcgccggaccgaatcggctctctaggccgtggagcttgccgtcccacctccgtccaaatcgacctttcctttctatccccaaccacccctcaacccctgttttcccctgccttccttgcagaggccatggaggacgaggagagacagaagaagctggaggccggcaaagccaagcttgcccagtttcgacaaagaaaagctcagtcggatgggcagagtccttccaagaagcagaaaaaaaagagaaaaacgtcaagcagtaaacatgatgtgtcagcacaccatgatttgaatattgatcaatcacagtgtaatgaaatgtacataaatagttctcagagagtagaatcaactgtgattcctgaatctacaataatgagaactctacatagtggagaaataaccagtcatgagcagggcttctctgtggaactggaaagtgaaatttcaaccacagcagatgactgcagttcagaggtaaatggttgcagttttgtgatgagaacaggaaagcctacaaatttattaagggaagaagaatttggtgttgatgattcttattctgaacaaggagcacaagacagtccgactcatctagagatgatggaaagtgagttggctgggaagcagcatgagattgaagagctaaacagagagctggaagaaatgagggttacctatgggactgaaggactgcagcagttacaagaatttgaagctgccattaaacaaagagatggcattataacccagctcactgctaatttacaacaagcaagaagagaaaaggatgagacaatgagagaatttttagagttgacagaacagagtcaaaaattacagattcaatttcagcaattacaggctagtgaaactctgagaaacagcactcatagtagcacagctgcagacttactacaagccaaacaacagatcctcactcatcaacagcagcttgaagaacaagaccacttattagaagattatcagaaaaagaaagaagacttcacaatgcaaattagtttcttgcaagagaaaattaaagtatatgaaatggtatgtttattttaaggaagtcagctaacttgtagaagctttagagtttcaagttttttatgcaagtggtttttttttgttaggcacatgaatcacaaaatttcataattaagctctttgtgtaatttatttcaaaagcaaatgggaatctcagtaatgtagtttttaagataatagtcattactgagttccctaaaagtgatcagcctatgttaaactgaattagcaggaaaatacaaatttatagctata

SEQ ID NO: 103134 - DNA, 696 bp, Homo sapiens
  Payload ID: 116
  Gene Symbol: AKAP9
  Gene Name: A kinase (PRKA) anchor protein 9
  ENST ID: ENST00000438114
  CDS Start-End: 1-696
ccttccaagaagcagaaaaaaaagagaaaaacgtcaagcagtaaacatgatgtgtcagcacaccatgatttgaatattgatcaatcacagtgtaatgaaatgtacataaatagttctcagagagtagaatcaactgtgattcctgaatctacaataatgagaactctacatagtggagaaataaccagtcatgagcagggcttctctgtggaactggaaagtgaaatttcaaccacagcagatgactgcagttcagaggaagaagaatttggtgttgatgattcttattctgaacaaggagcacaagacagtccgactcatctagagatgatggaaagtgagttggctgggaagcagcatgagattgaagagctaaacagagagctggaagaaatgagggttacctatgggactgaaggactgcagcagttacaagaatttgaagctgccattaaacaaagagatggcattataacccagctcactgctaatttacaacaagcaagaagagaaaaggatgagacaatgagagaatttttagagttgacagaacagagtcaaaaattacagattcaatttcagcaattacaggctagtgaaactctgagaaacagcactcatagtagcacagctgcagacttactacaagccaaacaacagatcctcactcatcaacagcagcttgaagaacaagac

SEQ ID NO: 103135 - DNA, 1904 bp, Homo sapiens
  Payload ID: 116
  Gene Symbol: AKAP9
  Gene Name: A kinase (PRKA) anchor protein 9
  ENST ID: ENST00000435423
  CDS Start-End: 1-956
aacactatgttgccgttcagttactgaaagaggaatgtggtaccttgaaggcagtgatacagtgtctgagaagtaaagagggatcctcaattcctgagctagcacattctgatgcttaccagactagagaaatatgctccagtgattctggatcagactggggtcagggaatttatcttacacacagtcagggatttgacatagcatcagaaggccgaggagaagaaagtgaaagtgcaacagattcctttccaaagaaaataaagggattactgagagctgtccataatgaaggcatgcaggtgctttctctcactgagtctccctatagtgatggagaggaccattctattcagcaggtttcagaaccttggctagaagagagaaaagcttacatcaatacaatctcatctctaaaggatttaattacaaagatgcaactgcaaagagaagccgaggtttatgatagttctcaatctcatgagagcttctcagactggcgaggtgaactactgcttgcccttcaacaagttttcttagaagagcgtagtgttttactagcagcatttcggacggagctgacagctctaggtactacagatgcagttggtttactaaactgtttggaacagagaatacaagaacagggtgttgaatatcaagcagctatggaatgcctccagaaagcagatagaaggagtttgttatctgaaattcaggcactgcatgcacaaatgaatggtaggaaaattactctgaaaagagaacaagagagtgagaaaccaagccaaggtatgttgtatgacaagctcatatggttacacaaacaggtgaaaagatttcactttgttttctttcttattattattaagttaaaacatattttcttggtcacattttcttctcattctcataatgttaaggatacaatctatattaattactctaggggttagaggattgtctaattggtttaaacagctacgttgactttaaaataaactgccattcccctgataaggttaagcccattggattcattctttttctttattttagagctgtatgttaagaaaacagtctttccaatcataaaacagaaaatactctttagaggaaaatccacaatgcatgtaactaattattttttaatccttttttaaaaaaattgtgagccataacatacagaaaattacaaattgcaaatatgcagtatgacgcatttttaaatgagtatctatggaaacatcacccatgtgaatatagccagtatcccaacagccccttctcccaagcacatgctcctctgagtaacttagaggtaatcattgttctgatttttctttagttttactatctatttatatattcctaaaacatttaagtttcaagtttttttctgtttttgaactttatcaatctgtatgtattttttatcttgtttctttcacctctctgtaacattcttccaacattcttccaagttactgcatttttcaagttactgcattcttccaaattagtagtagaacattcttccaagttactgcatttatctctagttcattcattcttgttactctataactctatgaccctgtgtagggccaggcacggtggcttacacctgtaatcccagcactttgggaggctgacgtgggtggatcacgaggtcagaagttcaagatgagcctagccaaaatggtgaaacccagtctctactaaaaatacaaaaattagccaggcgtggtggcgggtgcctgtaaggccagccactcaggagactgaagcagagaattacttgaacccagaaggtggaggttgcagtgagctgaaatcacaccactgcactctagcctgagcgacagagcaagactccatctcaaaaaaaaaaaaaaaaaaaa

SEQ ID NO: 103136 - DNA, 6006 bp, Homo sapiens
  Payload ID: 116
  Gene Symbol: AKAP9
  Gene Name: A kinase (PRKA) anchor protein 9
  ENST ID: ENST00000619023
  CDS Start-End: 185-5098
tgcggctgaggacgatccgccagtgagcgcggagactgcttccacttcgggcgggggagcgccggaccgaatcggctctctaggccgtggagcttgccgtcccacctccgtccaaatcgacctttcctttctatccccaaccacccctcaacccctgttttcccctgccttccttgcagaggccatggaggacgaggagagacagaagaagctggaggccggcaaagccaaggtaggagagcttattttcttttttcttgcccagtttcgacaaagaaaagctcagtcggatgggcagagtccttccaagaagcagaaaaaaaagagaaaaacgtcaagcagtaaacatgatgtgtcagcacaccatgatttgaatattgatcaatcacagtgtaatgaaatgtacataaatagttctcagagagtagaatcaactgtgattcctgaatctacaataatgagaactctacatagtggagaaataaccagtcatgagcagggcttctctgtggaactggaaagtgaaatttcaaccacagcagatgactgcagttcagaggtaaatggttgcagttttgtgatgagaacaggaaagcctacaaatttattaagggaagaagaatttggtgttgatgattcttattctgaacaaggagcacaagacagtccgactcatctagagatgatggaaagtgagttggctgggaagcagcatgagattgaagagctaaacagagagctggaagaaatgagggttacctatgggactgaaggactgcagcagttacaagaatttgaagctgccattaaacaaagagatggcattataacccagctcactgctaatttacaacaagcaagaagagaaaaggatgagacaatgagagaatttttagagttgacagaacagagtcaaaaattacagattcaatttcagcaattacaggctagtgaaactctgagaaacagcactcatagtagcacagctgcagacttactacaagccaaacaacagatcctcactcatcaacagcagcttgaagaacaagaccacttattagaagattatcagaaaaagaaagaagacttcacaatgcaaattagtttcttgcaagagaaaattaaagtatatgaaatggaacaagataaaaaagtagaaaactcaaataaagaagaaatacaggaaaaggagacaatcattgaagaattaaacacaaaaataatagaagaagaaaagaaaactcttgagctaaaggataaattaacaactgctgataaattactaggagaattacaagaacagattgtgcaaaagaaccaagaaataaaaaacatgaaattagagctgactaattctaagcaaaaagaaagacagtcttctgaagaaataaaacagttaatggggacagtcgaagaacttcagaagagaaatcataaagacagccagttcgaaactgatatagtacaacgaatggaacaagaaacacaaagaaagttagaacaactccgggcagagctggatgagatgtatgggcagcagatagtgcaaatgaaacaagaattaataagacaacacatggcacagatggaggaaatgaaaacacggcataagggagaaatggagaatgctttaaggtcatattcaaatattacagttaatgaagatcagataaagttaatgaatgtggcaataaatgaactgaatataaaattgcaagatactaactctcaaaaggaaaaactcaaggaagaactaggactaattttagaagaaaagtgtgctctacagagacagcttgaagaccttgttgaagaattgagcttttcaagggaacagattcagagagctagacagacaatagctgaacaagaaagtaaacttaatgaagcacataagtcccttagtacagtggaagatttgaaagctgagattgtttctgcatctgaatccagaaaggaactagaattaaaacatgaagcagaagttacaaattacaagataaaacttgaaatgttagaaaaagaaaagaatgctgtgttagacagaatggctgaatcacaagaagctgaattagagaggctgagaacacagcttctatttagtcacgaagaagagctttccaaactgaaggaagatttagaaattgaacatcgaataaatattgaaaaacttaaagataatttaggcattcactataaacagcagatagatggtttacagaatgaaatgagtcaaaagatagaaaccatgcagtttgaaaaggacaatttgataactaagcagaatcaattaattttggaaatttcaaagctaaaagatttacagcagtctcttgtaaattcaaagtcagaagaaatgactcttcaaatcaatgaacttcaaaaagaaattgaaatactcagacaagaagaaaaagaaaagggtacacttgaacaagaagttcaagaattacaacttaaaacagaattgttagaaaaacagatgaaggaaaaagagaatgatcttcaagaaaaatttgcacaacttgaagcagagaatagcattcttaaagatgaaaagaaaacccttgaagacatgttgaaaatacatactcctgttagccaagaagaaagattgattttcttagactccattaagtccaaatccaaagactctgtgtgggaaaaagaaatagaaatacttatagaggaaaatgaggacctcaaacaacaatgtattcagctaaatgaagagattgaaaagcaaaggaacactttttcatttgctgaaaaaaactttgaagttaactatcaagagttacaagaggagtatgcttgccttctcaaagtaaaagatgatttagaagacagtaaaaataaacaggaattagagtataaaagtaaacttaaagcacttaatgaagagcttcatttgcaaagaataaatccaactacagtgaaaatgaaaagttctgtctttgatgaagacaaaacttttgtagcagaaacattggaaatgggtgaggttgttgaaaaggatacaacagaactcatggaaaaacttgaggtaaccaagcgagagaaattagagctgtcacagagactgtctgatctttctgaacaattgaaacagaaacatggtgagattagttttctaaatgaagaagttaaatctttaaagcaagagaaagaacaagtttcattgagatgtagagagctagaaatcattattaaccacaacagggcagaaaatgtacagtcatgtgatactcaagtaagctctttattagatggagttgtgaccatgacaagcaggggtgctgaaggatcagtttctaaagtaaataaaagttttggtgaagaatcaaaaataatggtggaagataaagtttcttttgaaaatatgactgttggagaagaaagtaagcaagaacagttgattttggatcacttaccatctgtaacaaaggaatcatcacttagagcaactcaaccaagtgaaaatgataaacttcagaaagaactcaatgtacttaaatcagaacagaatgatttaaggctacagatggaagcccaacgcatttgcctctctctggtttattcaactcatgtggatcaggttcgtgaatatatggaaaatgaaaaagataaagctctttgcagtcttaaagaagagcttatttttgctcaagaggaaaagatcaaggaacttcagaaaatacaccagttagaactacagactatgaaaacacaagaaacaggtgatgaaggaaagcctttacatctgctcattggaaaacttcaaaaggcagtgtctgaagaatgttcttattttttacagactttatgcagtgtccttggtgaatattatactcctgctttaaaatgtgaagtaaatgcagaagacaaagagaattctggtgattacatttctgaaaatgaagatccagaattacaagattatagatatgaagttcaagactttcaagaaaatatgcacactcttctcaacaaagtaacagaagaatacaacaaactcttggtacttcaaacacgactaagcaagatctggggacagcagacagatggtatgaaacttgaatttggagaagaaaaccttccaaaagaggaaacagagtttttatcaatccattctcagatgaccaatttggaagacattgatgtcaatcataaaagcaagttatcttctctgcaagatcttgaaaaaactaaacttgaagaacaagttcaagaattagaaagcctcatatcctctttgcagcaacagttgaaagaaactgaacaaaactatgaggcagagatccactgtttacagaagaggcttcaagctgttagtgagtccacggttccgccaagcttacctgttgattcggtggtaattacagaatctgatgcacagagaacaatgtaccctggaagttgtgtgaaaaagaatattgatggtacaatagagttttctggtgaatttggagtgaaagaggaaacaaatatcgttaagttgcttgaaaaacaataccaagaacaattagaagaagaagtagctaaggttattgtgtcaatgagtatagcatttgctcaacaaactgaactgtctagaatatctgggggaaaagaaaatactgcatcatcaaagcaagcacatgctgtgtgtcagcaagaacaacattattttaatgaaatgaaattatcacaggatcaaattggttttcagacttttgagacagtggatgtgaaatttaaagaagaatttaaaccacttagtaaagagttaggagaacatggaaaggaaattttattatcaaatagtgatccccatgatataccagaatcaaaggactgtgtgctgactatttcagaagaaatgttctccaaagataaaacatttatagttagacagtctattcatgatgagatttcagtgtcaagcatggatgcttctagacaactaatgttgaatgaagaacagttggaagatatgagacaggaacttgtacgacaataccaagaacatcaacaggcaacggaattgttaaggcaagcacatatgcggcaaatggagagacagcgagaagaccaggaacagacaagaagagattaagagacttaatagacaattagcccaggtaagggtcttgtagtcccctttctctccccagttatttttttttccaaacaccaacttgaaccagatccccaattaaaacaacagtattttttatgtagccataatttttttttttttttgccgaaatctgaataaactacatatatttagcatcaggaacacactctatactaagacagcagctttagatcttgttagggacacctatctcaaccttggagtgggcattgtctttctgtcattttatttaactcctttttcaagcactggaaaagtggctacacggttttgtttttttcttttaaatcattccattagccatatatagcaaactcactttgacattttggaaataacattgtgctgaggtgctccattatgcagttactatcattcagttttactatcttcatttatagttttgtgagtccaccaattagcatctcgaaggtttacctttatctgtctttaatccatctttttaatcatgaatggaaatcggaagtagtatgcttctgaaactctttccagggaaacatctcttcttgatttgagaaatgcaaatttatttaacattcttatccctttcttgactaaatttaaatacttcttggtatttgggagctggattcttgtcaactgctgtataaaatatactcacaaaaccattgcagaaaagcaagaaatatttatgtagaagttcttatgaaaacttattgaatttaattttgaaaactgaagctaagagagataataaatatctagagataactattaacagtattctttcaaacataaaataataagataattgggagctgagcataaaacattatttggaaaaattaactttgcttttcttcattgcattttgtgaattc

SEQ ID NO: 103137 - DNA, 1247 bp, Homo sapiens
  Payload ID: 117
  Gene Symbol: AKIP1
  Gene Name: A kinase (PRKA) interacting protein 1
  Uniprot ID: Q9NQ31
  ENST ID: ENST00000299576
  CDS Start-End: 92-643
gctgcgccggcgccgccgggagcgctaggcctggtccctcttcctagaatagcgttgcgcgcatgcgccttgacgagtgagccggggagccatggacaactgtttggcggccgcagcgctgaatggggtggaccgacgttccctgcagcgttcagcaaggctggctctagaagtgctggagagggccaagaggagggcggtggactggcatgccctggagcgtcccaaaggctgcatgggggtccttgcccgggaggcgccccacctagagaaacagccggcagccggcccgcagcgcgttctcccgggagagaaatattattcatctgtgccagaggaaggaggggcaacccatgtctatcgttatcacagaggcgagtcgaagctgcacatgtgcttggacatagggaatggtcagagaaaagacagaaaaaagacatcccttggtcctggaggcagctatcaaatatcagagcatgctccagaggcatcccagcctgctgagaacatctctaaggacctctacatagaagtatatccagggacctattctgtcactgtgggctcaaatgacttaaccaagaagactcatgtggtagcagttgattctggacaaagcgtggacctggtcttccctgtgtgatgttgaccatcactgccatcacatcacctttttttaagtagtaagaataaagccactgtatgattctcttaatagctatacattaatcctgtttttagtgctgactgggtcagccttccgggaactggagtctgtctctttcagtgcttttttgtttgtttggttggtttttttttgagacagtctcactctgttgcccaggctggagtgcagtggcgtgatctcggctcactgcaagttccgcctcccgggttcacaccattctcctgcctcagcctcccgagtagctggcactacaggcacccgccaccatgcccggctattttttttgtatttttagtagagacggggtttcaccatgttggccaggatggtctcgatctcttgacctcgtgatccacccaccttggcctcccaaagtgttgggattacaggcgtgagccaccgcgcccggcctcagtgccttttttaacttgagggtgtagaggtcctccacgcttgtttgcctgaaagtaatataatgatgctgtctgaacaggttttactgcttgctttccaagtaaaggttaattatgataataaagagatttggaaatgaagagaa

SEQ ID NO: 103138 - DNA, 1327 bp, Homo sapiens
  Payload ID: 117
  Gene Symbol: AKIP1
  Gene Name: A kinase (PRKA) interacting protein 1
  Uniprot ID: Q9NQ31
  ENST ID: ENST00000309377
  CDS Start-End: 91-723
ctgcgccggcgccgccgggagcgctaggcctggtccctcttcctagaatagcgttgcgcgcatgcgccttgacgagtgagccggggagccatggacaactgtttggcggccgcagcgctgaatggggtggaccgacgttccctgcagcgttcagcaaggctggctctagaagtgctggagagggccaagaggagggcggtggactggcatgccctggagcgtcccaaaggctgcatgggggtccttgcccgggaggcgccccacctagagaaacagccggcagccggcccgcagcgcgttctcccgggagagagagaagagagacccccaacccttagtgcttccttcagaacaatggctgaattcatggactatacttcaagtcagtgtgggaaatattattcatctgtgccagaggaaggaggggcaacccatgtctatcgttatcacagaggcgagtcgaagctgcacatgtgcttggacatagggaatggtcagagaaaagacagaaaaaagacatcccttggtcctggaggcagctatcaaatatcagagcatgctccagaggcatcccagcctgctgagaacatctctaaggacctctacatagaagtatatccagggacctattctgtcactgtgggctcaaatgacttaaccaagaagactcatgtggtagcagttgattctggacaaagcgtggacctggtcttccctgtgtgatgttgaccatcactgccatcacatcacctttttttaagtagtaagaataaagccactgtatgattctcttaatagctatacattaatcctgtttttagtgctgactgggtcagccttccgggaactggagtctgtctctttcagtgcttttttgtttgtttggttggtttttttttgagacagtctcactctgttgcccaggctggagtgcagtggcgtgatctcggctcactgcaagttccgcctcccgggttcacaccattctcctgcctcagcctcccgagtagctggcactacaggcacccgccaccatgcccggctattttttttgtatttttagtagagacggggtttcaccatgttggccaggatggtctcgatctcttgacctcgtgatccacccaccttggcctcccaaagtgttgggattacaggcgtgagccaccgcgcccggcctcagtgccttttttaacttgagggtgtagaggtcctccacgcttgtttgcctgaaagtaatataatgatgctgtctgaacaggttttactgcttgctttccaagtaaaggttaattatgataataaagagatttggaaatgaagagaa

SEQ ID NO: 103139 - DNA, 1232 bp, Homo sapiens
  Payload ID: 117
  Gene Symbol: AKIP1
  Gene Name: A kinase (PRKA) interacting protein 1
  Uniprot ID: Q9NQ31
  ENST ID: ENST00000309357
  CDS Start-End: 77-628
ccgggagcgctaggcctggtccctcttcctagaatagcgttgcgcgcatgcgccttgacgagtgagccggggagccatggacaactgtttggcggccgcagcgctgaatggggtggaccgacgttccctgcagcgttcagcaaggctggctctagaagtgctggagagggccaagaggagggcggtggactggcatgccctggagcgtcccaaaggctgcatgggggtccttgcccgggaggcgccccacctagagaaacagccggcagccggcccgcagcgcgttctcccgggagagagagaagagagacccccaacccttagtgcttccttcagaacaatggctgaattcatggactatacttcaagtcagtgtgggaaatattattcatctgtgccagaggaaggaggggcaacccatgtctatcgttatcacagaggcgagtcgaagctgcacatgtgcttggacatagggaatggtcaggctgagaacatctctaaggacctctacatagaagtatatccagggacctattctgtcactgtgggctcaaatgacttaaccaagaagactcatgtggtagcagttgattctggacaaagcgtggacctggtcttccctgtgtgatgttgaccatcactgccatcacatcacctttttttaagtagtaagaataaagccactgtatgattctcttaatagctatacattaatcctgtttttagtgctgactgggtcagccttccgggaactggagtctgtctctttcagtgcttttttgtttgtttggttggtttttttttgagacagtctcactctgttgcccaggctggagtgcagtggcgtgatctcggctcactgcaagttccgcctcccgggttcacaccattctcctgcctcagcctcccgagtagctggcactacaggcacccgccaccatgcccggctattttttttgtatttttagtagagacggggtttcaccatgttggccaggatggtctcgatctcttgacctcgtgatccacccaccttggcctcccaaagtgttgggattacaggcgtgagccaccgcgcccggcctcagtgccttttttaacttgagggtgtagaggtcctccacgcttgtttgcctgaaagtaatataatgatgctgtctgaacaggttttactgcttgctttccaagtaaaggttaattatgataataaagagatttggaaatgaagagaa

SEQ ID NO: 103140 - DNA, 1084 bp, Homo sapiens
  Payload ID: 117
  Gene Symbol: AKIP1
  Gene Name: A kinase (PRKA) interacting protein 1
  Uniprot ID: Q9NQ31
  ENST ID: ENST00000396648
  CDS Start-End: 113-664
cggtggtctccagggaggtcgaggctggggctcccacccggatttggagcagggtcgccgcggcccagctgacccgccggcgtttgtacgttgtgtgcccactcagggagccatggacaactgtttggcggccgcagcgctgaatggggtggaccgacgttccctgcagcgttcagcaaggctggctctagaagtgctggagagggccaagaggagggcggtggactggcatgccctggagcgtcccaaaggctgcatgggggtccttgcccgggaggcgccccacctagagaaacagccggcagccggcccgcagcgcgttctcccgggagagaaatattattcatctgtgccagaggaaggaggggcaacccatgtctatcgttatcacagaggcgagtcgaagctgcacatgtgcttggacatagggaatggtcagagaaaagacagaaaaaagacatcccttggtcctggaggcagctatcaaatatcagagcatgctccagaggcatcccagcctgctgagaacatctctaaggacctctacatagaagtatatccagggacctattctgtcactgtgggctcaaatgacttaaccaagaagactcatgtggtagcagttgattctggacaaagcgtggacctggtcttccctgtgtgatgttgaccatcactgccatcacatcacctttttttaagtagtaagaataaagccactgtatgattctcttaatagctatacattaatcctgtttttagtgctgactgggtcagccttccgggaactggagtctgtctctttcagtgcttttttgtttgtttggttggtttttttttgagacagtctcactctgttgcccaggctggagtgcagtggcgtgatctcggctcactgcaagttccgcctcccgggttcacaccattctcctgcctcagcctcccgagtagctggcactacaggcacccgccaccatgcccggctattttttttgtatttttagtagagacggggtttcaccatgttggccaggatggtctcgatctcttgacctcgtgatccacccaccttggcctcccaaag

SEQ ID NO: 103141 - DNA, 1022 bp, Homo sapiens
  Payload ID: 117
  Gene Symbol: AKIP1
  Gene Name: A kinase (PRKA) interacting protein 1
  Uniprot ID: Q9NQ31
  ENST ID: ENST00000534147
  CDS Start-End: 8-640
gggagccatggacaactgtttggcggccgcagcgctgaatggggtggaccgacgttccctgcagcgttcagcaaggctggctctagaagtgctggagagggccaagaggagggcggtggactggcatgccctggagcgtcccaaaggctgcatgggggtccttgcccgggaggcgccccacctagagaaacagccggcagccggcccgcagcgcgttctcccgggagagagagaagagagacccccaacccttagtgcttccttcagaacaatggctgaattcatggactatacttcaagtcagtgtgggaaatattattcatctgtgccagaggaaggaggggcaacccatgtctatcgttatcacagaggcgagtcgaagctgcacatgtgcttggacatagggaatggtcagagaaaagacagaaaaaagacatcccttggtcctggaggcagctatcaaatatcagagcatgctccagaggcatcccagcctgctgagaacatctctaaggacctctacatagaagtatatccagggacctattctgtcactgtgggctcaaatgacttaaccaagaagactcatgtggtagcagttgattctggacaaagcgtggacctggtcttccctgtgtgatgttgaccatcactgccatcacatcacctttttttaagtagtaagaataaagccactgtatgattctcttaatagctatacattaatcctgtttttagtgctgactgggtcagccttccgggaactggagtctgtctctttcagtgcttttttgtttgtttggttggtttttttttgagacagtctcactctgttgcccaggctggagtgcagtggcgtgatctcggctcactgcaagttccgcctcccgggttcacaccattctcctgcctcagcctcccgagtagctggcactacaggcacccgccaccatgcccggctattttttttgtatttttagtagagacggggtttcaccatgttggccaggatggtctcgatc

SEQ ID NO: 103142 - DNA, 513 bp, Homo sapiens
  Payload ID: 117
  Gene Symbol: AKIP1
  Gene Name: A kinase (PRKA) interacting protein 1
  ENST ID: ENST00000529942
  CDS Start-End: 1-456
gcggccgcagcgctgaatggggtggaccgacgttccctgcagcgttcagcaaggctggctctagaagtgctggagagggccaagaggagggcggtggactggcatgccctggagcgtcccaaaggctgcatgggggtccttgcccgggaggcgccccacctagagaaacagccggcagccggcccgcagcgcgttctcccgggagagaaatattattcatctgtgccagaggaaggaggggcaacccatgtctatcgttatcacagaggcgagtcgaagctgcacatgtgcttggacatagggaatggtcaggctgagaacatctctaaggacctctacatagaagtatatccagggacctattctgtcactgtgggctcaaatgacttaaccaagaagactcatgtggtagcagttgattctggacaaagcgtggacctggtcttccctgtgtgatgttgaccatcactgccatcacatcacctttttttaagtagtaagaataaagccact

SEQ ID NO: 103143 - DNA, 1128 bp, Homo sapiens
  Payload ID: 117
  Gene Symbol: AKIP1
  Gene Name: A kinase (PRKA) interacting protein 1
  ENST ID: ENST00000525005
  CDS Start-End: 259-846
gttgcgcgcatgcgccttgacgagtgagccgggtgagggggctccctaagtagcggaaggggtagatgaaaatggaaggggcgggcgcgctaggcctagtcctggctgggctcccgctggagtgtgcgttgggggcggaccaggagcggtggtctccagggaggtcgaggctggggctcccacccggatttggagcagggtcgccgcggcccagctgacccgccggcgtttgtacgttgtgtgcccactcagggagccatggacaactgtttggcggccgcagcgctgaatggggtggaccgacgttccctgcagcgttcagcaaggctggctctagaagtgctggagagggccaagaggagggcggtggactggcatgccctggagcgtcccaaaggctgcatgggggtccttgcccgggaggcgccccacctagagaaacagccggcagccggcccgcagcgcgttctcccgggagagagagaagagagacccccaacccttagtgcttccttcagaacaatggctgaattcatggactatacttcaagtcagtgtgggaaatattattcatctgtgccagaggaaggaggggcaacccatgtctatcgttatcacagaggcgagtcgaagctgcacatgtgcttggacatagggaatggtcagagaaaagacagaaaaaagacatcccttggtcctggaggcagctatcaaatatcagagcatgctccagaggcatcccagcctgtgagtacggaactgcttacgcactgggtttcaccaccgttgcaactccatgaaccagttgacatggttcttagagggctatttgaattgagtctatagtatttttaagttgagatgttcttacacttaagaagggcacacaagattttggttcagtgtaaaattaggttttcttggtattcttccttcactctaagcttcagggatactctttgtgcctgaactcatagttgtggttggaaagaatgtgaagtattcacctctcagttcctacagctcagctgggctggcactgggtcctgctggaattccaccatctgttcaagcagcaggaggggcacgatcctcctgctaacaaagtgaaaaccattgctgaaattc

SEQ ID NO: 103144 - DNA, 1421 bp, Homo sapiens
  Payload ID: 117
  Gene Symbol: AKIP1
  Gene Name: A kinase (PRKA) interacting protein 1
  ENST ID: ENST00000529876
  CDS Start-End: 262-768
agcgttgcgcgcatgcgccttgacgagtgagccgggtgagggggctccctaagtagcggaaggggtagatgaaaatggaaggggcgggcgcgctaggcctagtcctggctgggctcccgctggagtgtgcgttgggggcggaccaggagcggtggtctccagggaggtcgaggctggggctcccacccggatttggagcagggtcgccgcggcccagctgacccgccggcgtttgtacgttgtgtgcccactcagggagccatggacaactgtttggcggccgcagcgctgaatggggtggaccgacgttccctgcagcgttcagcaaggctggctctagaagtgctggagagggccaagaggagggcggtggactggcatgccctggagcgtcccaaaggctgcatgggggtccttgcccgggaggcgccccacctagagaaacagccggcagccggcccgcagcgcgttctcccgggagagaaatattattcatctgtgccagaggaaggaggggcaacccatgtctatcgttatcacagaggcgagtcgaagctgcacatgtgcttggacatagggaatggtcagagaaaagacagaaaaaagacatcccttggtcctggaggcagctatcaaatatcagagcatgctccagaggcatcccagcctgtgagtacggaactgcttacgcactgggtttcaccaccgttgcaactccatgaaccagttgacatggttcttagagggctatttgaattgagtctatagtatttttaagttgagatgttcttacacttaagaagggcacacaagattttggttcagtgtaaaattaggttttcttggtattcttccttcactctaagcttcagggatactctttgtgcctgaactcatagttgtggttggaaagaatgtgaagtattcacctctcagttcctacagctcagctgggctggcactgggtcctgctggaattccaccatctgttcaagcagcaggaggggcacgatcctcctgctaacaaagtgaaaaccattgctgaaattccgaaacatacacatttggtgagatcaggttccaaaacatttgaaggcatttgttcttattttccacaaatgtttctctgtaaaaacatataatgagtttttcatttttaggataaagtactcattaggtcatgaagccaggggatcctttttggaacttggaagggctagaattctgaggaaaggaacttcattcagcatggtgccgcaatacatttactttttgtttgtatacggtttgctacgagtcaggatttggagtatactagagttagtgacaattaagaatattctgcttctagtacaaatataagttgttaaggcttagacgcctctcaacacttgctgacttttggtaatgctgatgttcca

SEQ ID NO: 103145 - DNA, 569 bp, Homo sapiens
  Payload ID: 117
  Gene Symbol: AKIP1
  Gene Name: A kinase (PRKA) interacting protein 1
  ENST ID: ENST00000524577
  CDS Start-End: 32-569
gcatgcgccttgacgagtgagccggggagccatggacaactgtttggcggccgcagcgctgaatggggtggaccgacgttccctgcagcgttcagcaaggctggctctagaagtgctggagagggccaagaggagggcggtggactggcatgccctggagcgtcccaaaggctgcatgggggtccttgcccgggaggcgccccacctagagaaacagccggcagccggcccgcagcgcgttctcccgggagagagagaagagagacccccaacccttagtgcttccttcagaacaatggctgaattcatggactatacttcaagtcagtgtgggaaatattattcatctgtgccagaggaaggaggggcaacccatgtctatcgttatcacagaggcgagtcgaagctgcacatgtgcttggacatagggaatggtcagagaaaagacagaaaaaagacatcccttggtcctggaggcagctatcaaatatcagagcatgctccagaggcatcccagcctgtgagtacggaactgcttacgcactgggtttcaccaccgttgcaactcc

SEQ ID NO: 103146 - DNA, 576 bp, Homo sapiens
  Payload ID: 117
  Gene Symbol: AKIP1
  Gene Name: A kinase (PRKA) interacting protein 1
  ENST ID: ENST00000534506
  CDS Start-End: 32-538
gcatgcgccttgacgagtgagccggggagccatggacaactgtttggcggccgcagcgctgaatggggtggaccgacgttccctgcagcgttcagcaaggctggctctagaagtgctggagagggccaagaggagggcggtggactggcatgccctggagcgtcccaaaggctgcatgggggtccttgcccgggaggcgccccacctagagaaacagccggcagccggcccgcagcgcgttctcccgggagagaaatattattcatctgtgccagaggaaggaggggcaacccatgtctatcgttatcacagaggcgagtcgaagctgcacatgtgcttggacatagggaatggtcagagaaaagacagaaaaaagacatcccttggtcctggaggcagctatcaaatatcagagcatgctccagaggcatcccagcctgtgagtacggaactgcttacgcactgggtttcaccaccgttgcaactccatgaaccagttgacatggttcttagagggctatttgaattgagtctatagtatttttaagttgagatgttcttacacttaagaagggc

SEQ ID NO: 103147 - DNA, 469 bp, Homo sapiens
  Payload ID: 117
  Gene Symbol: AKIP1
  Gene Name: A kinase (PRKA) interacting protein 1
  ENST ID: ENST00000530281
  CDS Start-End: 167-469
tagtcctggctgggctcccgctggagtgtgcgttgggggcggaccaggagcggtggtctccagggaggcgccccacctagagaaacagccggcagccggcccgcagcgcgttctcccgggagagagagaagagagacccccaacccttagtgcttccttcagaacaatggctgaattcatggactatacttcaagtcagtgtgggaaatattattcatctgtgccagaggaaggaggggcaacccatgtctatcgttatcacagaggcgagtcgaagctgcacatgtgcttggacatagggaatggtcagagaaaagacagaaaaaagacatcccttggtcctggaggcagctatcaaatatcagagcatgctccagaggcatcccagcctgctgagaacatctctaaggacctctacatagaagtatatccagggacctattctgtcactgtgggctcaaatgactta

SEQ ID NO: 103148 - DNA, 2430 bp, Homo sapiens
  Payload ID: 118
  Gene Symbol: AAR2
  Gene Name: AAR2 splicing factor homolog
  Uniprot ID: Q9Y312
  ENST ID: ENST00000320849
  CDS Start-End: 88-1242
ccggtgcgtttccgctgtaccggaacgtggggcgaggcgctgttcatcaaagaaaaagggttcttttggtcacccaccactggccccatggctgccgtgcagatggatcctgagctagccaagcgcctcttctttgaaggggccactgtggtcatcctgaacatgcccaagggaacagagtttgggattgactataactcctgggaggtcgggcccaagttccggggcgtgaagatgatccctccaggcatccacttcctccactacagctctgtggacaaggctaatccgaaggaagtaggccctcgtatgggtttcttccttagcctgcaccagcgggggctgacagtgctgcgctggagcacactcagggaagaggtagacctgtccccagccccagagtctgaggtggaggccatgagggccaacctccaggagctggaccagttcctggggccttacccatatgccaccctgaagaagtggatctcactcaccaacttcatcagcgaagccacagtggagaagctacagcccgagaatcgacagatctgtgccttttccgatgtgctacctgtgctctccatgaagcacaccaaggaccgcgtggggcagaatctaccccgctgtggcattgagtgcaaaagctaccaagagggcctggcccggctaccagagatgaagcccagagccgggacagagatccgcttctcagagctgcccacgcagatgttcccagagggtgccacgccagctgagataaccaagcacagcatggacctgagctatgccctggagactgtgctcaacaagcagttccccagcagcccccaggatgtgcttggtgaactccagtttgcttttgtgtgcttcctgctggggaatgtgtacgaggcatttgagcattggaagcggctcctgaacctcctgtgccggtcagaagcagccatgatgaagcaccacaccctctacatcaacctcatctccatcctgtaccaccagcttggtgagatccccgctgacttcttcgtagacattgtctcccaagacaacttcctcaccagcaccttacaggttttcttttcctctgcctgcagcattgccgtggatgccaccctgagaaagaaagctgaaaagttccaagctcacctgaccaagaagttccggtgggactttgctgcggaacctgaggactgtgccccggtggtggtggagctccctgagggcatcgagatgggctaactcggggagcgctctcagctgcgaggggccccttcccacagggctgcagtcctggcctctccatttacttcttcccatcctgggacctgccagggcagcaatctctccaggtcctgcaaagatggagccagaattccctttttcactgataaatatatttcttcattgccaaagaggctgtacccatcctgaaggcacatttgtgggttccccatcagccaggccttggtgctaacctggctgaatttcacacaggctcttacacacacacgctcctaggagacatctgcctacacggcaaccatatttcctctgaatgagaaggaattgaaccaaaagtccaagaaagaactgattgcttgttccataggagcttaggaaacaagaaaccctggattgcccagggggtctgagaagttggttggtgactttttttgcggttaaatgaagggtgatggggagatcagcccgaattgccgcctgcctcttgctaaataggagcagaggacttggcctgcagctccttgggagcccttgattgggaagagagtttcaagggaggcagctggattcaatctagcaggtggtcagcttcagctttctccatcgaaatcccattctcctgtccagaggcccagtgggtcatctcccaaggtgggtgtggaccctggcctcagaggccttgctggtgctgtcacctcccacctgttccattccgaggcctcacccagaagtgggaccctccccttcctcaccagagccaccgtgactgtttctgatgacctggagagtcaacaacaaccagaaaggtttctgcccagagcaggcttcttaaggcctttacgaagttttgtgccttccaagtgctgaagaagacctggtcagcctaaatcttcccagtcccgctgtggagctgtcagtcaccggagtaatgagctcctggttcctcgggagtccttcgtgctgtgtggcagggttcctctctagacaagtacacaggccctgccaccctgacatcaaactgttgtactatgatcacagtccctgtgccatccttttccaagactggggctcacaccatgtttttgaatgagaatccctgctggttgagacttttgcttccacttgtttccttggagatgtttttccaagagcataatgtacattaaagtcttcgagttgagacaa

SEQ ID NO: 103149 - DNA, 2689 bp, Homo sapiens
  Payload ID: 118
  Gene Symbol: AAR2
  Gene Name: AAR2 splicing factor homolog
  Uniprot ID: Q9Y312
  ENST ID: ENST00000373932
  CDS Start-End: 347-1501
cggaacgtggggcgaggcggtgagtgtggcctcctggcctctttttcctttcctgattccttgtgtatgtgtggctgggccgcccctcttctcggctcagagtcacggagtgccttgaactaggcccacctcgccggggcggctggttctctgtttgtgggacgctggtgtctctggaggcccttcctgagaagccgtcgccagagttacgtcgcggttttcttaactttagagcctgggggccggagaccctgattgcactcgacctggctctgccctactctctgcgtgacttccactgttcatcaaagaaaaagggttcttttggtcacccaccactggccccatggctgccgtgcagatggatcctgagctagccaagcgcctcttctttgaaggggccactgtggtcatcctgaacatgcccaagggaacagagtttgggattgactataactcctgggaggtcgggcccaagttccggggcgtgaagatgatccctccaggcatccacttcctccactacagctctgtggacaaggctaatccgaaggaagtaggccctcgtatgggtttcttccttagcctgcaccagcgggggctgacagtgctgcgctggagcacactcagggaagaggtagacctgtccccagccccagagtctgaggtggaggccatgagggccaacctccaggagctggaccagttcctggggccttacccatatgccaccctgaagaagtggatctcactcaccaacttcatcagcgaagccacagtggagaagctacagcccgagaatcgacagatctgtgccttttccgatgtgctacctgtgctctccatgaagcacaccaaggaccgcgtggggcagaatctaccccgctgtggcattgagtgcaaaagctaccaagagggcctggcccggctaccagagatgaagcccagagccgggacagagatccgcttctcagagctgcccacgcagatgttcccagagggtgccacgccagctgagataaccaagcacagcatggacctgagctatgccctggagactgtgctcaacaagcagttccccagcagcccccaggatgtgcttggtgaactccagtttgcttttgtgtgcttcctgctggggaatgtgtacgaggcatttgagcattggaagcggctcctgaacctcctgtgccggtcagaagcagccatgatgaagcaccacaccctctacatcaacctcatctccatcctgtaccaccagcttggtgagatccccgctgacttcttcgtagacattgtctcccaagacaacttcctcaccagcaccttacaggttttcttttcctctgcctgcagcattgccgtggatgccaccctgagaaagaaagctgaaaagttccaagctcacctgaccaagaagttccggtgggactttgctgcggaacctgaggactgtgccccggtggtggtggagctccctgagggcatcgagatgggctaactcggggagcgctctcagctgcgaggggccccttcccacagggctgcagtcctggcctctccatttacttcttcccatcctgggacctgccagggcagcaatctctccaggtcctgcaaagatggagccagaattccctttttcactgataaatatatttcttcattgccaaagaggctgtacccatcctgaaggcacatttgtgggttccccatcagccaggccttggtgctaacctggctgaatttcacacaggctcttacacacacacgctcctaggagacatctgcctacacggcaaccatatttcctctgaatgagaaggaattgaaccaaaagtccaagaaagaactgattgcttgttccataggagcttaggaaacaagaaaccctggattgcccagggggtctgagaagttggttggtgactttttttgcggttaaatgaagggtgatggggagatcagcccgaattgccgcctgcctcttgctaaataggagcagaggacttggcctgcagctccttgggagcccttgattgggaagagagtttcaagggaggcagctggattcaatctagcaggtggtcagcttcagctttctccatcgaaatcccattctcctgtccagaggcccagtgggtcatctcccaaggtgggtgtggaccctggcctcagaggccttgctggtgctgtcacctcccacctgttccattccgaggcctcacccagaagtgggaccctccccttcctcaccagagccaccgtgactgtttctgatgacctggagagtcaacaacaaccagaaaggtttctgcccagagcaggcttcttaaggcctttacgaagttttgtgccttccaagtgctgaagaagacctggtcagcctaaatcttcccagtcccgctgtggagctgtcagtcaccggagtaatgagctcctggttcctcgggagtccttcgtgctgtgtggcagggttcctctctagacaagtacacaggccctgccaccctgacatcaaactgttgtactatgatcacagtccctgtgccatccttttccaagactggggctcacaccatgtttttgaatgagaatccctgctggttgagacttttgcttccacttgtttccttggagatgtttttccaagagcataatgtacattaaagtcttcgagttgagacaa

SEQ ID NO: 103150 - DNA, 1466 bp, Homo sapiens
  Payload ID: 118
  Gene Symbol: AAR2
  Gene Name: AAR2 splicing factor homolog
  ENST ID: ENST00000397286
  CDS Start-End: 94-1290
gaacttccggtgcgtttccgctgtaccggaacgtggggcgaggcgctgttcatcaaagaaaaagggttcttttggtcacccaccactggccccatggctgccgtgcagatggatcctgagctagccaagcgcctcttctttgaaggggccactgtggtcatcctgaacatgcccaagggaacagagtttgggattgactataactcctgggaggtcgggcccaagttccggggcgtgaagatgatccctccaggcatccacttcctccactacagctctgtggacaaggctaatccgaaggaagtaggccctcgtatgggtttcttccttagcctgcaccagcgggggctgacagtgctgcgctggagcacactcagggaagaggtagacctgtccccagccccagagtctgaggtggaggccatgagggccaacctccaggagctggaccagttcctggggccttacccatatgccaccctgaagaagtggatctcactcaccaacttcatcagcgaagccacagtggagaagctacagcccgagaatcgacagatctgtgccttttccgatgtgctacctgtgctctccatgaagcacaccaaggaccgcgtggggcagaatctaccccgctgtggcattgagtgcaaaagctaccaagagggcctggcccggctaccagagatgaagcccagagccgggacagagatccgcttctcagagctgcccacgcagatgttcccagagggtgccacgccagctgagataaccaagcacagcatggacctgagctatgccctggagactgtgctcaacaagcagttccccagcagcccccaggatgtgcttggtgaactccagtttgcttttgtgtgcttcctgctggggaatgtgtacgaggcatttgagcattggaagcggctcctgaacctcctgtgccggtcagaagcagccatgatgaagcaccacaccctctacatcaacctcatctccatcctgtaccaccagcttggtgagatccccgctgacttcttcgtagacattgtctcccaagacaacttcctcaccagcaccttacagagacagagtctcgctgtgtcacccagactgaagtgcagtgacttaatcatagctcgctgcagccttgaactcctgggctcatacgatccacccacctcagcctccagagtagctgggactacaggaagatatcatcacacccggctaattaacaacaacaaaaaaaattgtagggataaagtctttctatgttgcccaggctggtcttgaactcctagcctcaagcaatcctcccactttggcctctcaaaatgttgggattacaggcgtgagtcgccacacccggcccacggcatcacttttatctgccacagcatatttcattctgtgtttataccttggtataaccactctcctgttttggggaactaggtttctggttttgc

SEQ ID NO: 103151 - DNA, 2234 bp, Homo sapiens
  Payload ID: 119
  Gene Symbol: ADCK1
  Gene Name: aarF domain containing kinase 1
  Uniprot ID: Q86TW2
  ENST ID: ENST00000238561
  CDS Start-End: 100-1671
aggtggctgtccccgcacggttcccagctaattccccgctaccgggttgcggccggaagccgggcgccgcggctctgcttccctcggggatctggcgacatggccagaaaggctctcaagcttgcttcgtggaccagcatggctcttgctgcctctggcatctacttctacagtaacaagtacttggaccctaatgactttggcgctgtcagggtgggcagagcagttgctacgacggctgtcatcagttacgactacctcacttccctgaagagtgtcccttatggctcagaggagtacttgcagctgagatctaaggtgcaccttcgctctgccaggcgtctctgtgagctctgctgtgccaaccggggcaccttcatcaaggtgggccagcacctgggggctctggactacctgttgccagaggagtacaccagcacgctgaaggtactgcacagccaggctccacagagcagcatgcaagagatccgccaggtcatccgagaagatctgggcaaggagatccatgatttgttccagagcttcgatgacacccctctggggacggcctccctggcccaggtccacaaggcagtgctgcatgatgggcggacggtggccgtgaaggtccagcacccaaaggtgcgggctcagagctcgaaggacattctcctgatggaggtgctcgttctggctgtgaagcagctgttcccagagtttgagtttatgtggcttgtggatgaagccaagaagaacctgcctttggagctggatttcctcaatgaagggaggaatgctgagaaggtgtcccagatgctcaggcattttgacttcttgaaggtcccccgaatccactgggacctgtccacggagcgggtcctcctgatggagtttgtggatggcgggcaggtcaatgacagagactacatggagaggaacaagatcgacgtcaatgagatctcacgccacctgggcaagatgtatagtgagatgatcttcgtcaatggcttcgtgcactgcgatccccaccccggcaatgtactggtgcggaagcaccccggcacgggaaaggcggagattgtcctgttggaccatgggctttaccagatgctcacggaagaattccgcctgaattactgccacctctggcagtctctgatctggactgacatgaagagagtgaaggagtacagccagcgactgggagccggggatctctaccccttgtttgcctgcatgctgacggcgcgatcgtgggactcggtcaacagaggcatcagccaagctcccgtcactgccactgaggacttagagattcgcaacaacgcggccaactacctcccccagatcagccatctcctcaaccacgtgccgcgccagatgctgctcatcttgaagaccaacgacctgctgcgtggcattgaggccgccctgggcacccgcgccagcgccagctcctttctcaacatgtcacgttgctgcatcagagcgctagctgagcacaagaagaagaatacctgttcattcttcagaaggacccagatctctttcagcgaggccttcaacttatggcagatcaacctccatgagctcatcctgcgtgtgaaggggttgaagctggctgaccgggtcttggccctaatatgctggctgttccctgctccactctgagtggaattgctctccctgccccattctggtgtctttccactcctcagcccctcatcttgcctccacccagctgctccatttttgccacatcgtggcccgcagccccagagtcactgtccatgtcaccatccttctcctcctttggaatcctctccgcacactgtggcccttgtctcagggcccacaagctgaactgtggcatagctctctcttcttctccaagaagactcagcagcctacattcccattcctggtatgtgccattgggttggatgtccccactacttccgttaacccttcccattgtcaagatgtgccacgggtgccactgggggcacactgaacttgtagggagtgtgattttgttggaggtgcacatggtctctgaatttgacagagaacaccttccctttccttgccatgtcaccctccagaggaagtcacacctcagcgaggtggtttggcatctggggccaactccattacagctatgagctcactgctgtcagtgacgtttggtgttttctgtactgtgtttcaataaaaactccttcaaggttgca

SEQ ID NO: 103152 - DNA, 1972 bp, Homo sapiens
  Payload ID: 119
  Gene Symbol: ADCK1
  Gene Name: aarF domain containing kinase 1
  Uniprot ID: Q86TW2
  ENST ID: ENST00000341211
  CDS Start-End: 44-1411
aagccgggcgccgcggctctgcttccctcggggatctggcgacatggccagaaaggctctcaagcttgcttcgtggaccagcatggctcttgctgcctctggcatctacttctacagtaacaagtacttggaccctaatgactttggcgctgtcagggtgggcagagcagttgctacgacggctgtcatcagttacgactacctcacttccctgaagagtgtcccttatggctcagaggagtacttgcagctgagatctaagatccatgatttgttccagagcttcgatgacacccctctggggacggcctccctggcccaggtccacaaggcagtgctgcatgatgggcggacggtggccgtgaaggtccagcacccaaaggtgcgggctcagagctcgaaggacattctcctgatggaggtgctcgttctggctgtgaagcagctgttcccagagtttgagtttatgtggcttgtggatgaagccaagaagaacctgcctttggagctggatttcctcaatgaagggaggaatgctgagaaggtgtcccagatgctcaggcattttgacttcttgaaggtcccccgaatccactgggacctgtccacggagcgggtcctcctgatggagtttgtggatggcgggcaggtcaatgacagagactacatggagaggaacaagatcgacgtcaatgagatctcacgccacctgggcaagatgtatagtgagatgatcttcgtcaatggcttcgtgcactgcgatccccaccccggcaatgtactggtgcggaagcaccccggcacgggaaaggcggagattgtcctgttggaccatgggctttaccagatgctcacggaagaattccgcctgaattactgccacctctggcagtctctgatctggactgacatgaagagagtgaaggagtacagccagcgactgggagccggggatctctaccccttgtttgcctgcatgctgacggcgcgatcgtgggactcggtcaacagaggcatcagccaagctcccgtcactgccactgaggacttagagattcgcaacaacgcggccaactacctcccccagatcagccatctcctcaaccacgtgccgcgccagatgctgctcatcttgaagaccaacgacctgctgcgtggcattgaggccgccctgggcacccgcgccagcgccagctcctttctcaacatgtcacgttgctgcatcagagcgctagctgagcacaagaagaagaatacctgttcattcttcagaaggacccagatctctttcagcgaggccttcaacttatggcagatcaacctccatgagctcatcctgcgtgtgaaggggttgaagctggctgaccgggtcttggccctaatatgctggctgttccctgctccactctgagtggaattgctctccctgccccattctggtgtctttccactcctcagcccctcatcttgcctccacccagctgctccatttttgccacatcgtggcccgcagccccagagtcactgtccatgtcaccatccttctcctcctttggaatcctctccgcacactgtggcccttgtctcagggcccacaagctgaactgtggcatagctctctcttcttctccaagaagactcagcagcctacattcccattcctggtatgtgccattgggttggatgtccccactacttccgttaacccttcccattgtcaagatgtgccacgggtgccactgggggcacactgaacttgtagggagtgtgattttgttggaggtgcacatggtctctgaatttgacagagaacaccttccctttccttgccatgtcaccctccagaggaagtcacacctcagcgaggtggtttggcatctggggccaactccattacagctatgagctcactgctgtcagtgacgtttggtgttttctgtactgtgtttcaataaaaactccttcaaggttg

SEQ ID NO: 103153 - DNA, 1225 bp, Homo sapiens
  Payload ID: 119
  Gene Symbol: ADCK1
  Gene Name: aarF domain containing kinase 1
  ENST ID: ENST00000393639
  CDS Start-End: 63-719
gctaccgggttgcggccggaagccgggcgccgcggctctgcttccctcggggatctggcgacatggccagaaaggctctcaagcttgcttcgtggaccagcatggctcttgctgcctctggcatctacttctacagtaacaagtacttggaccctaatgactttggcgctgtcagggtgggcagagcagttgctacgacggctgtcatcagttacgactacctcacttccctgaagagtgtcccttatggctcagaggagtacttgcagctgagatctaaggtgcaccttcgctctgccaggcgtctctgtgagctctgctgtgccaaccggggcaccttcatcaaggtgggccagcacctgggggctctggactacctgttgccagaggagtacaccagcacgctgaaggtactgcacagccaggctccacagagcagcatgcaagagatccgccaggtcatccgagaagatctgggcaaggaggtgctcgttctggctgtgaagcagctgttcccagagtttgagtttatgtggcttgtggatgaagccaagaagaacctgcctttggagctggatttcctcaatgaagggaggaatgctgagaaggtgtcccagatgctcaggcattttgacttcttgaagcctgggcaacagagcgagactgcgtctcaaggaacaacaacaacaacaaaaaagaaatgggacagaaagttgtaaggccagatgtgggtgactcaccgactcgcagcgatgtcgaggtcccccgaatccactgggacctgtccacggagcgggtcctcctgatggagtttgtggatggcgggcaggtcaatgacagagactacatggagaggaacaagatcgacgtcaatgagatctcacgccacctgggcaagatgtatagtgagatgatcttcgtcaatggcttcgtgcactgcgatccccaccccggcaatgtactggtgcggaagcaccccggcacgggaaaggcggagattgtcctgttggaccatgggctttaccagatgctcacggaagaattccgcctgaattactgccacctctggcagtctctgatctggactgacatgaagagagtgaaggagtacagccagcgactgggagccggggatctctaccccttgtttgcctgcatgctgacggcgcgatcgtgggactcggtcaacagaggcatcagccaagctcccgtcactgccactgag

SEQ ID NO: 103154 - DNA, 765 bp, Homo sapiens
  Payload ID: 119
  Gene Symbol: ADCK1
  Gene Name: aarF domain containing kinase 1
  ENST ID: ENST00000556048
  CDS Start-End: 66-434
cccgctaccgggttgcggccggaagccgggcgccgcggctctgcttccctcggggatctggcgacatggccagaaaggctctcaagcttgcttcgtggaccagcatggctcttgctgcctctggcatctacttctacagtaacaagtacttggaccctaatgactttggcgctgtcagggtgggcagagcagttgctacgacggctgtcatcagttacgactacctcacttccctgaagagtgtcccttatggctcagaggagtacttgcagctgagatctaagagtcttgctgtatctcccaggctggagtgcattggcgtgatctcggctcactgcaacctctacctcctgggttcaagtgattctcctgcctcagcctcccaagtagctgggactacaggtgcaccttcgctctgccaggcgtctctgtgagctctgctgtgccaaccggggcaccttcatcaaggtgggccagcacctgggggctctggactacctgttgccagaggagtacaccagcacgctgaaggtactgcacagccaggctccacagagcagcatgcaagagatccgccaggtcatccgagaagatctgggcaaggagatccatgatttgttccagagcttcgatgacacccctctggggacggcctccctggcccaggtccacaaggcagtgctgcatgatgggcggacggtggccgtgaaggtccagcacccaaaggtgcgggctcagagctcgaaggacattctcctgatggag

SEQ ID NO: 103155 - DNA, 844 bp, Homo sapiens
  Payload ID: 119
  Gene Symbol: ADCK1
  Gene Name: aarF domain containing kinase 1
  ENST ID: ENST00000557501
  CDS Start-End: 48-844
ccggaagccgggcgccgcggctctgcttccctcggggatctggcgacatggccagaaaggctctcaagcttgcttcgtggaccagcatggctcttgctgcctctggcatctacttctacagtaacaagtacttggaccctaatgactttggcgctgtcagggtgggcagagcagttgctacgacggctgtcatcagttacgactacctcacttccctgaagagtgtcccttatggctcagaggagtacttgcagctgagatctaaggtgcaccttcgctctgccaggcgtctctgtgagctctgctgtgccaaccggggcaccttcatcaaggtgggccagcacctgggggctctggactacctgttgccagaggagtacaccagcacgctgaaggtactgcacagccaggctccacagagcagcatgcaagagatccgccaggtcatccgagaagatctgggcaaggagatccatgatttgttccagagcttcgatgacacccctctggggacggcctccctggcccaggtccacaaggcagtgctgcatgatgggcggacggtggccgtgaaggtccagcacccaaaggtgcgggctcagagctcgaaggacattctcctgatggaggtgctcgttctggctgtgaagcagctgttcccagagtttgagtttatgtggcttgtggatgaagccaagaagaacctgcctttggagctggatttcctcaatgaagggaggaatgctgagaaggtgtcccagatgctcaggcattttgacttcttgaagatctcacgccacctgggcaagatgtatagtgagatgatcttcgtcaatggcttcgt

SEQ ID NO: 103156 - DNA, 2377 bp, Homo sapiens
  Payload ID: 120
  Gene Symbol: ADCK2
  Gene Name: aarF domain containing kinase 2
  Uniprot ID: Q7Z695
  ENST ID: ENST00000072869
  CDS Start-End: 179-2059
ggcgcgggcctccggcctgaggcccggcgaggtgctggagggagcggggcgcggatccggcccagatgggcagctccgtccgcggggtcagggccgggcttcggcttcaccgcagcctcgcctgagcgggcgcctctgaagtggagggcgggccgcctgggccgcgggcctcgggaggatggtggcgccctggcgcgtctccgtcagggtttgcctgtcgcacctgaggtgcttcgagctcagacagggactcagcctcctgaggccctccgagtgccctcgcgatgccaggctctgctggcttctgctgggcactttgcccaaggtcgtctccctgtgcggggacgtgggtgagggggcccctgacgttctgagtcggcgaagggtccgctgcagcggggcggctggcgcggggcccgcggagagcctcccccgagcgggacctctgggcggcgtcttcctgcatctccgcctctggcttcgcgccggcgctctgttggtgaaattcttccccctcctactcctctaccccctcacctacctggctcccagcgtctccaccctctggctccacctgcttctgaaagccaccgagacctcaggcccaacctacatcaaactgggccagtgggccagcacccggcgcgatctgttttcggaggctttctgtgcccaattttccaagctgcatgtccgagtgacgccccacccgtggactcacactgagcgcttccttcggcaggcttttggggatgactgggggagcatcctctcttttgagaaccgggaacctgtgggctcaggctgcgtggcccaggtgtacaaagcatacgccaacactgccttcctggagactgacagcgtccagagacttggcagggcctcctgtctgccgcccttctcacatactggggcagtcggtgggctgagagagctctttggataccttggaaatggccggaaacctccagaaaatctcgcagaccagtcgtttctagaaaggctgctcctccctaaagctgacctggttggatcaaatgcaggggtgtctcgggctcaggtccctggccaccaacctgaggccaccaacctcatctccgtggcagtgaaagtgttgcaccctggcctgctcgctcaggtgcatatggacctgctgctgatgaagattggcagccgagtcctgggagttttgccaggcatcaagtggcttagcttgcctgagattgtggaggaatttgagaagctgatggtccaacagattgacctgcgttacgaagctcagaatctagaacacttccaggtcaacttccggaatgtgaaagccgtcaagttccccacccctctgcgcccctttgtcaccagagaagtcttggtggaaacgtatgaagagagtgtgcctgtgtccagttaccagcaggcaggaattcccgtggacttgaaaaggaagattgcacggctggggatcaacatgctcctgaagatgatatttgtggataactttgtccatgcagaccttcaccctggaaacatcctggttcagggtgccaacggcctgtcctcgagtcaggaggcgcagctgcagcaggcggacatctgtgacactctggtggtggccgtgccatcttccctctgcccgctgcgactggtgctgctggatgctggcattgtggcggagctgcaggcccctgacctgaggaatttccgggcagttttcatggctgtggtgatggggcagggccagagagtggctgagctgatcctgcatcatgcccgggccagcgagtgcagggacgtggaggggttcaaaaccgagatggccatgctggtgacccaggccaggaagaacaccatcaccctggagaagcttcatgtgtccagccttctctctagtgtctttaagttgctgatgactcacaaggtaaagcttgagagcaactttgcctccattgtgtttgccatcatggtgttggaggggcttggccgctcactggaccccaaactggacatcctggaggcagcgaggcccttcctcctcacgggcccagtgtgccccccgtgatggggcagtggcctctgtgggcccttgtcaagagctggaggccactcccaagagcctctcctatggcagctgggacgttttaaaattgggacaccaatttcaaatgtaaccctccagtggtggaaggcacaccatggcttcctctgcttggtttgagggtctgttcaaaagctttgggccaattagggagtaaaaggagggaaggggcctatccattccattgtggaagctgggccaggtgccagggacactctccttcagggaaaatgttatgtggaggaggacgaataaatttattttgttttcctgtttttctca

SEQ ID NO: 103157 - DNA, 1487 bp, Homo sapiens
  Payload ID: 120
  Gene Symbol: ADCK2
  Gene Name: aarF domain containing kinase 2
  ENST ID: ENST00000483369
  CDS Start-End: 1-1411
ctgtgcccaattttccaagctgcatgtccgagtgacgccccacccgtggactcacactgagcgcttccttcggcaggcttttggggatgactgggggagcatcctctcttttgagaaccgggaacctgtgggctcaggctgcgtggcccaggtgtacaaagcatacgccaacactgccttcctggagactgacagcgtccagagacttggcagggcctcctgtctgccgcccttctcacatactggggcagtcggtgggctgagagagctctttggataccttggaaatggccggaaacctccagaaaatctcgcagaccagtcgtttctagaaaggctgctcctccctaaagctgacctggttggatcaaatgcaggggtgtctcgggctcaggtccctggccaccaacctgaggccaccaacctcatctccgtggcagtgaaagtgttgcaccctggcctgctcgctcaggtgcatatggacctgctgctgatgaagattggcagccgagtcctgggagttttgccaggcatcaagtggcttagcttgcctgagattgtggaggaatttgagaagctgatggtccaacagattgacctgcgttacgaagctcagaatctagaacacttccaggtcaacttccggaatgtgaaagccgtcaagttccccacccctctgcgcccctttgtcaccagagaagtcttggtggaaacgtatgaagagagtgtgcctgtgtccagttaccagcaggcaggaattcccgtggacttgaaaaggaagattgcacggctggggatcaacatgctcctgaagatgatatttgtggataactttgtccatgcagaccttcaccctggaaacatcctggttcagggtgccaacggcctgtcctcgagtcaggaggcgcagctgcagcaggcggacatctgtgacactctggtggtggccgtgccatcttccctctgcccgctgcgactggtgctgctggatgctggcattgtggcggagctgcaggcccctgacctgaggaatttccgggcagttttcatggctgtggtgatggggcagggccagagagtggctgagctgatcctgcatcatgcccgggccagcgagtgcagggacgtggaggggttcaaaaccgagatggccatgctggtgacccaggccaggaagaacaccatcaccctggagaagcttcatgtgtccagccttctctctagtgtctttaagttgctgatgactcacaaggtcttgaggggacattcaaagcaggcagagaggggttgggatggctccagatggctgggagggagaacaccagctggtcacgcagcccctcgtgccagtgcgcatcaggtacagtgtggaggcgggaaagggacaaaaagacggcagtctcttccctgagcctatgccaacccagccttaaagccagtggatcgaatcaagccatttgtggcattatctattgctgcgtacgaac

SEQ ID NO: 103158 - DNA, 950 bp, Homo sapiens
  Payload ID: 120
  Gene Symbol: ADCK2
  Gene Name: aarF domain containing kinase 2
  ENST ID: ENST00000473512
  CDS Start-End: 1-672
attgacctgcgttacgaagctcagaatctagaacacttccaggtcaacttccggaatgtgaaagccgtcaagttccccacccctctgcgcccctttgtcaccagagaagtcttggtggaaacgtatgaagagagtgtgcctgtgtccagttaccagcaggcaggaattcccgtggacttgaaaaggaagattgcacggctggggatcaacatgctcctgaagatgatatttgtggataactttgtccatgcagaccttcaccctggaaacatcctggttcagggtgccaacggcctgtcctcgagtcaggaggcgcagctgcagcaggcggacatctgtgacactctggtggtggccgtgccatcttccctctgcccgctgcgactggtgctgctggatgctggcattgtggcggagctgcaggcccctgacctgaggaatttccgggcagttttcatggctgtggtgatggggcagcttcatgtgtccagccttctctctagtgtctttaagttgctgatgactcacaaggtaaagcttgagagcaactttgcctccattgtgtttgccatcatggtgttggaggggcttggccgctcactggaccccaaactggacatcctggaggcagcgaggcccttcctcctcacgggcccagtgtgccccccgtgatggggcagtggcctctgtgggcccttgtcaagagctggaggccactcccaagagcctctcctatggcagctgggacgttttaaaattgggacaccaatttcaaatgtaaccctccagtggtggaaggcacaccatggcttcctctgcttggtttgagggtctgttcaaaagctttgggccaattagggagtaaaaggagggaaggggcctatccattccattgtggaagctgggccaggtgccagggacactctccttcagggaaaatgttatgtgga

SEQ ID NO: 103159 - DNA, 2092 bp, Homo sapiens
  Payload ID: 120
  Gene Symbol: ADCK2
  Gene Name: aarF domain containing kinase 2
  ENST ID: ENST00000476491
  CDS Start-End: 179-1951
ggcgcgggcctccggcctgaggcccggcgaggtgctggagggagcggggcgcggatccggcccagatgggcagctccgtccgcggggtcagggccgggcttcggcttcaccgcagcctcgcctgagcgggcgcctctgaagtggagggcgggccgcctgggccgcgggcctcgggaggatggtggcgccctggcgcgtctccgtcagggtttgcctgtcgcacctgaggtgcttcgagctcagacagggactcagcctcctgaggccctccgagtgccctcgcgatgccaggctctgctggcttctgctgggcactttgcccaaggtcgtctccctgtgcggggacgtgggtgagggggcccctgacgttctgagtcggcgaagggtccgctgcagcggggcggctggcgcggggcccgcggagagcctcccccgagcgggacctctgggcggcgtcttcctgcatctccgcctctggcttcgcgccggcgctctgttggtgaaattcttccccctcctactcctctaccccctcacctacctggctcccagcgtctccaccctctggctccacctgcttctgaaagccaccgagacctcaggcccaacctacatcaaactgggccagtgggccagcacccggcgcgatctgttttcggaggctttctgtgcccaattttccaagctgcatgtccgagtgacgccccacccgtggactcacactgagcgcttccttcggcaggcttttggggatgactgggggagcatcctctcttttgagaaccgggaacctgtgggctcaggctgcgtggcccaggtgtacaaagcatacgccaacactgccttcctggagactgacagcgtccagagacttggcagggcctcctgtctgccgcccttctcacatactggggcagtcggtgggctgagagagctctttggataccttggaaatggccggaaacctccagaaaatctcgcagaccagtcgtttctagaaaggctgctcctccctaaagctgacctggttggatcaaatgcaggggtgtctcgggctcaggtccctggccaccaacctgaggccaccaacctcatctccgtggcagtgaaagtgttgcaccctggcctgctcgctcaggtgcatatggacctgctgctgatgaagattggcagccgagtcctgggagttttgccaggcatcaagtggcttagcttgcctgagattgtggaggaatttgagaagctgatggtccaacagattgacctgcgttacgaagctcagaatctagaacacttccaggtcaacttccggaatgtgaaagccgtcaagttccccacccctctgcgcccctttgtcaccagagaagtcttggtggaaacgtatgaagagagtgtgcctgtgtccagttaccagcaggcaggaattcccgtggacttgaaaaggaagattgcacggctggggatcaacatgctcctgaagatgatatttgtggataactttgtccatgcagaccttcaccctggaaacatcctggttcagggtgccaacggcctgtcctcgagtcaggaggcgcagctgcagcaggcggacatctgtgacactctggtggtggccgtgccatcttccctctgcccgctgcgactggtgctgctggatgctggcattgtggcggagctgcaggcccctgacctgaggaatttccgggcagttttcatggctgtggtgatggggcagggccagagagtggctgagctgatcctgcatcatgcccgggccagcgagtgcagggacgtggaggggttcaaaaccgagatggccatgctggtgacccaggccaggaagaacaccatcaccctggagaagcttcatgtgtccagccttctctctagtgtctttaagttgctgatgactcacaaggtaaaatcacagtttatccctgcaccttcatagattatgttgctcgtcttagagaccaccaggcagcgaatggagtcaagcccttgcgctctccgagagtcctgccctgactacaggactagtttctcccattctttccttctccaggataaagttcctcattcctgtctttta

SEQ ID NO: 103160 - DNA, 1595 bp, Homo sapiens
  Payload ID: 120
  Gene Symbol: ADCK2
  Gene Name: aarF domain containing kinase 2
  ENST ID: ENST00000622666
  CDS Start-End: 176-1399
gcgggcctccggcctgaggcccggcgaggtgctggagggagcggggcgcggatccggcccagatgggcagctccgtccgcggggtcagggccgggcttcggcttcaccgcagcctcgcctgagcgggcgcctctgaagtggagggcgggccgcctgggccgcgggcctcgggaggatggtggcgccctggcgcgtctccgtcagggtttgcctgtcgcacctgaggtgcttcgagctcagacagggactcagcctcctgaggccctccgagtgccctcgcgatgccaggctctgctggcttctgctgggcactttgcccaaggtcgtctccctgtgcggggacgtgggtgagggggcccctgacgttctgagtcggcgaagggtccgctgcagcggggcggctggcgcggggcccgcggagagcctcccccgagcgggacctctgggcggcgtcttcctgcatctccgcctctggcttcgcgccggcgctctgttggtgaaattcttccccctcctactcctctaccccctcacctacctggctcccagcgtctccaccctctggctccacctgcttctgaaagccaccgagacctcaggcccaacctacatcaaactgggccagtgggccagcacccggcgcgatctgttttcggaggctttctgtgcccaattttccaagctgcatgtccgagtgacgccccacccgtggactcacactgagcgcttccttcggcaggcttttggggatgactgggggagcatcctctcttttgagaaccgggaacctgtgggctcaggctgcgtggcccaggtgtacaaagcatacgccaacactgccttcctggagactgacagcgtccagagacttggcagggcctcctgtctgccgcccttctcacatactggggcagtcggtgggctgagagagctctttggataccttggaaatggccggaaacctccagaaaatctcgcagaccagtcgtttctagaaaggctgctcctccctaaagctgacctggttggatcaaatgcaggggtgtctcgggctcaggtccctggccaccaacctgaggccaccaacctcatctccgtggcagtgaaagtgttgcaccctggcctgctcgctcaggtgcatatggacctgctgctgatgaagattggcagccgagtcctgggagttttgccaggcatcaagtggcttagcttgcctgagattgtggaggaatttgagaagctgatggtccaacagattgacctgcgttacgaagctcagaatctagaacacttccaggtcaacttccggaatgtgaaagccgtcaagttccccacccctctgcgcccctcctatggcagctgggacgttttaaaattgggacaccaatttcaaatgtaaccctccagtggtggaaggcacaccatggcttcctctgcttggtttgagggtctgttcaaaagctttgggccaattagggagtaaaaggagggaaggggcctatccattccattgtggaagctgggccaggtgccagggacactctccttcagggaaaatgttatgtggaggaggacgaataaatttattttgtttt

SEQ ID NO: 103161 - DNA, 2872 bp, Homo sapiens
  Payload ID: 121
  Gene Symbol: ADCK3
  Gene Name: aarF domain containing kinase 3
  Uniprot ID: Q8NI60
  ENST ID: ENST00000366777
  CDS Start-End: 122-2065
gttggtaaacagatccggagcgcgtggcgggcgtcagcgcggtggccagcgcgcagaggcgggcgcggaggcggctagaaggtgaccgcggatcccagcttcctgcagccagccctgaaggatggctgccatattgggagacaccatcatggtggctaaaggccttgtcaagctgacccaggcggccgtggaaacccacctgcagcacttgggcatcggaggggagctgatcatggcggccagggccctgcagtccacggctgtggagcagattggcatgttcttggggaaggtgcagggtcaggataaacatgaagaatattttgctgagaacttcggcggcccagaaggggagttccacttctcagtcccgcatgcagccggagcctccacagacttctcttcagcctccgctcccgaccagtcagcgcccccatccctgggtcatgcccacagcgagggcccagctcctgcctacgtggccagtggaccctttagagaagccgggttccccggccaggcctcctcccctctgggcagggccaacgggaggctctttgcaaaccccagagactcattctctgccatgggctttcagcgaaggttcttccaccaggaccaatcccctgttgggggcctcacagccgaggacattgagaaggcccggcaggctaaggctcgccccgagaacaagcagcacaaacagacgctcagcgagcatgcccgggagcggaaggtgcctgtgacgaggattggccggctggccaacttcggaggtctggccgtgggcctgggcttcggggcactggcagaggtcgccaagaagagcctgcgctccgaggacccctcagggaagaaggccgtgctgggttccagtcctttcctgtccgaggccaatgcagagcggatcgtgcgcacgctctgcaaggtgcgtggtgcggcactcaagctgggccagatgctgagcatccaggatgatgcctttatcaacccccacctggctaagatcttcgagcgggtgcggcagagcgcggacttcatgccactgaagcagatgatgaaaactctcaacaacgacctgggccccaactggcgggacaagttggaatacttcgaggagcggcccttcgccgccgcatccattgggcaggtgcacttggcccgaatgaagggcggccgcgaggtggccatgaagatccagtaccctggcgtggcccagagcatcaacagtgatgtcaacaacctcatggccgtgttgaacatgagcaacatgcttccagaaggcctgttccccgagcacctgatcgacgtgctgaggcgggagctggccctggagtgtgactaccagcgagaggccgcctgtgcccgcaagttcagggacctgctgaagggccaccccttcttctatgtgcctgagattgtggatgagctctgcagcccacatgtgctgaccacagagctggtgtctggcttccccctggaccaggccgaagggctcagccaggagattcggaacgagatctgctacaacatcctggttctgtgcctgagggagctgttcgagttccacttcatgcaaacagaccccaactggtccaacttcttctatgacccccagcagcacaaggtggctcttttggattttggggcaacgcgggaatatgacagatccttcaccgacctctacattcagatcatcagggctgctgccgacagggacagggagactgtgcgggcgaaatccatagagatgaagttcctcaccggctacgaggtcaaggtcatggaagacgcccacttggatgccatcctcatcctgggggaggccttcgcctctgatgagccttttgattttggcactcagagcaccaccgagaagatccacaacctgattcccgtcatgctgaggcaccgtctcgtccccccacccgaggaaacctactccctgcacaggaagatggggggctccttcctcatctgctccaagctgaaggcccgcttcccctgcaaggccatgttcgaggaggcctacagcaactactgcaagaggcaggcccagcagtagggctgcgggccacgcccaggccggctccgcgggaactctctccctcagacaggccaaaaaccagtagcgaggtcgtggtgatgctctttttaactcctttgcccaataaggggggtggctgcctggagccccgtagccagcgctttccacggtttctgttgctaaatggttgtagggtgagaagtgcaagaatgaagatgaagccccactgctcggtcagtctgcctccgtgtgtcctctgaaataagcagatgaagatgaaagggcaactttgttttcttctttttcctgatgtgaatgttaagcagaagggagagagtccttactcccttccaatctctgttcagtgcaaaacccagaaacatgaacagatacgattgtgggattttatcatctgtgtagtaggtgtgtgtatgtgtttctagagtgagatttgtgttttctgcccttttcctctccagccgatgggctggagctgggagaggtgctgagctaacagtgccaacaagtgctccttaagcctgcgaggcccaggcctgtggggctggttctcacctttgacagctgaatgttcctaaagaactgctgccccacagtgagggtgggagcagcggaacagggaatgccagacacaggctcgctgctgctggaaggcggggtgggacttccttcctctgtccggagaggcacaggtgtcaccagttccagccaaaggctcctcacaggcgctgtgaatttttgtacaagtcttgtaattatcgaatcaacaacttgtttcaatttaataaaaatgctcatgggaagtgc

SEQ ID NO: 103162 - DNA, 2743 bp, Homo sapiens
  Payload ID: 121
  Gene Symbol: ADCK3
  Gene Name: aarF domain containing kinase 3
  Uniprot ID: Q8NI60
  ENST ID: ENST00000366778
  CDS Start-End: 149-1936
gagttggtaaacagatccggagcgcgtggcgggcgtcagcgcggtggccagcgcgcagaggcgggcgcggaggcggctagaaggtgaccgcggatcccagcttcctgcagccagggccctgcagtccacggctgtggagcagattggcatgttcttggggaaggtgcagggtcaggataaacatgaagaatattttgctgagaacttcggcggcccagaaggggagttccacttctcagtcccgcatgcagccggagcctccacagacttctcttcagcctccgctcccgaccagtcagcgcccccatccctgggtcatgcccacagcgagggcccagctcctgcctacgtggccagtggaccctttagagaagccgggttccccggccaggcctcctcccctctgggcagggccaacgggaggctctttgcaaaccccagagactcattctctgccatgggctttcagcgaaggttcttccaccaggaccaatcccctgttgggggcctcacagccgaggacattgagaaggcccggcaggctaaggctcgccccgagaacaagcagcacaaacagacgctcagcgagcatgcccgggagcggaaggtgcctgtgacgaggattggccggctggccaacttcggaggtctggccgtgggcctgggcttcggggcactggcagaggtcgccaagaagagcctgcgctccgaggacccctcagggaagaaggccgtgctgggttccagtcctttcctgtccgaggccaatgcagagcggatcgtgcgcacgctctgcaaggtgcgtggtgcggcactcaagctgggccagatgctgagcatccaggatgatgcctttatcaacccccacctggctaagatcttcgagcgggtgcggcagagcgcggacttcatgccactgaagcagatgatgaaaactctcaacaacgacctgggccccaactggcgggacaagttggaatacttcgaggagcggcccttcgccgccgcatccattgggcaggtgcacttggcccgaatgaagggcggccgcgaggtggccatgaagatccagtaccctggcgtggcccagagcatcaacagtgatgtcaacaacctcatggccgtgttgaacatgagcaacatgcttccagaaggcctgttccccgagcacctgatcgacgtgctgaggcgggagctggccctggagtgtgactaccagcgagaggccgcctgtgcccgcaagttcagggacctgctgaagggccaccccttcttctatgtgcctgagattgtggatgagctctgcagcccacatgtgctgaccacagagctggtgtctggcttccccctggaccaggccgaagggctcagccaggagattcggaacgagatctgctacaacatcctggttctgtgcctgagggagctgttcgagttccacttcatgcaaacagaccccaactggtccaacttcttctatgacccccagcagcacaaggtggctcttttggattttggggcaacgcgggaatatgacagatccttcaccgacctctacattcagatcatcagggctgctgccgacagggacagggagactgtgcgggcgaaatccatagagatgaagttcctcaccggctacgaggtcaaggtcatggaagacgcccacttggatgccatcctcatcctgggggaggccttcgcctctgatgagccttttgattttggcactcagagcaccaccgagaagatccacaacctgattcccgtcatgctgaggcaccgtctcgtccccccacccgaggaaacctactccctgcacaggaagatggggggctccttcctcatctgctccaagctgaaggcccgcttcccctgcaaggccatgttcgaggaggcctacagcaactactgcaagaggcaggcccagcagtagggctgcgggccacgcccaggccggctccgcgggaactctctccctcagacaggccaaaaaccagtagcgaggtcgtggtgatgctctttttaactcctttgcccaataaggggggtggctgcctggagccccgtagccagcgctttccacggtttctgttgctaaatggttgtagggtgagaagtgcaagaatgaagatgaagccccactgctcggtcagtctgcctccgtgtgtcctctgaaataagcagatgaagatgaaagggcaactttgttttcttctttttcctgatgtgaatgttaagcagaagggagagagtccttactcccttccaatctctgttcagtgcaaaacccagaaacatgaacagatacgattgtgggattttatcatctgtgtagtaggtgtgtgtatgtgtttctagagtgagatttgtgttttctgcccttttcctctccagccgatgggctggagctgggagaggtgctgagctaacagtgccaacaagtgctccttaagcctgcgaggcccaggcctgtggggctggttctcacctttgacagctgaatgttcctaaagaactgctgccccacagtgagggtgggagcagcggaacagggaatgccagacacaggctcgctgctgctggaaggcggggtgggacttccttcctctgtccggagaggcacaggtgtcaccagttccagccaaaggctcctcacaggcgctgtgaatttttgtacaagtcttgtaattatcgaatcaacaacttgtttcaatttaataaaaatgctcatgggaagtgc

SEQ ID NO: 103163 - DNA, 5523 bp, Homo sapiens
  Payload ID: 121
  Gene Symbol: ADCK3
  Gene Name: aarF domain containing kinase 3
  Uniprot ID: Q8NI60
  ENST ID: ENST00000366779
  CDS Start-End: 2772-4715
cttggaggtccccagagagcagggagacaaatgaacccagaacacaaatggcaaagaagaaaaatgagagaatttgtaaaagacagcattcgaacatgccgaacaagagcagggtactggtgttcaaacacctgtatctcccccgtgtaacccgtcaactaatatctttccatatttgctccagatttgtctttagaaataaaacccacgttctgaagtcctgtttgtatgtggccccagtcctgttgcctccgcctcctgtcctgaagtcgatttctgcccttctcatctatggttagttttgttttgtatgttggcatgttttcttaactttacagaaatggtatcatactgtacatatttgataattttttaaaatattgcattctggaggcatgtataaatgtagctccagttcatttattttatttattttttgagatggagttttgctcttgtcacccaggctagagtgcaatggcgtgatgttggctcactgcaacctctgcctcctgggttcaagcaattctcctgtctcaatttcctgagtagctgggattacagttgcccgccaccatgcctggctaattttgtattttagtagagacggggtttcaccacgttagccaggctggtctcaaactcctgactgcaggtgatccacgcaccttggcctccaaaagtgctgggattacaggcgtgagccaccgtgcccagcccagttattttaactattgtatagtgttccattgtatgagttctactgtttatatgctattgatcgacctgtaggggttttgcagtgtttctgtattacagctgtgctgcagtgagcatcccatcacattgtgtggatttgaggaagtattggaattcccccaattgactggacattcccaattaccctccaagtatgtgtctgtttatccttccatccgcaatctgagagttccccaactctataatacttggtgtcatcagacttttcatcttgtctgattggatgggtgtcatttcctttaggttttataattatcttttcatatgtgtattggctgtacaaggttccttctctgttcattattattaatttttttagacagagtctcgcgctgtcgcccaggctggagtgcagcagcgtgatcttggctcactgcaagctccgcctcccgggttcatgccattctcctgcctcagcctcctgagtagctgggattacaggtgcctgccatcacgcccggctagtttttttgtattttgagtagagatggggtttcaccgtgttagccaggagggtctcgatctcctgacctcgtgatccacccgcctcggcctcccaaagtgctgggattacaggtgtgagtcactgcgcccagcccaagtttccttctctgttacttgttcatatcctctgcccatttttcacttggattttttgtcttacggatatttaagcctcttaaaatatatattctggagagatgctaatctttgattaattatatgcattgcaaatgtctggtacattgtggcttgcctctcttccctgcctttaggagtgttttgctggacccaagtaatttttaaatgttaatgttattaaatctatcagttttttgcttgtatggcttatgccattgaatcttgttttaagagatccttccctaccctcaaggttttctaaatttttattttcataataagatttttagttcatctgaaatgtatttttatgattgtatttagtagggacctaattttgtttttctttgtaaccaggtgtcccagcactgtttactgaacagtctctcctttctcgctggtctgtagaactctcctgacatataccaagtttccataagtgggtggatgggttcctgagctctctactgttaatagaacttgctctctcgcaggccaatgcctcaccaggtgattgaagcagagaaacttaggtggtgaaaggagaagatggggcctgtcctgagagtttctgttcctgagatgctagaggcagaggtttccagaaccacaagacagacccaagagggctgtgttggcaaaacaaatggcagagtggagctggccagaggcatctgtgcgtggcgactccaagagagcacccgactccagatggcgacactgcaggatggagcggggcatgcctgcagacaggtgtcagagacggggtcttgctgtattgcccaggctagatttgaactcctggcctgaagtaatcctcccaccttggcctcccaaagttctgggactacagaccattcgtatatatcttctttggagaaatgtgtggtgcaatcttggttcactgcaacttccacctcctgagttccagcaattctccagtctcagcctctcgagtagctgggattacaggcatgtgccaccatgcctggccatcttcgctcttgagcacctgtgtcatgatggcgtctcactcttgttgcccaggctggagtgcaatggtgcgatttggctcactgtggcctctgcctcccgggttcaagcgattctcctgcctcagcctcccataccagttcaactttttcagattccacgtgagggagtgacggggcaaatctgcgtgctgctggtggcggtgcctcccagggctgctcggcggggacgccgagggctgcacccgagctccatcccgtgttggctgcgcgccctccaaaaccccggctgtcagcgactgcgggcacctgcacgccgacgagaccggcgggcggacagcgactccgccctgaaggatggctgccatattgggagacaccatcatggtggctaaaggccttgtcaagctgacccaggcggccgtggaaacccacctgcagcacttgggcatcggaggggagctgatcatggcggccagggccctgcagtccacggctgtggagcagattggcatgttcttggggaaggtgcagggtcaggataaacatgaagaatattttgctgagaacttcggcggcccagaaggggagttccacttctcagtcccgcatgcagccggagcctccacagacttctcttcagcctccgctcccgaccagtcagcgcccccatccctgggtcatgcccacagcgagggcccagctcctgcctacgtggccagtggaccctttagagaagccgggttccccggccaggcctcctcccctctgggcagggccaacgggaggctctttgcaaaccccagagactcattctctgccatgggctttcagcgaaggttcttccaccaggaccaatcccctgttgggggcctcacagccgaggacattgagaaggcccggcaggctaaggctcgccccgagaacaagcagcacaaacagacgctcagcgagcatgcccgggagcggaaggtgcctgtgacgaggattggccggctggccaacttcggaggtctggccgtgggcctgggcttcggggcactggcagaggtcgccaagaagagcctgcgctccgaggacccctcagggaagaaggccgtgctgggttccagtcctttcctgtccgaggccaatgcagagcggatcgtgcgcacgctctgcaaggtgcgtggtgcggcactcaagctgggccagatgctgagcatccaggatgatgcctttatcaacccccacctggctaagatcttcgagcgggtgcggcagagcgcggacttcatgccactgaagcagatgatgaaaactctcaacaacgacctgggccccaactggcgggacaagttggaatacttcgaggagcggcccttcgccgccgcatccattgggcaggtgcacttggcccgaatgaagggcggccgcgaggtggccatgaagatccagtaccctggcgtggcccagagcatcaacagtgatgtcaacaacctcatggccgtgttgaacatgagcaacatgcttccagaaggcctgttccccgagcacctgatcgacgtgctgaggcgggagctggccctggagtgtgactaccagcgagaggccgcctgtgcccgcaagttcagggacctgctgaagggccaccccttcttctatgtgcctgagattgtggatgagctctgcagcccacatgtgctgaccacagagctggtgtctggcttccccctggaccaggccgaagggctcagccaggagattcggaacgagatctgctacaacatcctggttctgtgcctgagggagctgttcgagttccacttcatgcaaacagaccccaactggtccaacttcttctatgacccccagcagcacaaggtggctcttttggattttggggcaacgcgggaatatgacagatccttcaccgacctctacattcagatcatcagggctgctgccgacagggacagggagactgtgcgggcgaaatccatagagatgaagttcctcaccggctacgaggtcaaggtcatggaagacgcccacttggatgccatcctcatcctgggggaggccttcgcctctgatgagccttttgattttggcactcagagcaccaccgagaagatccacaacctgattcccgtcatgctgaggcaccgtctcgtccccccacccgaggaaacctactccctgcacaggaagatggggggctccttcctcatctgctccaagctgaaggcccgcttcccctgcaaggccatgttcgaggaggcctacagcaactactgcaagaggcaggcccagcagtagggctgcgggccacgcccaggccggctccgcgggaactctctccctcagacaggccaaaaaccagtagcgaggtcgtggtgatgctctttttaactcctttgcccaataaggggggtggctgcctggagccccgtagccagcgctttccacggtttctgttgctaaatggttgtagggtgagaagtgcaagaatgaagatgaagccccactgctcggtcagtctgcctccgtgtgtcctctgaaataagcagatgaagatgaaagggcaactttgttttcttctttttcctgatgtgaatgttaagcagaagggagagagtccttactcccttccaatctctgttcagtgcaaaacccagaaacatgaacagatacgattgtgggattttatcatctgtgtagtaggtgtgtgtatgtgtttctagagtgagatttgtgttttctgcccttttcctctccagccgatgggctggagctgggagaggtgctgagctaacagtgccaacaagtgctccttaagcctgcgaggcccaggcctgtggggctggttctcacctttgacagctgaatgttcctaaagaactgctgccccacagtgagggtgggagcagcggaacagggaatgccagacacaggctcgctgctgctggaaggcggggtgggacttccttcctctgtccggagaggcacaggtgtcaccagttccagccaaaggctcctcacaggcgctgtgaatttttgtacaagtcttgtaattatcgaatcaacaacttgtttcaatttaataaaaatgctcatgggaagtgct

SEQ ID NO: 103164 - DNA, 2041 bp, Homo sapiens
  Payload ID: 122
  Gene Symbol: ADCK4
  Gene Name: aarF domain containing kinase 4
  Uniprot ID: Q96D53
  ENST ID: ENST00000243583
  CDS Start-End: 25-1536
ctcggaggctgagagcagtgggcaatgtggctgaaggtggggggcctacttcgggggaccggtggacagctgggccagactgttggttggccttgtggggccctggggcctgggccccaccgctggggaccatgtggaggttcttgggcccaaaagttttaccaggatgggcctgggagaggcctgggtgaggaggacattcgcagggcacgggaggcccgtcccaggaagacaccccggccccagctgagtgaccgctctcgagaacgcaaggtgcctgcctcccgcatcagccgcttggccaactttgggggactggctgtgggcttggggctaggagtactggccgagatggctaagaagtccatgccaggaggtcgtctgcagtcagacaacagcttcatcagccctcagctgcagcacatctttgagcgggtccgccagagcgccgacttcatgccccgctggcagatgctgagagttcttgaagaggagctcggcagggactggcaggccaaggtggcctccttggaggaggtgccctttgccgctgcctcaattgggcaggtgcaccagggcctgctgagggacgggacggaggtggccgtgaagatccagtaccccggcatagcccagagcattcagagcgatgtccagaacctgctggcggtactcaagatgagcgcggccctgcccgcgggcctgtttgccgagcagagcctgcaggccttgcagcaggagctggcttgggagtgtgactaccgtcgtgaggcggcttgtgcccagaatttcaggcagctgctggcaaatgaccccttcttccgggtcccagccgtggttaaggagctgtgcacgacacgggtgctgggcatggagctggctggaggggtccccctggaccagtgccagggcctaagccaggacctgcggaaccagatttgcttccagctcctgacgctgtgtctgcgggagctgtttgagttccgattcatgcagactgaccccaactgggccaacttcctgtatgatgcctccagccaccaggtgaccctgctggactttggtgcaagccgggagtttgggacagagttcacagaccattacatcgaggtggtgaaggctgcagctgatggagacagagactgtgtcctgcagaagtccagggacctcaaattcctcacaggctttgaaaccaaggcattctccgacgcccacgtggaggcagtgatgatcctgggggagcctttcgccacccagggcccttatgactttgggtcgggggaaacggcccgccgcatacaggacctcatcccggtgctgctgcggcaccggctgtgtcccccacccgaggagacctatgccctgcaccgcaagctggcaggggctttcctggcctgtgcccacctccgagcccacatcgcctgcagggacctcttccaggacacctaccaccgctactgggccagtcgccagccagacgcagccactgccggcagcctccccaccaaaggggactcctgggtggatccctcatgacagcctccatgggggattcagtccccagagcaggccgtaccctgctgtagtgcctcttatcccttccccgtctgccctgggtcagaggagcccccttgggcttcccagtcttgcctggctctcctccttggcccaggagctcaggatccctggggctggggaactcccaacttcgtgccctagatcctgcacctccccactcgaaagtgggtatccgaaaactaagccagggaagcggttaacttatctttgccaacatttgagggagccttgggccgctgcatgtcgttatgcagatcagactcatcagggggagccctcacctctgcctcaagcctcccgtggaaggcgagatggtcctggaggcagtcctcacctctgcctccctcgctcctccaacagctgccttctcccgggttccagcctctcagtgtgttggagaggtaggggtgcggggtgggggggagctgaatcttcaatcggaataaaagcagccctccccttc

SEQ ID NO: 103165 - DNA, 2443 bp, Homo sapiens
  Payload ID: 122
  Gene Symbol: ADCK4
  Gene Name: aarF domain containing kinase 4
  Uniprot ID: Q96D53
  ENST ID: ENST00000324464
  CDS Start-End: 303-1937
tctgagcatccgaagcgcggccaggtatgcatctagggcaccggggtcctggtggcgcgccagtgggccccctccctccacccctgtgactaaaccaccctccctacacggttgaatgacaagttcaaccttccctaaaacccccggtgacgagtccagccgcgcgcccattcttcacgcaggggcgggacggactttcaaagacttggagttcccacgggtgtgggttcgagaccttcctctgccagttcccagctccgctaccctgagcaaatgacttacgctccattggattttccgcaatgtggctgaaggtggggggcctacttcgggggaccggtggacagctgggccagactgttggttggccttgtggggccctggggcctgggccccaccgctggggaccatgtggaggttcttgggcccaaaagttttaccaggatgggcctgggagaggcctgggtgaggaggacattcgcagggcacgggaggcccgtcccaggaagacaccccggccccagctgagtgaccgctctcgagaacgcaaggtgcctgcctcccgcatcagccgcttggccaactttgggggactggctgtgggcttggggctaggagtactggccgagatggctaagaagtccatgccaggaggtcgtctgcagtcagagggtggttctgggctggactccagccccttcctgtcggaggccaatgccgagcggattgtgcagaccttatgtacagttcgaggggccgccctcaaggttggccagatgctcagcatccaggacaacagcttcatcagccctcagctgcagcacatctttgagcgggtccgccagagcgccgacttcatgccccgctggcagatgctgagagttcttgaagaggagctcggcagggactggcaggccaaggtggcctccttggaggaggtgccctttgccgctgcctcaattgggcaggtgcaccagggcctgctgagggacgggacggaggtggccgtgaagatccagtaccccggcatagcccagagcattcagagcgatgtccagaacctgctggcggtactcaagatgagcgcggccctgcccgcgggcctgtttgccgagcagagcctgcaggccttgcagcaggagctggcttgggagtgtgactaccgtcgtgaggcggcttgtgcccagaatttcaggcagctgctggcaaatgaccccttcttccgggtcccagccgtggttaaggagctgtgcacgacacgggtgctgggcatggagctggctggaggggtccccctggaccagtgccagggcctaagccaggacctgcggaaccagatttgcttccagctcctgacgctgtgtctgcgggagctgtttgagttccgattcatgcagactgaccccaactgggccaacttcctgtatgatgcctccagccaccaggtgaccctgctggactttggtgcaagccgggagtttgggacagagttcacagaccattacatcgaggtggtgaaggctgcagctgatggagacagagactgtgtcctgcagaagtccagggacctcaaattcctcacaggctttgaaaccaaggcattctccgacgcccacgtggaggcagtgatgatcctgggggagcctttcgccacccagggcccttatgactttgggtcgggggaaacggcccgccgcatacaggacctcatcccggtgctgctgcggcaccggctgtgtcccccacccgaggagacctatgccctgcaccgcaagctggcaggggctttcctggcctgtgcccacctccgagcccacatcgcctgcagggacctcttccaggacacctaccaccgctactgggccagtcgccagccagacgcagccactgccggcagcctccccaccaaaggggactcctgggtggatccctcatgacagcctccatgggggattcagtccccagagcaggccgtaccctgctgtagtgcctcttatcccttccccgtctgccctgggtcagaggagcccccttgggcttcccagtcttgcctggctctcctccttggcccaggagctcaggatccctggggctggggaactcccaacttcgtgccctagatcctgcacctccccactcgaaagtgggtatccgaaaactaagccagggaagcggttaacttatctttgccaacatttgagggagccttgggccgctgcatgtcgttatgcagatcagactcatcagggggagccctcacctctgcctcaagcctcccgtggaaggcgagatggtcctggaggcagtcctcacctctgcctccctcgctcctccaacagctgccttctcccgggttccagcctctcagtgtgttggagaggtaggggtgcggggtgggggggagctgaatcttcaatcggaataaaagcagccctccccttcc

SEQ ID NO: 103166 - DNA, 486 bp, Homo sapiens
  Payload ID: 122
  Gene Symbol: ADCK4
  Gene Name: aarF domain containing kinase 4
  ENST ID: ENST00000594720
  CDS Start-End: 39-486
gggggtttgcctctgagcatccgaagcgcggccaggcaatgtggctgaaggtggggggcctacttcgggggaccggtggacagctgggccagactgttggttggccttgtggggccctggggcctgggccccaccgctggggaccatgtggaggttcttgggcccaaaagttttaccaggatgggcctgggagaggcctgggtgaggaggacattcgcagggcacgggaggcccgtcccaggaagacaccccggccccagctgagtgaccgctctcgagaacgcaaggtgcctgcctcccgcatcagccgcttggccaactttgggggactggctgtgggcttggggctaggagtactggccgagatggctaagaagtccatgccaggaggtcgtctgcagtcagagggtggttctgggctggactccagccccttcctgtcggaggccaatgccgagcggattgtgcagaccttatgtacagttc

SEQ ID NO: 103167 - DNA, 867 bp, Homo sapiens
  Payload ID: 122
  Gene Symbol: ADCK4
  Gene Name: aarF domain containing kinase 4
  ENST ID: ENST00000595254
  CDS Start-End: 255-867
gcaggttgcggactcggaggctgagagcaggaccatgtggaggttcttgggcccaaaagttttaccaggatgggcctgggagaggcctgggtgaggaggacattcgcagggcacgggaggcccgtcccaggaagacaccccggccccagctgagtgaccgctctcgagaacgcaaggtgcctgcctcccgcatcagccgcttggccaactttgggggactggctgtgggcttggggctaggagtactggccgagatggctaagaagtccatgccaggaggtcgtctgcagtcagagggtggttctgggctggactccagccccttcctgtcggaggccaatgccgagcggattgtgcagaccttatgtacagttcgaggggccgccctcaaggttggccagatgctcagcatccaggacaacagcttcatcagccctcagctgcagcacatctttgagcgggtccgccagagcgccgacttcatgccccgctggcagatgctgagagttcttgaagaggagctcggcagggactggcaggccaaggtggcctccttggaggaggtgccctttgccgctgcctcaattgggcaggtgcaccagggcctgctgagggacgggacggaggtggccgtgaagatccagtaccccggcatagcccagagcattcagagcgatgtccagaacctgctggcggtactcaagatgagcgcggccctgcccgcgggcctgtttgccgagcagagcctgcaggccttgcagcaggagctggcttgggagtgtgactaccgtcgtgaggcggcttgtgcccagaatttcaggcagctgctggcaaatgaccccttcttccgggtcccagccgtggtta

SEQ ID NO: 103168 - DNA, 735 bp, Homo sapiens
  Payload ID: 122
  Gene Symbol: ADCK4
  Gene Name: aarF domain containing kinase 4
  ENST ID: ENST00000601967
  CDS Start-End: 46-735
caggagggccccagcaggttgcggactcggaggctgagagcagcaatgtggctgaaggtggggggcctacttcgggggaccggtggacagctgggccagactgttggttggccttgtggggccctggggcctgggccccaccgctggggaccatgtggaggttcttgggcccaaaagttttaccaggatgggcctgggagaggcctgggtgaggaggacattcgcagggcacgggaggcccgtcccaggaagacaccccggccccagctgagtgaccgctctcgagaacgcaaggtgcctgcctcccgcatcagccgcttggccaactttgggggactggctgtgggcttggggctaggagtactggccgagatggctaagaagtccatgccaggaggtcgtctgcagtcagagggtggttctgggctggactccagccccttcctgtcggaggccaatgccgagcggattgtgcagaccttatgtacagttcgaggggccgccctcaaggttggccagatgctcagcatccaggacaacagcttcatcagccctcagctgcagcacatctttgagcgggtccgccagagcgccgacttcatgccccgctggcagatgctgagagttcttgaagaggagctcggcagggactggcaggccaaggtggcctccttggaggaggtgccctttgccgctgcctcaattgggcaggtgcaccagggcctgctgagggac

SEQ ID NO: 103169 - DNA, 735 bp, Homo sapiens
  Payload ID: 122
  Gene Symbol: ADCK4
  Gene Name: aarF domain containing kinase 4
  ENST ID: ENST00000599643
  CDS Start-End: 53-400
gggaaagatgccccaaccagatgcctctattccagactgtgagaagtgggcaatgtggctgaaggtggggggcctacttcgggggaccggtggacagctgggccagactgttggttggccttgtggggccctggggcctgggccccaccgctggggaccatgtggaggttcttgggcccaaaagttttaccaggatgggcctgggagaggcctgggtgaggaggacattcgcagggcacgggaggcccgtcccaggaagacaccccggccccagctgagtgaccgctctcgagaacgcaagacaacagcttcatcagccctcagctgcagcacatctttgagcgggtccgccagagcgccgacttcatgccccgctggcagatgctgtaccccggcatagcccagagcattcagagcgatgtccagaacctgctggcggtactcaagatgagcgcggccctgcccgcgggtgaggcgcccacccactcctctgctgacctcccaaaggggctatgcccagagagagaaagcaggagggggagcccagaggagagcacgggcagggtgtgctggcgttgtgagcgggagtgtcagagacagaaaggacaccaaggcggggagagcccagggagcatgagcaggcctgtttgccgagcagagcctgcaggccttgcagcaggagctggcttgggagtgtgactaccgtcgtgaggcggcttgtgcccagaatttcag

SEQ ID NO: 103170 - DNA, 406 bp, Homo sapiens
  Payload ID: 122
  Gene Symbol: ADCK4
  Gene Name: aarF domain containing kinase 4
  ENST ID: ENST00000594490
  CDS Start-End: 4-406
gcaatgtggctgaaggtggggggcctacttcgggggaccggtggacagctgggccagactgttggttggccttgtggggccctggggcctgggccccaccgctggggaccatgtggaggttcttgggcccaaaagttttaccaggatgggcctgggagaggcctgggtgaggaggacattcgcagggcacgggaggcccgtcccaggaagacaccccggccccagctgagtgaccgctctcgagaacgcaaggtgcctgcctcccgcatcagccgcttggccaactttggggagggtggttctgggctggactccagccccttcctgtcggaggccaatgccgagcggattgtgcagaccttatgtacagttcgaggggccgccctcaaggttggccagatgctca

SEQ ID NO: 103171 - DNA, 883 bp, Homo sapiens
  Payload ID: 122
  Gene Symbol: ADCK4
  Gene Name: aarF domain containing kinase 4
  ENST ID: ENST00000601304
  CDS Start-End: 154-399
ggagaaccaggagaaactgtgggaatctattaatagtggaggaagtatttagtgggtgggaatgagagagggtggacacagaggaacatgggggcctggccaagaagccaggcaactcccacctgaataatccctcctcttctcctccaggcaatgtggctgaaggtggggggcctacttcgggggaccggtggacagctgggccagactgttggttggccttgtggggccctggggcctgggccccaccgctggggaccatgtggaggttcttgggcccaaaagttttaccaggatgggcctgggagaggcctgggtgaggaggacattcgcagggcacgggaggcccgtcccaggaagacaccccggccccagaccttgtccccatttcccagctgagtgaccgctctcgagaacgcaaggtgcctgcctcccgcatcagccgcttggccaactttgggggactggctgtgggcttggggctaggagtactggccgagatggctaagaagtccatgccaggaggtcgtctgcagtcagagggtggttctgggctggactccagccccttcctgtcggaggccaatgccgagcggattgtgcagaccttatgtacagttcgaggggccgccctcaaggttggccagatgctcagcatccaggacaacagcttcatcagccctcagctgcagcacatctttgagcgggtccgccagagcgccgacttcatgccccgctggcagatgctgagagttcttgaagaggagctcggcagggactggcaggccaaggtggcctccttggaggaggtgccctttgccgctgcctcaattgggcaggtgcaccagggcctgctgagggacgggacggaggtggccgtgaa

SEQ ID NO: 103172 - DNA, 325 bp, Homo sapiens
  Payload ID: 122
  Gene Symbol: ADCK4
  Gene Name: aarF domain containing kinase 4
  ENST ID: ENST00000593723
  CDS Start-End: 296-325
ggcgtgagcgggaaacagttggcaagcaaggcaagggatttatatgcacaaggaaggaggttgggtgccagaatgtgggtgtttgtgcaaagtggaggggctccatgtgcaagggaaatgtttgctgggaagaatgtgtattcaaaggaattgtgttgagcctgccaggggtaaaaataagaaggggggttggcaagatattcgtgcagaagagaggcgtcaggtttgtaagggagactttgcaagaaagtgtagggaacagaagggtctgtcgcgtacaaggcactttgaggcaatgtggctgaaggtggggggcctacttcgg

SEQ ID NO: 103173 - DNA, 373 bp, Homo sapiens
  Payload ID: 122
  Gene Symbol: ADCK4
  Gene Name: aarF domain containing kinase 4
  ENST ID: ENST00000596357
  CDS Start-End: 43-373
cggaggctgagagcagtgggtgcttagcaacggggggaggcaatgtggctgaaggtggggggcctacttcgggggaccggtggacagctgggccagactgttggttggccttgtggggccctggggcctgggccccaccgctggggaccatgtggaggttcttgggcccaaaagttttaccaggatgggcctgggagaggcctgggtgaggaggacattcgcagggcacgggaggcccgtcccaggaagacaccccggccccagctgagtgaccgctctcgagaacgcaaggtgcctgcctcccgcatcagccgcttggccaactttgggggactggctgtgggcttggggctaggagtactggccgagatgg

SEQ ID NO: 103174 - DNA, 394 bp, Homo sapiens
  Payload ID: 122
  Gene Symbol: ADCK4
  Gene Name: aarF domain containing kinase 4
  ENST ID: ENST00000600707
  CDS Start-End: 31-394
gtgagcgggaaacagttggcaagcaaggcaatgtggctgaaggtggggggcctacttcgggggaccggtggacagctgggccagactgttggttggccttgtggggccctggggcctgggccccaccgctggggaccatgtggaggttcttgggcccaaaagttttaccaggatgggcctgggagaggcctgggtgaggaggacattcgcagggcacgggaggcccgtcccaggaagacaccccggccccagctgagtgaccgctctcgagaacgcaaggtgcctgcctcccgcatcagccgcttggccaactttgggggactggctgtgggcttggggctaggagtactggccgagatggctaagaagtccatgccaggaggtcgtctgcagt

SEQ ID NO: 103175 - DNA, 473 bp, Homo sapiens
  Payload ID: 122
  Gene Symbol: ADCK4
  Gene Name: aarF domain containing kinase 4
  ENST ID: ENST00000600080
  CDS Start-End: 254-473
caggttgcggactcggaggctgagagcaggaccatgtggaggttcttgggcccaaaagttttaccaggatgggcctgggagaggcctgggtgaggaggacattcgcagggcacgggaggcccgtcccaggaagacaccccggccccagctgagtgaccgctctcgagaacgcaaggtgcctgcctcccgcatcagccgcttggccaactttgggggactggctgtgggcttggggctaggagtactggccgagatggctaagaagtccatgccaggaggtcgtctgcagtcagagggtggttctgggctggactccagccccttcctgtcggaggccaatgccgagcggattgtgcagaccttatgtacagttcgaggggccgccctcaaggttggccagatgctcagcatccaggcttcatcagccctcagctgcagcacatctttgagcgggtccgccagagcgccgactt

SEQ ID NO: 103176 - DNA, 594 bp, Homo sapiens
  Payload ID: 122
  Gene Symbol: ADCK4
  Gene Name: aarF domain containing kinase 4
  ENST ID: ENST00000594084
  CDS Start-End: 122-594
agaagccgccgctgcccccctcaacccgggaggggggtcccactggctgggcctcaggctcaggggtctcaggggtaatgatgaggcggggcacagggcacagggggctacacttcaggcaatgtggctgaaggtggggggcctacttcgggggaccggtggacagctgggccagactgttggttggccttgtggggccctggggcctgggccccaccgctggggaccatgtggaggttcttgggcccaaaagttttaccaggatgggcctgggagaggcctgggtgaggaggacattcgcagggcacgggaggcccgtcccaggaagacaccccggccccagctgagtgaccgctctcgagaacgcaaggtgcctgcctcccgcatcagccgcttggccaactttgggggactggctgtgggcttggggctaggagtactggccgagatggctaagaagtccatgccaggaggtcgtctgcagtcagagggtggttctgggctggactccagccccttcctgtcggaggccaatgccgagcggattgtgcagaccttatgtacagttcgaggggccgccctcaaggttggcca

SEQ ID NO: 103177 - DNA, 1949 bp, Homo sapiens
  Payload ID: 123
  Gene Symbol: ADCK5
  Gene Name: aarF domain containing kinase 5
  Uniprot ID: Q3MIX3
  ENST ID: ENST00000308860
  CDS Start-End: 45-1787
gctaagcggcgccgggcgggagaagagcggagcagtggtcggagatgtggcgaccggtgcagctctgtcatttccactctgctctgctgcacagcaggcagaagccctggccgtcccctgctgtgttcttcaggagaaacgtcaggggccttcctccaaggttctccagccccacacccctgtggaggaaggtgctctccaccgcggtagtgggggcgcccctgctcctcggagcccgctatgtcatggcagaggcacgggagaagaggaggatgcggctcgtggtggatggcatggggcgctttggcaggtctctgaaggtcggcctgcagatctccctggactactggtggtgcaccaatgttgtccttcgaggggtggaagagaacagcccaggctacttggaggtgatgtctgcgtgtcaccagcgggcggctgatgccctggtggcaggggccatcagcaacgggggcctctacgtgaagctgggccaggggctgtgctccttcaaccacctgcttccccccgagtatacccggaccctgcgcgtgctagaggacagggccctcaagcggggcttccaggaggtggatgagttgttccttgaggacttccaggccctcccccacgagctcttccaggagtttgactaccagccaattgctgccgccagcctggcacaggtgcacagagccaagctgcacgatggcaccagcgtggctgtgaaggtgcagtacatcgacctgcgggaccgctttgatggggacatccacaccctggagctcctgctgcggctcgttgaggtcatgcaccccagctttggcttcagctgggtcctccaggacctgaaggggaccctggcccaggagctggacttcgagaatgagggccgcaacgcagagcgctgtgcgcgggagctggcgcacttcccctacgtcgtggtgccccgcgtgcactgggacaagtccagcaagcgcgtgctcactgccgacttctgcgccggctgcaaggtcaacgatgtggaggccatcaggagccaggggctggcagtgcatgacatagcagaaaagctcatcaaggcctttgctgagcagatattttacaccggcttcatccactcggacccacatcctggcaacgttctggtgcggaaaggcccggacgggaaagcggagctggtgctgctggaccacgggctctaccagttcctggaggagaaggaccgcgcagccctctgccagctgtggcgggccatcatcctgcgggacgacgccgccatgagggcgcacgcagccgcactgggggtgcaagactacctcctgttcgccgagatgctcatgcagcgccccgtgcgcctggggcagctgtggggctcgcacctactgagccgcgaagaggcggcctacatggtggacatggcccgcgagcgcttcgaggccgtcatggcggtgctcagggagctgccgcggcccatgctgctggtgctgcgcaacatcaacaccgtgcgcgctatcaacgtggccctcggcgcccccgtggaccgctacttccttatggctaaaagggctgtccggggctggagccgcctggcgggcgccacgtatcggggtgtctacggcaccagcctcctgcgccacgccaaggtcgtctgggagatgctcaagtttgaagtggcgctcaggctggagaccttggccatgcggctgaccgccctcctggctcgtgctctggtccacctgagcctcgtgcccccagcggaggagctctaccagtacctggagacctagggtgcagccgcccagggccggcggggcccttttcaccttgggctgacggaggtggcggggctagaggtgtagacaccccgagccccgtgggcactcgcactggggggctgtgacagcagctgggccaggaggccgtgtaatgaccacacactcctctcaagc

SEQ ID NO: 103178 - DNA, 2027 bp, Homo sapiens
  Payload ID: 123
  Gene Symbol: ADCK5
  Gene Name: aarF domain containing kinase 5
  ENST ID: ENST00000529654
  CDS Start-End: 51-440
cgagacgctaagcggcgccgggcgggagaagagcggagcagtggtcggagatgtggcgaccggtgcagctctgtcatttccactctgctctgctgcacagcaggcagaagccctggccgtcccctgctgtgttcttcaggagaaacgtcaggggccttcctccaaggttctccagccccacacccctgtggaggaaggtgctctccaccgcggtagtgggggcgcccctgctcctcggagcccgctatgtcatggcagaggcacgggagaagaggaggatgcggctcgtggtggatggcatggggcgctttggcaggtctctgaaggtcggcctgcagatctccctggactactggtggtgcaccaatgttgtccttcgaggggtggaagagcccaggctacttggaggtgatgtctgcgtgtcaccagcgggcggctgatgccctggtggcaggggccatcagcaacgggggcctctacgtgaagctgggccaggggctgtgctccttcaaccacctgcttccccccgagtatacccggaccctgcgcgtgctagaggacagggccctcaagcggggcttccaggaggtggatgagttgttccttgaggacttccaggccctcccccacgagctcttccaggagtttgactaccagccaattgctgccgccagcctggcacaggtgcacagagccaagctgcacgatggcaccagcgtggctgtgaaggtgcagtacatcgacctgcgggaccgctttgatggggacatccacaccctggagctcctgctgcggctcgttgaggtcatgcaccccagctttggcttcagctgggtcctccaggacctgaaggggaccctggcccaggagctggacttcgagaatgagggccgcaacgcagagcgctgtgcgcgggagctggcgcacttcccctacgtcgtggtgccccgcgtgcactgggacaagtccagcaaggtgggctgggccaggcccttggggtgggcacagcgctgggcctgctgagcccagcctcttgctctccccagcgcgtgctcactgccgacttctgcgccggctgcaaggtcaacgatgtggaggccatcaggagccaggggctggcagtgcatgacatagcagaaaagctcatcaaggcctttgctgagcagatattttacaccggcttcatccactcggacccacatcctggcaacgttctggtgcggaaaggcccggacgggaaagcggagctggtgctgctggaccacgggctctaccagttcctggaggagaaggaccgcgcagccctctgccagctgtggcgggccatcatcctgcgggacgacgccgccatgagggcgcacgcagccgcactgggggtgcaagactacctcctgttcgccgagatgctcatgcagcgccccgtgcgcctggggcagctgtggggctcgcacctactgagccgcgaagaggcggcctacatggtggacatggcccgcgagcgcttcgaggccgtcatggcggtgctcagggagctgccgcggcccatgctgctggtgctgcgcaacatcaacaccgtgcgcgctatcaacgtggccctcggcgcccccgtggaccgctacttccttatggctaaaagggctgtccggggctggagccgcctggcgggcgccacgtatcggggtgtctacggcaccagcctcctgcgccacgccaaggtcgtctgggagatgctcaagtttgaagtggcgctcaggctggagaccttggccatgcggctgaccgccctcctggctcgtgctctggtccacctgagcctcgtgcccccagcggaggagctctaccagtacctggagacctagggtgcagccgcccagggccggcggggcccttttcaccttgggctgacggaggtggcggggctagaggtgtagacaccccgagccccgtgggcactcgcactggggggctgtgacagcagctgggccaggaggccgtgtaatgaccacacactcctctcaagcaaaaaa

SEQ ID NO: 103179 - DNA, 631 bp, Homo sapiens
  Payload ID: 123
  Gene Symbol: ADCK5
  Gene Name: aarF domain containing kinase 5
  ENST ID: ENST00000526833
  CDS Start-End: 21-368
gagcggagcagtggtcggagatgtggcgaccggtgcagctctgtcatttccactctgctctgctgcacagcaggcagaagccctggccgtcccctgctgtgttcttcaggagaaacgtcaggggccttcctccaaggttctccagccccacacccctgtggaggaaggtgctctccaccgcggtagtgggggcgcccctgctcctcggagcccgctatgtcatggcagaggcacgggagaagaggaggatgcggctcgtggtggatggcatggggcgctttggcagaccttgcctccccaggccttggagacccaccctcctggtgtcctcctctcttcctagtggacctcaggctgcaggtctctgaaggtcggcctgcagatctccctggactactggtggtgcaccaatgttgtccttcgaggggtggaagagcccaggctacttggaggtgatgtctgcgtgtcaccagcgggcggctgatgccctggtggcaggggccatcagcaacgggggcctctacgtgaagctgggccaggggctgtgctccttcaaccacctgcttccccccgagtatacccggaccctgcgcgtgctagaggacagggccctcaagcggggcttccagga

SEQ ID NO: 103180 - DNA, 838 bp, Homo sapiens
  Payload ID: 123
  Gene Symbol: ADCK5
  Gene Name: aarF domain containing kinase 5
  ENST ID: ENST00000533715
  CDS Start-End: 55-318
gctgcgagacgctaagcggcgccgggcgggagaagagcggagcagtggtcggagatgtggcgaccggctggagtgcagtgtctcaatcttggctcactgcaatctccgcctaccaagatcaagcgattctcctgtctcagcctcccaactacctgggattacaggtgcagctctgtcatttccactctgctctgctgcacagcaggcagaagccctggccgtcccctgctgtgttcttcaggagaaacgtcaggggccttcctccaaggttctccagccccacacccctgtggaggaaggtgctctccaccgcggtagtgggggcgcccctgctcctcggagcccgctatgtcatggcagaggcacgggagaagaggaggatgcggctcgtggtggatggcatggggcgctttggcaggtctctgaaggtcggcctgcagatctccctggactactggtggtgcaccaatgttgtccttcgaggggtggaagagaacagcccaggctacttggaggtgatgtctgcgtgtcaccagcgggcggctgatgccctggtggcaggggccatcagcaacgggggcctctacgtgaagctgggccaggggctgtgctccttcaaccacctgcttccccccgagtatacccggaccctgcgcgtgctagaggacagggccctcaagcggggcttccaggaggtggatgagttgttccttgaggacttccaggccctcccccacgagctcttccaggagtttgactaccagccaattgctgccgccagcctggcacaggtgcacagagccaagctgcacgatggcaccagcgtggctgtgaaggt

SEQ ID NO: 103181 - DNA, 4335 bp, Homo sapiens
  Payload ID: 124
  Gene Symbol: AHI1
  Gene Name: Abelson helper integration site 1
  Uniprot ID: Q8N157
  ENST ID: ENST00000265602
  CDS Start-End: 396-3986
tgacgtcagcaggcggcgcgctgtccgcactgcggcacagagccgcggcttgctttcaggacacgggtcgctggcgggttaggtggctgcgtggccgcctcacttcgcgcacgcgccgctaggctgggggagttgatttgcactgctccgggtgtcggctccggcgggacgggcggttctgcgtacccctctccagtgtcaacctggggctgaatcttcaacctgtcaaagccttcttaattatgtctgagaaaagtactaaaataggtgccattttaaattcccagacaaggaaaaaccaaggattagaaattaagtagcttgcccaaggccacacatcagatcctgattgagtcaatgctttgcattctcagtcctctgcataaagctgagagatgcctacagctgagagtgaagcaaaagtaaaaaccaaagttcgctttgaagaattgcttaagacccacagtgatctaatgcgtgaaaagaaaaaactgaagaaaaaacttgtcaggtctgaagaaaacatctcacctgacactattagaagcaatcttcactatatgaaagaaactacaagtgatgatcccgacactattagaagcaatcttccccatattaaagaaactacaagtgatgatgtaagtgctgctaacactaacaacctgaagaagagcacgagagtcactaaaaacaaattgaggaacacacagttagcaactgaaaatcctaatggtgatgctagtgtagaggaagacaaacaaggaaagccaaataaaaaggtgataaagacggtgccccagttgactacacaagacctgaaaccggaaactcctgagaataaggttgattctacacaccagaaaacacatacaaagccacagccaggcgttgatcatcagaaaagtgagaaggcaaatgagggaagagaagagactgatttagaagaggatgaagaattgatgcaagcatatcagtgccatgtaactgaagaaatggcaaaggagattaagaggaaaataagaaagaaactgaaagaacagttgacttactttccctcagatactttattccatgatgacaaactaagcagtgaaaaaaggaaaaagaaaaaggaagttccagtcttctctaaagctgaaacaagtacattgaccatctctggtgacacagttgaaggtgaacaaaagaaagaatcttcagttagatcagtttcttcagattctcatcaagatgatgaaataagctcaatggaacaaagcacagaagacagcatgcaagatgatacaaaacctaaaccaaaaaaaacaaaaaagaagactaaagcagttgcagataataatgaagatgttgatggtgatggtgttcatgaaataacaagccgagatagcccggtttatcccaaatgtttgcttgatgatgaccttgtcttgggagtttacattcaccgaactgatagacttaagtcagattttatgatttctcacccaatggtaaaaattcatgtggttgatgagcatactggtcaatatgtcaagaaagatgatagtggacggcctgtttcatcttactatgaaaaagagaatgtggattatattcttcctattatgacccagccatatgattttaaacagttaaaatcaagacttccagagtgggaagaacaaattgtatttaatgaaaattttccctatttgcttcgaggctctgatgagagtcctaaagtcatcctgttctttgagattcttgatttcttaagcgtggatgaaattaagaataattctgaggttcaaaaccaagaatgtggctttcggaaaattgcctgggcatttcttaagcttctgggagccaatggaaatgcaaacatcaactcaaaacttcgcttgcagctatattacccacctactaagcctcgatccccattaagtgttgttgaggcatttgaatggtggtcaaaatgtccaagaaatcattacccatcaacactgtacgtaactgtaagaggactgaaagttccagactgtataaagccatcttaccgctctatgatggctcttcaggaggaaaaaggtaaaccagtgcattgtgaacgtcaccatgagtcaagctcagtagacacagaacctggattagaagagtcaaaggaagtaataaagtggaaacgactccctgggcaggcttgccgtatcccaaacaaacacctcttctcactaaatgcaggagaacgaggatgtttttgtcttgatttctcccacaatggaagaatattagcagcagcttgtgccagccgggatggatatccaattattttatatgaaattccttctggacgtttcatgagagaattgtgtggccacctcaatatcatttatgatctttcctggtcaaaagatgatcactacatccttacttcatcatctgatggcactgccaggatatggaaaaatgaaataaacaatacaaatactttcagagttttacctcatccttcttttgtttacacggctaaattccatccagctgtaagagagctagtagttacaggatgctatgattccatgatacggatatggaaagttgagatgagagaagattctgccatattggtccgacagtttgatgttcacaaaagttttatcaactcactttgttttgatactgaaggtcatcatatgtattcaggagattgtacaggggtgattgttgtttggaatacctatgtcaagattaatgatttggaacattcagtgcaccactggactataaataaggaaattaaagaaactgagtttaagggaattccaataagttatttggagattcatcccaatggaaaacgtttgttaatccataccaaagacagtactttgagaattatggatctccggatattagtagcaaggaagtttgtaggagcagcaaattatcgggagaagattcatagtactttgactccatgtgggacttttctgtttgctggaagtgaggatggtatagtgtatgtttggaacccagaaacaggagaacaagtagccatgtattctgacttgccattcaagtcacccattcgagacatttcttatcatccatttgaaaatatggttgcattctgtgcatttgggcaaaatgagccaattcttctgtatatttacgatttccatgttgcccagcaggaggctgaaatgttcaaacgctacaatggaacatttccattacctggaatacaccaaagtcaagatgccctatgtacctgtccaaaactaccccatcaaggctcttttcagattgatgaatttgtccacactgaaagttcttcaacgaagatgcagctagtaaaacagaggcttgaaactgtcacagaggtgatacgttcctgtgctgcaaaagtcaacaaaaatctctcatttacttcaccaccagcagtttcctcacaacagtctaagttaaagcagtcaaacatgctgaccgctcaagagattctacatcagtttggtttcactcagaccgggattatcagcatagaaagaaagccttgtaaccatcaggtagatacagcaccaacggtagtggctctttatgactacacagcgaatcgatcagatgaactaaccatccatcgcggagacattatccgagtgtttttcaaagataatgaagactggtggtatggcagcataggaaagggacaggaaggttattttccagctaatcatgtggctagtgaaacactgtatcaagaactgcctcctgagataaaggagcgatcccctcctttaagccctgaggaaaaaactaaaatagaaaaatctccagctcctcaaaagcaatcaatcaataagaacaagtcccaggacttcagactaggctcagaatctatgacacattctgaaatgagaaaagaacagagccatgaggaccaaggacacataatggatacacggatgaggaagaacaagcaagcaggcagaaaagtcactctaatagagtaaagaattgaagaaaagttaagagctgccgaaatgcacagaggtgaaaatgacaaaccaaatggaatttctcttcagagttcagaattttcagatactaaggaggaagaaaggatccactacttcttgttcttatgaatgactctagaaaaatcagaatcaagttgtgggtggaaaaatcaacgtggcctttgagttcagttgttataaaccattgtgactattgttggtcaaagtattggtacttatattgttagtaattgcatcataattacattaccagtgttggaaaactaatgaagaaaacactgtaattgctactcagcaaatgtgaataaaaggtgtttgcgtt

SEQ ID NO: 103182 - DNA, 3638 bp, Homo sapiens
  Payload ID: 124
  Gene Symbol: AHI1
  Gene Name: Abelson helper integration site 1
  Uniprot ID: Q8N157
  ENST ID: ENST00000327035
  CDS Start-End: 280-3441
gcggcacagagccgcggcttgctttcaggacacgggtcgctggcgggttaggtggctgcgtggccgcctcacttcgcgcacgcgccgctaggctgggggagttgatttgcactgctccgggtgtcggctccggcgggacgggcggttctgcgtacccctctccagtgtcaacctggggctgaatcttcaacctgtcaaagccttcttaattatgtctgagaaaaggatcctgattgagtcaatgctttgcattctcagtcctctgcataaagctgagagatgcctacagctgagagtgaagcaaaagtaaaaaccaaagttcgctttgaagaattgcttaagacccacagtgatctaatgcgtgaaaagaaaaaactgaagaaaaaacttgtcaggtctgaagaaaacatctcacctgacactattagaagcaatcttcactatatgaaagaaactacaagtgatgatcccgacactattagaagcaatcttccccatattaaagaaactacaagtgatgatgtaagtgctgctaacactaacaacctgaagaagagcacgagagtcactaaaaacaaattgaggaacacacagttagcaactgaaaatcctaatggtgatgctagtgtagaggaagacaaacaaggaaagccaaataaaaaggtgataaagacggtgccccagttgactacacaagacctgaaaccggaaactcctgagaataaggttgattctacacaccagaaaacacatacaaagccacagccaggcgttgatcatcagaaaagtgagaaggcaaatgagggaagagaagagactgatttagaagaggatgaagaattgatgcaagcatatcagtgccatgtaactgaagaaatggcaaaggagattaagaggaaaataagaaagaaactgaaagaacagttgacttactttccctcagatactttattccatgatgacaaactaagcagtgaaaaaaggaaaaagaaaaaggaagttccagtcttctctaaagctgaaacaagtacattgaccatctctggtgacacagttgaaggtgaacaaaagaaagaatcttcagttagatcagtttcttcagattctcatcaagatgatgaaataagctcaatggaacaaagcacagaagacagcatgcaagatgatacaaaacctaaaccaaaaaaaacaaaaaagaagactaaagcagttgcagataataatgaagatgttgatggtgatggtgttcatgaaataacaagccgagatagcccggtttatcccaaatgtttgcttgatgatgaccttgtcttgggagtttacattcaccgaactgatagacttaagtcagattttatgatttctcacccaatggtaaaaattcatgtggttgatgagcatactggtcaatatgtcaagaaagatgatagtggacggcctgtttcatcttactatgaaaaagagaatgtggattatattcttcctattatgacccagccatatgattttaaacagttaaaatcaagacttccagagtgggaagaacaaattgtatttaatgaaaattttccctatttgcttcgaggctctgatgagagtcctaaagtcatcctgttctttgagattcttgatttcttaagcgtggatgaaattaagaataattctgaggttcaaaaccaagaatgtggctttcggaaaattgcctgggcatttcttaagcttctgggagccaatggaaatgcaaacatcaactcaaaacttcgcttgcagctatattacccacctactaagcctcgatccccattaagtgttgttgaggcatttgaatggtggtcaaaatgtccaagaaatcattacccatcaacactgtacgtaactgtaagaggactgaaagttccagactgtataaagccatcttaccgctctatgatggctcttcaggaggaaaaaggtaaaccagtgcattgtgaacgtcaccatgagtcaagctcagtagacacagaacctggattagaagagtcaaaggaagtaataaagtggaaacgactccctgggcaggcttgccgtatcccaaacaaacacctcttctcactaaatgcaggagaacgaggatgtttttgtcttgatttctcccacaatggaagaatattagcagcagcttgtgccagccgggatggatatccaattattttatatgaaattccttctggacgtttcatgagagaattgtgtggccacctcaatatcatttatgatctttcctggtcaaaagatgatcactacatccttacttcatcatctgatggcactgccaggatatggaaaaatgaaataaacaatacaaatactttcagagttttacctcatccttcttttgtttacacggctaaattccatccagctgtaagagagctagtagttacaggatgctatgattccatgatacggatatggaaagttgagatgagagaagattctgccatattggtccgacagtttgatgttcacaaaagttttatcaactcactttgttttgatactgaaggtcatcatatgtattcaggagattgtacaggggtgattgttgtttggaatacctatgtcaagattaatgatttggaacattcagtgcaccactggactataaataaggaaattaaagaaactgagtttaagggaattccaataagttatttggagattcatcccaatggaaaacgtttgttaatccataccaaagacagtactttgagaattatggatctccggatattagtagcaaggaagtttgtaggagcagcaaattatcgggagaagattcatagtactttgactccatgtgggacttttctgtttgctggaagtgaggatggtatagtgtatgtttggaacccagaaacaggagaacaagtagccatgtattctgacttgccattcaagtcacccattcgagacatttcttatcatccatttgaaaatatggttgcattctgtgcatttgggcaaaatgagccaattcttctgtatatttacgatttccatgttgcccagcaggaggctgaaatgttcaaacgctacaatggaacatttccattacctggaatacaccaaagtcaagatgccctatgtacctgtccaaaactaccccatcaaggctcttttcagattgatgaatttgtccacactgaaagttcttcaacgaagatgcagctagtaaaacagaggcttgaaactgtcacagaggtgatacgttcctgtgctgcaaaagtcaacaaaaatctctcatttacttcaccaccagcagtttcctcacaacagtctaagttaaagcagtcaaacatgctgaccgctcaagagattctacatcagtttggtttcactcagaccgacagtcactttgctgaattcaacacatgtatattatggtggaaaaagcactagactcagggtcagccagccagaagaactgagccgacctgggatcccaccacttcctaactgttttgttaggtagttcactttctctcttcggataaatgtctccacatttcctacttcatagaattgtcagaatcaacacaatacatttaatactttgaaactcataaaatattgggagaataaacagtatgaggtta

SEQ ID NO: 103183 - DNA, 2340 bp, Homo sapiens
  Payload ID: 124
  Gene Symbol: AHI1
  Gene Name: Abelson helper integration site 1
  ENST ID: ENST00000367799
  CDS Start-End: 1-2006
cacctactaagcctcgatccccattaagtgttgttgaggcatttgaatggtggtcaaaatgtccaagaaatcattacccatcaacactgtacgtaactgtaagaggactgaaagttccagactgtataaagccatcttaccgctctatgatggctcttcaggaggaaaaaggtaaaccagtgcattgtgaacgtcaccatgagtcaagctcagtagacacagaacctggattagaagagtcaaaggaagtaataaagtggaaacgactccctgggcaggcttgccgtatcccaaacaaacacctcttctcactaaatgcaggagaacgaggatgtttttgtcttgatttctcccacaatggaagaatattagcagcagcttgtgccagccgggatggatatccaattattttatatgaaattccttctggacgtttcatgagagaattgtgtggccacctcaatatcatttatgatctttcctggtcaaaagatgatcactacatccttacttcatcatctgatggcactgccaggatatggaaaaatgaaataaacaatacaaatactttcagagttttacctcatccttcttttgtttacacggctaaattccatccagctgtaagagagctagtagttacaggatgctatgattccatgatacggatatggaaagttgagatgagagaagattctgccatattggtccgacagtttgatgttcacaaaagttttatcaactcactttgttttgatactgaaggtcatcatatgtattcaggagattgtacaggggtgattgttgtttggaatacctatgtcaagattaatgatttggaacattcagtgcaccactggactataaataaggaaattaaagaaactgagtttaagggaattccaataagttatttggagattcatcccaatggaaaacgtttgttaatccataccaaagacagtactttgagaattatggatctccggatattagtagcaaggaagtttgtaggagcagcaaattatcgggagaagattcatagtactttgactccatgtgggacttttctgtttgctggaagtgaggatggtatagtgtatgtttggaacccagaaacaggagaacaagtagccatgtattctgacttgccattcaagtcacccattcgagacatttcttatcatccatttgaaaatatggttgcattctgtgcatttgggcaaaatgagccaattcttctgtatatttacgatttccatgttgcccagcaggaggctgaaatgttcaaacgctacaatggaacatttccattacctggaatacaccaaagtcaagatgccctatgtacctgtccaaaactaccccatcaaggctcttttcagattgatgaatttgtccacactgaaagttcttcaacgaagatgcagctagtaaaacagaggcttgaaactgtcacagaggtgatacgttcctgtgctgcaaaagtcaacaaaaatctctcatttacttcaccaccagcagtttcctcacaacagtctaagttaaagcagtcaaacatgctgaccgctcaagagattctacatcagtttggtttcactcagaccgggattatcagcatagaaagaaagccttgtaaccatcaggtagatacagcaccaacggtagtggctctttatgactacacagcgaatcgatcagatgaactaaccatccatcgcggagacattatccgagtgtttttcaaagataatgaagactggtggtatggcagcataggaaagggacaggaaggttattttccagctaatcatgtggctagtgaaacactgtatcaagaactgcctcctgagataaaggagcgatcccctcctttaagccctgaggaaaaaactaaaatagaaaaatctccagctcctcaaaagcaatcaatcaataagaacaagtcccaggacttcagactaggctcagaatctatgacacataaagaattgaagaaaagttaagagctgccgaaatgcacagaggtgaaaatgacaaaccaaatggaatttctcttcagagttcagaattttcagatactaaggaggaagaaaggatccactacttcttgttcttatgaatgactctagaaaaatcagaatcaagttgtgggtggaaaaatcaacgtggcctttgagttcagttgttataaaccattgtgactattgttggtcaaagtattggtacttatattgttagtaattgcatcataattacattaccagtgttggaaaactaatgaagaaaacactgtaattgctactcagcaaatgtgaataaaaggtgtttgcgttatta

SEQ ID NO: 103184 - DNA, 5921 bp, Homo sapiens
  Payload ID: 124
  Gene Symbol: AHI1
  Gene Name: Abelson helper integration site 1
  Uniprot ID: Q8N157
  ENST ID: ENST00000367800
  CDS Start-End: 218-3808
gcggcacagagccgcggcttgctttcaggacacgggtcgctggcgggttaggtggctgcgtggccgcctcacttcgcgcacgcgccgctaggctgggggagttgatttgcactgctccgggtgtcggctccggcgggacgggcggttctgcgtacccctctccgatcctgattgagtcaatgctttgcattctcagtcctctgcataaagctgagagatgcctacagctgagagtgaagcaaaagtaaaaaccaaagttcgctttgaagaattgcttaagacccacagtgatctaatgcgtgaaaagaaaaaactgaagaaaaaacttgtcaggtctgaagaaaacatctcacctgacactattagaagcaatcttcactatatgaaagaaactacaagtgatgatcccgacactattagaagcaatcttccccatattaaagaaactacaagtgatgatgtaagtgctgctaacactaacaacctgaagaagagcacgagagtcactaaaaacaaattgaggaacacacagttagcaactgaaaatcctaatggtgatgctagtgtagaggaagacaaacaaggaaagccaaataaaaaggtgataaagacggtgccccagttgactacacaagacctgaaaccggaaactcctgagaataaggttgattctacacaccagaaaacacatacaaagccacagccaggcgttgatcatcagaaaagtgagaaggcaaatgagggaagagaagagactgatttagaagaggatgaagaattgatgcaagcatatcagtgccatgtaactgaagaaatggcaaaggagattaagaggaaaataagaaagaaactgaaagaacagttgacttactttccctcagatactttattccatgatgacaaactaagcagtgaaaaaaggaaaaagaaaaaggaagttccagtcttctctaaagctgaaacaagtacattgaccatctctggtgacacagttgaaggtgaacaaaagaaagaatcttcagttagatcagtttcttcagattctcatcaagatgatgaaataagctcaatggaacaaagcacagaagacagcatgcaagatgatacaaaacctaaaccaaaaaaaacaaaaaagaagactaaagcagttgcagataataatgaagatgttgatggtgatggtgttcatgaaataacaagccgagatagcccggtttatcccaaatgtttgcttgatgatgaccttgtcttgggagtttacattcaccgaactgatagacttaagtcagattttatgatttctcacccaatggtaaaaattcatgtggttgatgagcatactggtcaatatgtcaagaaagatgatagtggacggcctgtttcatcttactatgaaaaagagaatgtggattatattcttcctattatgacccagccatatgattttaaacagttaaaatcaagacttccagagtgggaagaacaaattgtatttaatgaaaattttccctatttgcttcgaggctctgatgagagtcctaaagtcatcctgttctttgagattcttgatttcttaagcgtggatgaaattaagaataattctgaggttcaaaaccaagaatgtggctttcggaaaattgcctgggcatttcttaagcttctgggagccaatggaaatgcaaacatcaactcaaaacttcgcttgcagctatattacccacctactaagcctcgatccccattaagtgttgttgaggcatttgaatggtggtcaaaatgtccaagaaatcattacccatcaacactgtacgtaactgtaagaggactgaaagttccagactgtataaagccatcttaccgctctatgatggctcttcaggaggaaaaaggtaaaccagtgcattgtgaacgtcaccatgagtcaagctcagtagacacagaacctggattagaagagtcaaaggaagtaataaagtggaaacgactccctgggcaggcttgccgtatcccaaacaaacacctcttctcactaaatgcaggagaacgaggatgtttttgtcttgatttctcccacaatggaagaatattagcagcagcttgtgccagccgggatggatatccaattattttatatgaaattccttctggacgtttcatgagagaattgtgtggccacctcaatatcatttatgatctttcctggtcaaaagatgatcactacatccttacttcatcatctgatggcactgccaggatatggaaaaatgaaataaacaatacaaatactttcagagttttacctcatccttcttttgtttacacggctaaattccatccagctgtaagagagctagtagttacaggatgctatgattccatgatacggatatggaaagttgagatgagagaagattctgccatattggtccgacagtttgatgttcacaaaagttttatcaactcactttgttttgatactgaaggtcatcatatgtattcaggagattgtacaggggtgattgttgtttggaatacctatgtcaagattaatgatttggaacattcagtgcaccactggactataaataaggaaattaaagaaactgagtttaagggaattccaataagttatttggagattcatcccaatggaaaacgtttgttaatccataccaaagacagtactttgagaattatggatctccggatattagtagcaaggaagtttgtaggagcagcaaattatcgggagaagattcatagtactttgactccatgtgggacttttctgtttgctggaagtgaggatggtatagtgtatgtttggaacccagaaacaggagaacaagtagccatgtattctgacttgccattcaagtcacccattcgagacatttcttatcatccatttgaaaatatggttgcattctgtgcatttgggcaaaatgagccaattcttctgtatatttacgatttccatgttgcccagcaggaggctgaaatgttcaaacgctacaatggaacatttccattacctggaatacaccaaagtcaagatgccctatgtacctgtccaaaactaccccatcaaggctcttttcagattgatgaatttgtccacactgaaagttcttcaacgaagatgcagctagtaaaacagaggcttgaaactgtcacagaggtgatacgttcctgtgctgcaaaagtcaacaaaaatctctcatttacttcaccaccagcagtttcctcacaacagtctaagttaaagcagtcaaacatgctgaccgctcaagagattctacatcagtttggtttcactcagaccgggattatcagcatagaaagaaagccttgtaaccatcaggtagatacagcaccaacggtagtggctctttatgactacacagcgaatcgatcagatgaactaaccatccatcgcggagacattatccgagtgtttttcaaagataatgaagactggtggtatggcagcataggaaagggacaggaaggttattttccagctaatcatgtggctagtgaaacactgtatcaagaactgcctcctgagataaaggagcgatcccctcctttaagccctgaggaaaaaactaaaatagaaaaatctccagctcctcaaaagcaatcaatcaataagaacaagtcccaggacttcagactaggctcagaatctatgacacattctgaaatgagaaaagaacagagccatgaggaccaaggacacataatggatacacggatgaggaagaacaagcaagcaggcagaaaagtcactctaatagagtaaagaattgaagaaaagttaagagctgccgaaatgcacagaggtgaaaatgacaaaccaaatggaatttctcttcagagttcagaattttcagatactaaggaggaagaaaggatccactacttcttgttcttatgaatgactctagaaaaatcagaatcaagttgtgggtggaaaaatcaacgtggcctttgagttcagttgttataaaccattgtgactattgttggtcaaagtattggtacttatattgttagtaattgcatcataattacattaccagtgttggaaaactaatgaagaaaacactgtaattgctactcagcaaatgtgaataaaaggtgtttgcgttattaggatgtctgttaagtaatcatttaatattattatattggtaatggttgtatgtgtgatgctatgcccagaatatgaagtatctgtttttgaaattcactttatttaaaagataagcagctgactgggcacggtgcctcatgcctgtaatcctagcaccttgggaggctgaggcaggtggatcacctaaggtcaggagttcaacaacaccagcctgaccaacatggtgaaaccccatctctactaaaaatacaaaaatcagccgggtctcatggcaggcacctgtaatcccatctactgaggcaggagaattgcttgacccaggaggcagaggttgcagtgagccaagatcacgccattgcactccagcctgggggacagagcaagactctatctccaaaaaacaaaaaagataagcagctttagaatatggcgcattcaaaacagtctcagtaacaaagacattaaaagaaaacaatttactttctaattaaaattttgtgtttcttaagatcaaatcatataggtaacttcatagacctaaattaaaagtgatttttggctggactggcaacaatgttcccaatgtctttactttttaaaaaaggcttttcatatttaagcacatacctattttgtagacttacattgtttaatatttattttaatcttaatatttttacattattatattgcattatttattttttctaagttccagaataatagtgtcattattatagactatatgttttgaagtttgatattataatgggatattcattttttgttcttttcttgactcctttctcaagtgtgtgataaggtctgctgataaaatatttaaccccaagaaagtgaaaactaatataaaattagaaagacctatccaaattagacagtcaattccattaaaataagaagtgagaaaaacaatgttgggcattgaggtgtaaattttgcccagatgtatacccagtgtgaaatatcttctaataaaaatatatttggctcttatccctgcacatgtagaggcataaaaattggtaaacatgtcccgctgtgtagaactttaaaaaaaaggcatttttgaaagtgttgagtggcactgataactggtgaagcctacagccatccgcccaaaagtctgttctgatggcactgagttttcattgttctggatgtataagtctgtgtgtcaggtacagctgggcccagccagcttgagtcactcttgtacaagcttgtttttttctgtcttgtgaatgcacttgataatttaaaaataaaaatatctgtttctctgcagtttcagctaataattttgagatatgtgttgattttctgattgaatcaccaagaatttcaacaagtttagaaataatttaagatgaatgaaaaatatgtcagggggagctaagcatttgctaagctcttgatgtttatatgaaaaataaagggttgtttttatattgcaactactaaagagaaaaatagcagttgaagcaaacaccaggaaaatttggctctactgaaagcccagtccttttcccctttgtctcgctgacaaagtaagactagggttatgttcatgaatagattaataaaagatgtttctttaccacacaatctgagatgagatggggtgggggagatcatgacagtgccctccaagcaatagatccagctgataatcaagcagaaaatcagacaccagaatccatttgatgatgtacggcattaaacatttccttataacaaa

SEQ ID NO: 103185 - DNA, 5549 bp, Homo sapiens
  Payload ID: 124
  Gene Symbol: AHI1
  Gene Name: Abelson helper integration site 1
  Uniprot ID: Q8N157
  ENST ID: ENST00000457866
  CDS Start-End: 300-3890
ggcggcgcgctgtccgcactgcggcacagagccgcggcttgctttcaggacacgggtcgctggcgggttaggtggctgcgtggccgcctcacttcgcgcacgcgccgctaggctgggggagttgatttgcactgctccgggtgtcggctccggcgggacgggcggttctgcgtacccctctccagtgtcaacctggggctgaatcttcaacctgtcaaagccttcttaattatgtctgagaaaaggatcctgattgagtcaatgctttgcattctcagtcctctgcataaagctgagagatgcctacagctgagagtgaagcaaaagtaaaaaccaaagttcgctttgaagaattgcttaagacccacagtgatctaatgcgtgaaaagaaaaaactgaagaaaaaacttgtcaggtctgaagaaaacatctcacctgacactattagaagcaatcttcactatatgaaagaaactacaagtgatgatcccgacactattagaagcaatcttccccatattaaagaaactacaagtgatgatgtaagtgctgctaacactaacaacctgaagaagagcacgagagtcactaaaaacaaattgaggaacacacagttagcaactgaaaatcctaatggtgatgctagtgtagaggaagacaaacaaggaaagccaaataaaaaggtgataaagacggtgccccagttgactacacaagacctgaaaccggaaactcctgagaataaggttgattctacacaccagaaaacacatacaaagccacagccaggcgttgatcatcagaaaagtgagaaggcaaatgagggaagagaagagactgatttagaagaggatgaagaattgatgcaagcatatcagtgccatgtaactgaagaaatggcaaaggagattaagaggaaaataagaaagaaactgaaagaacagttgacttactttccctcagatactttattccatgatgacaaactaagcagtgaaaaaaggaaaaagaaaaaggaagttccagtcttctctaaagctgaaacaagtacattgaccatctctggtgacacagttgaaggtgaacaaaagaaagaatcttcagttagatcagtttcttcagattctcatcaagatgatgaaataagctcaatggaacaaagcacagaagacagcatgcaagatgatacaaaacctaaaccaaaaaaaacaaaaaagaagactaaagcagttgcagataataatgaagatgttgatggtgatggtgttcatgaaataacaagccgagatagcccggtttatcccaaatgtttgcttgatgatgaccttgtcttgggagtttacattcaccgaactgatagacttaagtcagattttatgatttctcacccaatggtaaaaattcatgtggttgatgagcatactggtcaatatgtcaagaaagatgatagtggacggcctgtttcatcttactatgaaaaagagaatgtggattatattcttcctattatgacccagccatatgattttaaacagttaaaatcaagacttccagagtgggaagaacaaattgtatttaatgaaaattttccctatttgcttcgaggctctgatgagagtcctaaagtcatcctgttctttgagattcttgatttcttaagcgtggatgaaattaagaataattctgaggttcaaaaccaagaatgtggctttcggaaaattgcctgggcatttcttaagcttctgggagccaatggaaatgcaaacatcaactcaaaacttcgcttgcagctatattacccacctactaagcctcgatccccattaagtgttgttgaggcatttgaatggtggtcaaaatgtccaagaaatcattacccatcaacactgtacgtaactgtaagaggactgaaagttccagactgtataaagccatcttaccgctctatgatggctcttcaggaggaaaaaggtaaaccagtgcattgtgaacgtcaccatgagtcaagctcagtagacacagaacctggattagaagagtcaaaggaagtaataaagtggaaacgactccctgggcaggcttgccgtatcccaaacaaacacctcttctcactaaatgcaggagaacgaggatgtttttgtcttgatttctcccacaatggaagaatattagcagcagcttgtgccagccgggatggatatccaattattttatatgaaattccttctggacgtttcatgagagaattgtgtggccacctcaatatcatttatgatctttcctggtcaaaagatgatcactacatccttacttcatcatctgatggcactgccaggatatggaaaaatgaaataaacaatacaaatactttcagagttttacctcatccttcttttgtttacacggctaaattccatccagctgtaagagagctagtagttacaggatgctatgattccatgatacggatatggaaagttgagatgagagaagattctgccatattggtccgacagtttgatgttcacaaaagttttatcaactcactttgttttgatactgaaggtcatcatatgtattcaggagattgtacaggggtgattgttgtttggaatacctatgtcaagattaatgatttggaacattcagtgcaccactggactataaataaggaaattaaagaaactgagtttaagggaattccaataagttatttggagattcatcccaatggaaaacgtttgttaatccataccaaagacagtactttgagaattatggatctccggatattagtagcaaggaagtttgtaggagcagcaaattatcgggagaagattcatagtactttgactccatgtgggacttttctgtttgctggaagtgaggatggtatagtgtatgtttggaacccagaaacaggagaacaagtagccatgtattctgacttgccattcaagtcacccattcgagacatttcttatcatccatttgaaaatatggttgcattctgtgcatttgggcaaaatgagccaattcttctgtatatttacgatttccatgttgcccagcaggaggctgaaatgttcaaacgctacaatggaacatttccattacctggaatacaccaaagtcaagatgccctatgtacctgtccaaaactaccccatcaaggctcttttcagattgatgaatttgtccacactgaaagttcttcaacgaagatgcagctagtaaaacagaggcttgaaactgtcacagaggtgatacgttcctgtgctgcaaaagtcaacaaaaatctctcatttacttcaccaccagcagtttcctcacaacagtctaagttaaagcagtcaaacatgctgaccgctcaagagattctacatcagtttggtttcactcagaccgggattatcagcatagaaagaaagccttgtaaccatcaggtagatacagcaccaacggtagtggctctttatgactacacagcgaatcgatcagatgaactaaccatccatcgcggagacattatccgagtgtttttcaaagataatgaagactggtggtatggcagcataggaaagggacaggaaggttattttccagctaatcatgtggctagtgaaacactgtatcaagaactgcctcctgagataaaggagcgatcccctcctttaagccctgaggaaaaaactaaaatagaaaaatctccagctcctcaaaagcaatcaatcaataagaacaagtcccaggacttcagactaggctcagaatctatgacacattctgaaatgagaaaagaacagagccatgaggaccaaggacacataatggatacacggatgaggaagaacaagcaagcaggcagaaaagtcactctaatagagtaaagaattgaagaaaagttaagagctgccgaaatgcacagaggtgaaaatgacaaaccaaatggaatttctcttcagagttcagaattttcagatactaaggaggaagaaaggatccactacttcttgttcttatgaatgactctagaaaaatcagaatcaagttgtgggtggaaaaatcaacgtggcctttgagttcagttgttataaaccattgtgactattgttggtcaaagtattggtacttatattgttagtaattgcatcataattacattaccagtgttggaaaactaatgaagaaaacactgtaattgctactcagcaaatgtgaataaaaggtgtttgcgttattaggatgtctgttaagtaatcatttaatattattatattggtaatggttgtatgtgtgatgctatgcccagaatatgaagtatctgtttttgaaattcactttatttaaaagataagcagctgactgggcacggtgcctcatgcctgtaatcctagcaccttgggaggctgaggcaggtggatcacctaaggtcaggagttcaacaacaccagcctgaccaacatggtgaaaccccatctctactaaaaatacaaaaatcagccgggtctcatggcaggcacctgtaatcccatctactgaggcaggagaattgcttgacccaggaggcagaggttgcagtgagccaagatcacgccattgcactccagcctgggggacagagcaagactctatctccaaaaaacaaaaaagataagcagctttagaatatggcgcattcaaaacagtctcagtaacaaagacattaaaagaaaacaatttactttctaattaaaattttgtgtttcttaagatcaaatcatataggtaacttcatagacctaaattaaaagtgatttttggctggactggcaacaatgttcccaatgtctttactttttaaaaaaggcttttcatatttaagcacatacctattttgtagacttacattgtttaatatttattttaatcttaatatttttacattattatattgcattatttattttttctaagttccagaataatagtgtcattattatagactatatgttttgaagtttgatattataatgggatattcattttttgttcttttcttgactcctttctcaagtgtgtgataaggtctgctgataaaatatttaaccccaagaaagtgaaaactaatataaaattagaaagacctatccaaattagacagtcaattccattaaaataagaagtgagaaaaacaatgttgggcattgaggtgtaaattttgcccagatgtatacccagtgtgaaatatcttctaataaaaatatatttggctcttatccctgcacatgtagaggcataaaaattggtaaacatgtcccgctgtgtagaactttaaaaaaaaggcatttttgaaagtgttgagtggcactgataactggtgaagcctacagccatccgcccaaaagtctgttctgatggcactgagttttcattgttctggatgtataagtctgtgtgtcaggtacagctgggcccagccagcttgagtcactcttgtacaagcttgtttttttctgtcttgtgaatgcacttgataatttaaaaataaaaatatctgtttctctgca

SEQ ID NO: 103186 - DNA, 3655 bp, Homo sapiens
  Payload ID: 124
  Gene Symbol: AHI1
  Gene Name: Abelson helper integration site 1
  Uniprot ID: Q8N157
  ENST ID: ENST00000531788
  CDS Start-End: 275-2104
acagagccgcggcttgctttcaggacacgggtcgctggcgggttaggtggctgcgtggccgcctcacttcgcgcacgcgccgctaggctgggggagttgatttgcactgctccgggtgtcggctccggcgggacgggcggttctgcgtacccctctccagtgtcaacctggggctgaatcttcaacctgtcaaagccttcttaattatgtctgagaaaaggatcctgattgagtcaatgctttgcattctcagtcctctgcataaagctgagagatgcctacagctgagagtgaagcaaaagtaaaaaccaaagttcgctttgaagaattgcttaagacccacagtgatctaatgcgtgaaaagaaaaaactgaagaaaaaacttgtcaggtctgaagaaaacatctcacctgacactattagaagcaatcttcactatatgaaagaaactacaagtgatgatcccgacactattagaagcaatcttccccatattaaagaaactacaagtgatgatgtaagtgctgctaacactaacaacctgaagaagagcacgagagtcactaaaaacaaattgaggaacacacagttagcaactgaaaatcctaatggtgatgctagtgtagaggaagacaaacaaggaaagccaaataaaaaggtgataaagacggtgccccagttgactacacaagacctgaaaccggaaactcctgagaataaggttgattctacacaccagaaaacacatacaaagccacagccaggcgttgatcatcagaaaagtgagaaggcaaatgagggaagagaagagactgatttagaagaggatgaagaattgatgcaagcatatcagtgccatgtaactgaagaaatggcaaaggagattaagaggaaaataagaaagaaactgaaagaacagttgacttactttccctcagatactttattccatgatgacaaactaagcagtgaaaaaaggaaaaagaaaaaggaagttccagtcttctctaaagctgaaacaagtacattgaccatctctggtgacacagttgaaggtgaacaaaagaaagaatcttcagttagatcagtttcttcagattctcatcaagatgatgaaataagctcaatggaacaaagcacagaagacagcatgcaagatgatacaaaacctaaaccaaaaaaaacaaaaaagaagactaaagcagttgcagataataatgaagatgttgatggtgatggtgttcatgaaataacaagccgagatagcccggtttatcccaaatgtttgcttgatgatgaccttgtcttgggagtttacattcaccgaactgatagacttaagtcagattttatgatttctcacccaatggtaaaaattcatgtggttgatgagcatactggtcaatatgtcaagaaagatgatagtggacggcctgtttcatcttactatgaaaaagagaatgtggattatattcttcctattatgacccagccatatgattttaaacagttaaaatcaagacttccagagtgggaagaacaaattgtatttaatgaaaattttccctatttgcttcgaggctctgatgagagtcctaaagtcatcctgttctttgagattcttgatttcttaagcgtggatgaaattaagaataattctgaggttcaaaaccaagaatgtggctttcggaaaattgcctgggcatttcttaagcttctgggagccaatggaaatgcaaacatcaactcaaaacttcgcttgcagctatattacccacctactaagcctcgatccccattaagtgttgttgaggcatttgaatggtggtcaaaatgtccaagaaatcattacccatcaacactgtacgtaactgtaagaggactgaaagttccagactgtataaagccatcttaccgctctatgatggctcttcaggaggaaaaaggtaaaccagtgcattgtgaacgtcaccatgagtcaagctcagtagacacagaacctggattagaagagtcaaaggaagtaataaagtggaaacgactccctgggcaggagaacgaggatgtttttgtcttgatttctcccacaatggaagaatattagcagcagcttgtgccagccgggatggatatccaattattttatatgaaattccttctggacgtttcatgagagaattgtgtggccacctcaatatcatttatgatctttcctggtcaaaagatgatcactacatccttacttcatcatctgatggcactgccagtattgtgaaagcattaactgagtgaaaagagaagcatgtggctagcatcaaaatgacaaggagagttttgaaagaggatatggaaaaatgaaataaacaatacaaatactttcagagttttacctcatccttcttttgtttacacggctaaattccatccagctgtaagagagctagtagttacaggatgctatgattccatgatacggatatggaaagttgagatgagagaagattctgccatattggtccgacagtttgatgttcacaaaagttttatcaactcactttgttttgatactgaaggtcatcatatgtattcaggagattgtacaggggtgattgttgtttggaatacctatgtcaagattaatgatttggaacattcagtgcaccactggactataaataaggaaattaaagaaactgagtttaagggaattccaataagttatttggagattcatcccaatggaaaacgtttgttaatccataccaaagacagtactttgagaattatggatctccggatattagtagcaaggaagtttgtaggagcagcaaattatcgggagaagattcatagtactttgactccatgtgggacttttctgtttgctggaagtgaggatggtatagtgtatgtttggaacccagaaacaggagaacaagtagccatgtattctgacttgccattcaagtcacccattcgagacatttcttatcatccatttgaaaatatggttgcattctgtgcatttgggcaaaatgagccaattcttctgtatatttacgatttccatgttgcccagcaggaggctgaaatgttcaaacgctacaatggaacatttccattacctggaatacaccaaagtcaagatgccctatgtacctgtccaaaactaccccatcaaggctcttttcagattgatgaatttgtccacactgaaagttcttcaacgaagatgcagctagtaaaacagaggcttgaaactgtcacagaggtgatacgttcctgtgctgcaaaagtcaacaaaaatctctcatttacttcaccaccagcagtttcctcacaacagtctaagttaaagcagtcaaacatgctgaccgctcaagagattctacatcagtttggtttcactcagaccgggattatcagcatagaaagaaagccttgtaaccatcaggtagatacagcaccaacgcactgtatcaagaactgcctcctgagataaaggagcgatcccctcctttaagccctgaggaaaaaactaaaatagaaaaatctccagctcctcaaaaggtaaatgtttttgagcatacgtattacatatgtactttgattttcactctctctggataaaatattactttattttttatgctta

SEQ ID NO: 103187 - DNA, 712 bp, Homo sapiens
  Payload ID: 124
  Gene Symbol: AHI1
  Gene Name: Abelson helper integration site 1
  ENST ID: ENST00000488690
  CDS Start-End: 269-433
gggagttgatttgcactgctccgggtgtcggctccggcgggacgggcggttctgcgtacccctctccagtgtcaacctggggctgaatcttcaacctgtcaaagccttcttaattatgtctgagaaaagtactaaaataggtgccattttaaattcccagacaaggaaaaaccaaggattagaaattaagtagcttgcccaaggccacacatcagatcctgattgagtcaatgctttgcattctcagtcctctgcataaagctgagagatgcctacagctgagagtgaagcaaaagtaaaaaccaaagttcgctttgaagaattgcttaagacccacagtgatctaatgcgtgaaaagaaaaaactgaagaaaaaacttgtcaggtctgaagaaaacatctcaaaccaggagaaatcaatggccgtatggtaataattatccttttatgtttgaggcacactttcaaatgatagaatctttggcagcacacttgaaggaattaaaaatacagtgctcaaagactaagcaaatcagcaactaactacaacctgatccccttggaatcataaagagtctgtattggcatccacagttaatgctctatgccctctttatacctatctccctacttgagttgcactttttactactttgaccattatctcttctgtcctcacagaaaaaaataaacaggctcttgtgtaaatggta

SEQ ID NO: 103188 - DNA, 1074 bp, Homo sapiens
  Payload ID: 124
  Gene Symbol: AHI1
  Gene Name: Abelson helper integration site 1
  ENST ID: ENST00000524469
  CDS Start-End: 210-1074
gagccgcggcttgctttcaggacacgggtcgctggcgggttaggtggctgcgtggccgcctcacttcgcgcacgcgccgctaggctgggggagttgatttgcactgctccgggtgtcggctccggcgggacgggcggttctgcgtacccctctccgatcctgattgagtcaatgctttgcattctcagtcctctgcataaagctgagagatgcctacagctgagagtgaagcaaaagtaaaaaccaaagttcgctttgaagaattgcttaagacccacagtgatctaatgcgtgaaaagaaaaaactgaagaaaaaacttgtcaggtctgaagaaaacatctcacccgacactattagaagcaatcttccccatattaaagaaactacaagtgatgatgtaagtgctgctaacactaacaacctgaagaagagcacgagagtcactaaaaacaaattgaggaacacacagttagcaactgaaaatcctaatggtgatgctagtgtagaggaagacaaacaaggaaagccaaataaaaaggtgataaagacggtgccccagttgactacacaagacctgaaaccggaaactcctgagaataaggttgattctacacaccagaaaacacatacaaagccacagccaggcgttgatcatcagaaaagtgagaaggcaaatgagggaagagaagagactgatttagaagaggatgaagaattgatgcaagcatatcagtgccatgtaactgaagaaatggcaaaggagattaagaggaaaataagaaagaaactgaaagaacagttgacttactttccctcagatactttattccatgatgacaaactaagcagtgaaaaaaggaaaaagaaaaaggaagttccagtcttctctaaagctgaaacaagtacattgaccatctctggtgacacagttgaaggtgaacaaaagaaagaatcttcagttagatcagtttcttcagattctcatcaagatgatgaaataagctcaatggaacaaagcacagaagacagcatgcaagatgatacaaaacctaaaccaaaaaaaacaaaaaaga

SEQ ID NO: 103189 - DNA, 550 bp, Homo sapiens
  Payload ID: 124
  Gene Symbol: AHI1
  Gene Name: Abelson helper integration site 1
  ENST ID: ENST00000527681
  CDS Start-End: 1-88
ggacttcagactaggctcagaatctatgacacaaagagagctgaatgagaaggcaggaggaatatgcatagctagagaaggcctctagataaagttctgaaatgagaaaagaacagagccatgaggaccaaggacacataatggatacacggatgaggaagaacaagcaagcaggcagaaaagtcactctaatagagtaaagaattgaagaaaagttaagagctgccgaaatgcacagaggtgaaaatgacaaaccaaatggaatttctcttcagagttcagaattttcagatactaaggaggaagaaaggatccactacttcttgttcttatgaatgactctagaaaaatcagaatcaagttgtgggtggaaaaatcaacgtggcctttgagttcagttgttataaaccattgtgactattgttggtcaaagtattggtacttatattgttagtaattgcatcataattacattaccagtgttggaaaactaatgaagaaaacactgtaattgctactcagcaaatgtgaataaaaggtgtttgcgtta

SEQ ID NO: 103190 - DNA, 428 bp, Homo sapiens
  Payload ID: 124
  Gene Symbol: AHI1
  Gene Name: Abelson helper integration site 1
  ENST ID: ENST00000529865
  CDS Start-End: 1-389
atggaacatttccattacctggaatacaccaaagtcaagatgccctatgtacctgtccaaaactaccccatcaaggctcttttcagattgatgaatttgtccacactgaaagttcttcaacgaagatgcagctagtaaaacagaggcttgaaactgtcacagaggtgatacgttcctgtgctgcaaaagtcaacaaaaatctctcatttacttcaccaccagcagtttcctcacaacagtctaagttaaagcagtcaaacatgctgaccgctcaagagattctacatcagtttggtttcactcagaccggtgagcccctttcttactttgacaattcttttaaatgttcagatgcttgttgtgttgatgaatatcacttatttctttagaaataaagctcataatggtcggtttttacacttgacaaa

SEQ ID NO: 103191 - DNA, 2920 bp, Homo sapiens
  Payload ID: 124
  Gene Symbol: AHI1
  Gene Name: Abelson helper integration site 1
  ENST ID: ENST00000475846
  CDS Start-End: 1-1627
ctcactaaatgcaggagaacgaggatgtttttgtcttgatttctcccacaatggaagaatattagcagcagcttgtgccagccgggatggatatccaattattttatatgaaattccttctggacgtttcatgagagaattgtgtggccacctcaatatcatttatgatctttcctggtcaaaagatgatcactacatccttacttcatcatctgatggcactgccaggatatggaaaaatgaaataaacaatacaaatactttcagagttttacctcatccttcttttgtttacacggctaaattccatccagctgtaagagagctagtagttacaggatgctatgattccatgatacggatatggaaagttgagatgagagaagattctgccatattggtccgacagtttgatgttcacaaaagttttatcaactcactttgttttgatactgaaggtcatcatatgtattcaggagattgtacaggggtgattgttgtttggaatacctatgtcaagattaatgatttggaacattcagtgcaccactggactataaataaggaaattaaagaaactgagtttaagggaattccaataagttatttggagattcatcccaatggaaaacgtttgttaatccataccaaagacagtactttgagaattatggatctccggatattagtagcaaggaagtttgtaggagcagcaaattatcgggagaagattcatagtactttgactccatgtgggacttttctgtttgctggaagtgaggatggtatagtgtatgtttggaacccagaaacaggagaacaagtagccatgtattctgacttgccattcaagtcacccattcgagacatttcttatcatccatttgaaaatatggttgcattctgtgcatttgggcaaaatgagccaattcttctgtatatttacgatttccatgttgcccagcaggaggctgaaatgttcaaacgctacaatggaacatttccattacctggaatacaccaaagtcaagatgccctatgtacctgtccaaaactaccccatcaaggctcttttcagattgatgaatttgtccacactgaaagttcttcaacgaagatgcagctagtaaaacagaggcttgaaactgtcacagaggtgatacgttcctgtgctgcaaaagtcaacaaaaatctctcatttacttcaccaccagcagtttcctcacaacagtctaagttaaagcagtcaaacatgctgaccgctcaagagattctacatcagtttggtttcactcagaccgggattatcagcatagaaagaaagccttgtaaccatcaggtagatacagcaccaacggtagtggctctttatgactacacagcgaatcgatcagatgaactaaccatccatcgcggagacattatccgagtgtttttcaaagataatgaagactggtggtatggcagcataggaaagggacaggaaggttattttccagctaatcatgtggctagtgaaacactgtatcaagaactgcctcctgagataaaggagcgatcccctcctttaagccctgaggaaaaaactaaaatagaaaaatctccagctcctcaaaaggtaaaataaaacaaaacagctcacagagacacctccttcttccccctgcttctgcctccatgagtaactacctatatgacgtgctgctgctgagaccaaggaatgaatagtgccaaatcttgctgaagaatgatcttgcagaaatctgattgtgaagaaggaaatctaaaaaggccaaacaagcttcagtagagataacaccaggaaagcagttactcaaacaagactgaaagagaagcaatcaatcaataagaacaagtcccaggacttcagactaggctcagaatctatgacacattctgaaatgagaaaagaacagagccatgaggaccaaggacacataatggatacacggatgaggaagaacaagcaagcaggcagaaaagtcactctaatagagtgtgccagctgtcacttttctcaggagtggtcgatggagttgactgctaccttaaccagatttgccatcgttctgaaactgccgtgtgttttctaaggacaaccaggtgttaagcctttctctttagaagaaggacagtaacctttctgttaaagaattgaagaaaagttaagagctgccgaaatgcacagaggtgaaaatgacaaaccaaatggaatttctcttcagagttcagaattttcagatactaaggaggaagaaaggatccactacttcttgttcttatgaatgactctagaaaaatcagaatcaagttgtgggtggaaaaatcaacgtggcctttgagttcagttgttataaaccattgtgactattgttggtcaaagtattggtacttatattgttagtaattgcatcataattacattaccagtgttggaaaactaatgaagaaaacactgtaattgctactcagcaaatgtgaataaaaggtgtttgcgttattaggatgtctgttaagtaatcatttaatattattatattggtaatggttgtatgtgtgatgctatgcccagaatatgaagtatctgtttttgaaattcactttatttaaaagataagcagctgactgggcacggtgcctcatgcctgtaatcctagcaccttgggaggctgaggcaggtggatcacctaaggtcaggagttcaacaacaccagcctgaccaacatggtgaaaccccatctctactaaaaatacaaaaatcagccgggtctcatggcaggcacctgtaatcccatctactgaggcaggagaattgcttgacccaggaggcagaggttgcagtgagccaagatcacgccattgcactccagcctgggggacagagcaagactctatctcc

SEQ ID NO: 103192 - DNA, 441 bp, Homo sapiens
  Payload ID: 124
  Gene Symbol: AHI1
  Gene Name: Abelson helper integration site 1
  ENST ID: ENST00000528103
  CDS Start-End: 142-288
tacaatggcatgatcttgtgtgaagaacgttttataatttttatttggaagttccatattacaaatacatctcctttgtttcgataggatcctgattgagtcaatgctttgcattctcagtcctctgcataaagctgagagatgcctacagctgagagtgaagcaaaagtaaaaaccaaagttcgctttgaagaattgcttaagacccacagtgatctaatgcgtgaaaagaaaaaactgaagaaaaaacttgtcaggtctgaagaaaacatctcagtaagtaaatgatcattgggtaatagtgatttacatatgcgcataaaatgcagatatggctgcattttatgttaaaattctaaggaattttgaaaattaaaaacagtaacactatgtcatggtcaataacatgtggtaaaaataaagtttatattagaatcaaca

SEQ ID NO: 103193 - DNA, 680 bp, Homo sapiens
  Payload ID: 124
  Gene Symbol: AHI1
  Gene Name: Abelson helper integration site 1
  ENST ID: ENST00000534469
  CDS Start-End: 383-529
gaacattttaccagggtgaaaattcaaggttgaggtagagggagctacaaagattaaggcaccctggaagcacagaagagaagttcttaaatgcccttcaaggtgagaatgctctctagagaagatatcatttgcctttaaaggatagtgaggagtttgttagagagacaaaggaggaagcacatttttcaggggaggggatatgtgtgtaatgatacaaaagcaagagagaacttggcacacgtgaaggcctgcaggtagtttcacatgtctggaacacagtggatgtgtgaaggggacatttcataaatggccttggacctcactggatcctgattgagtcaatgctttgcattctcagtcctctgcataaagctgagagatgcctacagctgagagtgaagcaaaagtaaaaaccaaagttcgctttgaagaattgcttaagacccacagtgatctaatgcgtgaaaagaaaaaactgaagaaaaaacttgtcaggtctgaagaaaacatctcagtaagtaaatgatcattgggtaatagtgatttacatatgcgcataaaatgcagatatggctgcattttatgttaaaattctaaggaattttgaaaattaaaaacagtaacactatgtcatggtcaataacatgtggtaaaaataaagtttatattagaatcaa

SEQ ID NO: 103194 - DNA, 1836 bp, Homo sapiens
  Payload ID: 125
  Gene Symbol: ABHD14A-ACY1
  Gene Name: ABHD14A-ACY1 readthrough
  ENST ID: ENST00000463721
  CDS Start-End: 87-590
cggctgcggagtgcgcaggcgcgccgagatggccgcgctcctggccgcctagagccggagcggcccgcggagctgcggaggcagccatggtcggggcgctgtgcggctgctggttccgcctgggcggggcccgcccgctcatcccgttgggcccgactgtggtacagacctccatgagccggtcccaggtagccctgctgggcctgagtctgctgctcatgctcctactgtatgtggggctgccaggcccccctgagcagacttcctgcctctggggagaccccaatgtcacagtcctggctggtctcacccctggcaactcgcccatcttttaccgcgaggtgctcccactcaaccaggcacacagggtggaggtggtgctgcttcatggaaaggcctttaactctcacacgtgggagcagctgggcacactgcagctactgtcacagaggggctaccgggccgtggcccttgaccttccagctcaccacgcgcagcgccatgaccagcaagggtcccgaggaggagcacccatcggtgacgctcttccgccagtacctgcgtatccgcactgtccagcccaagcctgactatggagctgctgtggctttctttgaggagacagcccgccagctgggcctgggctgtcagaaagtagaggtggcacctggctatgtggtgaccgtgttgacctggccaggcaccaaccctacactctcctccatcttgctcaactcccacacggatgtggtgcctgtcttcaaggaacattggagtcacgacccctttgaggccttcaaggattctgagggctacatctatgccaggggtgcccaggacatgaagtgcgtcagcatccagtacctggaagctgtgaggaggctgaaggtggagggccaccggttccccagaaccatccacatgacctttgtgcctgatgaggaggttgggggtcaccaaggcatggagctgttcgtgcagcggcctgagttccacgccctgagggcaggctttgccctggatgagggcatagccaatcccactgatgccttcactgtcttttatagtgagcggagtccctggtgggtgcgggttaccagcactgggaggccaggccatgcctcacgcttcatggaggacacagcagcagagaagctgcacaaggttgtaaactccatcctggcattccgggagaaggaatggcagaggctgcagtcaaacccccacctgaaagaggggtccgtgacctccgtgaacctgactaagctagagggtggcgtggcctataacgtgatacctgccaccatgagcgccagctttgacttccgtgtggcaccggatgtggacttcaaggcttttgaggagcagctgcagagctggtgccaggcagctggcgagggggtcaccctagagtttgctcagaagtggatgcacccccaagtgacacctactgatgactcaaacccttggtgggcagcttttagccgggtctgcaaggatatgaacctcactctggagcctgagatcatgcctgctgccactgacaaccgctatatccgcgcggtgggggtcccagctctaggcttctcacccatgaaccgcacacctgtgctgctgcacgaccacgatgaacggctgcatgaggctgtgttcctccgtggggtggacatatatacacgcctgctgcctgcccttgccagtgtgcctgccctgcccagtgacagctgagccctggaactcctaaacctttgcccctggggcttccatcccaaccagtgccaaggacctcctcttcccccttccaaataataaagtctatggacagggctgtctctg

SEQ ID NO: 103195 - DNA, 1017 bp, Homo sapiens
  Payload ID: 125
  Gene Symbol: ABHD14A-ACY1
  Gene Name: ABHD14A-ACY1 readthrough
  ENST ID: ENST00000486081
  CDS Start-End: 87-590
cggctgcggagtgcgcaggcgcgccgagatggccgcgctcctggccgcctagagccggagcggcccgcggagctgcggaggcagccatggtcggggcgctgtgcggctgctggttccgcctgggcggggcccgcccgctcatcccgttgggcccgactgtggtacagacctccatgagccggtcccaggtagccctgctgggcctgagtctgctgctcatgctcctactgtatgtggggctgccaggcccccctgagcagacttcctgcctctggggagaccccaatgtcacagtcctggctggtctcacccctggcaactcgcccatcttttaccgcgaggtgctcccactcaaccaggcacacagggtggaggtggtgctgcttcatggaaaggcctttaactctcacacgtgggagcagctgggcacactgcagctactgtcacagaggggctaccgggccgtggcccttgaccttccagctcaccacgcgcagcgccatgaccagcaagggtcccgaggaggagcacccatcggtgacgctcttccgccagtacctgcgtatccgcactgtccagcccaagcctgactatggtggcacctggctatgtggtgaccgtgttgacctggccaggcaccaaccctacactctcctccatcttgctcaactcccacacggatgtggtgcctgtcttcaaggaacattggagtcacgacccctttgaggccttcaaggattctgagggctacatctatgccaggggtgcccaggacatgaagtgcgtcagcatccagtacctggaagctgtgaggaggctgaaggtggagggccaccggttccccagaaccatccacatgacctttgtgcctgatgaggaggttgggggtcaccaaggcatggagctgttcgtgcagcggcctgagttccacgccctgagggcaggctttgccctggatgagggcatagccaatcccactgatgccttcactgtcttttatagtgagcggagtccctg

SEQ ID NO: 103196 - DNA, 1705 bp, Homo sapiens
  Payload ID: 125
  Gene Symbol: ABHD14A-ACY1
  Gene Name: ABHD14A-ACY1 readthrough
  ENST ID: ENST00000463937
  CDS Start-End: 77-1606
gtgcgcaggcgcgccgagatggccgcgctcctggccgcctagagccggagcggcccgcggagctgcggaggcagccatggtcggggcgctgtgcggctgctggttccgcctgggcggggcccgcccgctcatcccgttgggcccgactgtggtacagacctccatgagccggtcccaggtagccctgctgggcctgagtctgctgctcatgctcctactgtatgtggggctgccaggcccccctgagcagacttcctgcctctggggagaccccaatgtcacagtcctggctggtctcacccctggcaactcgcccatcttttaccgcgaggtgctcccactcaaccaggcacacagggtggaggtggtgctgcttcatggaaaggcctttaactctcacacgtgggagcagctgggcacactgcagctactgtcacagaggggctaccgggccgtggcccttgaccttccaggagctgctgtggctttctttgaggagacagcccgccagctgggcctgggctgtcagaaagtagaggtggcacctggctatgtggtgaccgtgttgacctggccaggcaccaaccctacactctcctccatcttgctcaactcccacacggatgtggtgcctgtcttcaaggaacattggagtcacgacccctttgaggccttcaaggattctgagggctacatctatgccaggggtgcccaggacatgaagtgcgtcagcatccagtacctggaagctgtgaggaggctgaaggtggagggccaccggttccccagaaccatccacatgacctttgtgcctgatgaggaggttgggggtcaccaaggcatggagctgttcgtgcagcggcctgagttccacgccctgagggcaggctttgccctggatgagggcatagccaatcccactgatgccttcactgtcttttatagtgagcggagtccctggtgggtgcgggttaccagcactgggaggccaggccatgcctcacgcttcatggaggacacagcagcagagaagctgcacaaggttgtaaactccatcctggcattccgggagaaggaatggcagaggctgcagtcaaacccccacctgaaagaggggtccgtgacctccgtgaacctgactaagctagagggtggcgtggcctataacgtgatacctgccaccatgagcgccagctttgacttccgtgtggcaccggatgtggacttcaaggcttttgaggagcagctgcagagctggtgccaggcagctggcgagggggtcaccctagagtttgctcagaagtggatgcacccccaagtgacacctactgatgactcaaacccttggtgggcagcttttagccgggtctgcaaggatatgaacctcactctggagcctgagatcatgcctgctgccactgacaaccgctatatccgcgcggtgggggtcccagctctaggcttctcacccatgaaccgcacacctgtgctgctgcacgaccacgatgaacggctgcatgaggctgtgttcctccgtggggtggacatatatacacgcctgctgcctgcccttgccagtgtgcctgccctgcccagtgacagctgagccctggaactcctaaacctttgcccctggggcttccatcccaaccagtgccaaggacctcctcttcccccttccaaataataaagtctatggacaggg

SEQ ID NO: 103197 - DNA, 1400 bp, Homo sapiens
  Payload ID: 126
  Gene Symbol: ABHD1
  Gene Name: abhydrolase domain containing 1
  Uniprot ID: Q96SE0
  ENST ID: ENST00000316470
  CDS Start-End: 115-1332
gcggggaccggacctgcacaggccgcctatggcgggcggcgggtgggaccgcgagttacagccggccaactggggccagccaggagcctgagggtcggaagcccccaacacaagatgctgagctccttcctgagcccccagaatggcacctgggcagacaccttctctctgctcttggctcttgccgttgccctctacttgggctactactgggcatgtgtgcttcagaggcctcggctggtggctgggccgcagtttctggccttcctggagccacactgttccatcaccaccgagactttctacccaacgctgtggtgttttgaggggcgactacaaagcatcttccaagtcctcctgcagtctcagcccctagtcctttatcagagtgacatcctccaaacaccagatggaggccagctcctgctagactgggccaagcagcctgacagcagccaagaccctgatcctactacccagcccattgtgctgctgcttcctggcatcactggcagtagccaggagacatacgtcttgcacctagttaaccaagctctgagggatggctaccaggctgtcgtgtttaacaaccggggctgccgtggggaggaactgcggacccacagggctttttgtgccagcaatactgaagatctagagacagtcgtgaaccacataaagcatcgttatccccaagctccactgctggccgtgggcatctcttttggagggatactggtgctgaatcacctggcacaggccaggcaggctgcagggctggtggcagcactgactctgtctgcatgctgggattcctttgagaccactcgctccctggaaaccccactcaactcactgctcttcaatcagcccctcactgctgggctctgccaacttgtggaacgaaacagaaaggtgattgaaaaggtggtggacatagactttgtactacaggcccgtacaatccgccagtttgatgagcgctacacatctgtggcctttggatatcaagactgtgttacctactacaaagcagcaagccctagaaccaagatagatgccatccggatccctgtgctctatctcagtgcagcagatgaccccttctcccccgtctgtgcccttcccatacaggccgcccaacactccccctacgttgcgctgctcatcacagcccggggtggccacatcggcttcctggaagggctgctcccgtggcagcactggtacatgagccgcctcttgcatcagtacgccaaagccatcttccaggacccagaggggctgcctgacctcagggctctcttaccttctgaggacagaaacagctgacaagagtaccatttggggtctcagttcactctttccttgtttattaaatatcaacttttcctgcctaa

SEQ ID NO: 103198 - DNA, 1167 bp, Homo sapiens
  Payload ID: 126
  Gene Symbol: ABHD1
  Gene Name: abhydrolase domain containing 1
  ENST ID: ENST00000420647
  CDS Start-End: 142-450
cggggaccggacctgcacaggccgcctatggcgggcggcgggtgggaccgcgagttacagccggccaactggggccagccaggagcctgagggtcggaagcccccaacacaagatgctgagctccttcctgagcccccagaatggcacctgggcagacaccttctctctgctcttggctcttgccgttgccctctacttgggctactactgggcatgtgtgcttcagtgacatcctccaaacaccagatggaggccagctcctgctagactgggccaagcagcctgacagcagccaagaccctgatcctactacccagcccattgtgctgctgcttcctggcatcactggcagtagccaggagacatacgtcttgcacctagttaaccaagctctgagggatggctaccaacccacagggctttttgtgccagcaatactgaagatctagagacagtcgtgaaccacataaagcatcgttatccccaagctccactgctggccgtgggcatctcttttggagggatactggtgctgaatcacctggcacaggccaggcaggctgcagggctggtggcagcactgactctgtctgcatgctgggattcctttgagaccactcgctccctggaaaccccactcaactcactgctcttcaatcagcccctcactgctgggctctgccaacttgtggaacgcctatcctatggtaagacctgcaggcccgtacaatccgccagtttgatgagcgctacacatctgtggcctttggatatcaagactgtgttacctactacaaagcagcaagccctagaaccaagatagatgccatccggatccctgtgctctatctcagtgcagcagatgaccccttctcccccgtctgtgcccttcccatacaggccgcccaacactccccctacgttgcgctgctcatcacagcccggggtggccacatcggcttcctggaagggctgctcccgtggcagcactggtacatgagccgcctcttgcatcagtacgccaaagccatcttccaggacccagaggggctgcctgacctcagggctctcttaccttctgaggacagaaacagctgacaagagtaccatttggggtctcagttcactctttccttgtttattaaatatcaacttttcctgcctaa

SEQ ID NO: 103199 - DNA, 668 bp, Homo sapiens
  Payload ID: 126
  Gene Symbol: ABHD1
  Gene Name: abhydrolase domain containing 1
  ENST ID: ENST00000416071
  CDS Start-End: 138-668
gaccggacctgcacaggccgcctatggcgggcggcgggtgggaccgcgagttacagccggccaactggggccagccaggagcctgagggtcggaagcccccaacacaagatgctgagctccttcctgagcccccagaatggcacctgggcagacaccttctctctgctcttggctcttgccgttgccctctacttgggctactactgggcatgtgtgcttcagtgacatcctccaaacaccagatggaggccagctcctgctagactgggccaagcagcctgacagcagccaagaccctgatcctactacccagcccattgtgctgctgcttcctggcatcactggcagtagccaggagacatacgtcttgcacctagttaaccaagctctgagggatggctaccaggctgtcgtgtttaacaaccggggctgccgtggggaggaactgcggacccacagggctttttgtgccagcaatactgaagatctagagacagtcgtgaaccacataaagcatcgttatccccaagctccactgctggccgtgggcatctcttttggagggatactggtgctgaatcacctggcacaggccaggcaggctgcagggctggtggcagcactgactctgtctgcatgctgggattcctttgagaccactcgctcc

SEQ ID NO: 103200 - DNA, 1387 bp, Homo sapiens
  Payload ID: 126
  Gene Symbol: ABHD1
  Gene Name: abhydrolase domain containing 1
  Uniprot ID: Q96SE0
  ENST ID: ENST00000448950
  CDS Start-End: 127-1044
aaactgcctgcagcggggaccggacctgcacaggccgcctatggcgggcggcgggtgggaccgcgagttacagccggccaactggggccagccaggagcctgagggtcggaagcccccaacacaagatgctgagctccttcctgagcccccagaatggcacctgggcagacaccttctctctgctcttggctcttgccgttgccctctacttgggctactactgggcatgtgtgcttcagaggcctcggctggtggctgggccgcagtttctggccttcctggagccacactgttccatcaccaccgagactttctacccaacgctgtggtgttttgaggggcgactacaaagcatcttccaagtcctcctgcagtctcagcccctagtcctttatcagagtgacatcctccaaacaccagatggaggccagctcctgctagactgggccaagcagcctgacagcagccaagaccctgatcctactacccagcccattgtgctgctgcttcctggcatcactggcagtagccaggagacatacgtcttgcacctagttaaccaagctctgagggatggctaccaggctgtcgtgtttaacaaccggggctgccgtggggaggaactgcggacccacagggctttttgtgccagcaatactgaagatctagagacagtcgtgaaccacataaagcatcgttatccccaagctccactgctggccgtgggcatctcttttggagggatactggtgctgaatcacctggcacaggccaggcaggctgcagggctggtggcagcactgactctgtctgcatgctgggattcctttgagaccactcgctccctggaaaccccactcaactcactgctcttcaatcagcccctcactgctgggctctgccaacttgtggaacgcctatcctatggtaagacctgcaggcccgtacaatccgccagtttgatgagcgctacacatctgtggcctttggatatcaagactgtgttacctactacaaagcagcaagccctagaaccaagatagatgccatccggatccctgtgctctatctcagtgcagcagatgaccccttctcccccgtctgtgcccttcccatacaggccgcccaacactccccctacgttgcgctgctcatcacagcccggggtggccacatcggcttcctggaagggctgctcccgtggcagcactggtacatgagccgcctcttgcatcagtacgccaaagccatcttccaggacccagaggggctgcctgacctcagggctctcttaccttctgaggacagaaacagctgacaagagtaccatttggggtctcagttcactctttccttgtttattaaatatcaacttttcctgcctaa

SEQ ID NO: 103201 - DNA, 1078 bp, Homo sapiens
  Payload ID: 126
  Gene Symbol: ABHD1
  Gene Name: abhydrolase domain containing 1
  Uniprot ID: Q96SE0
  ENST ID: ENST00000621324
  CDS Start-End: 161-1078
ccggggcaccggcggtgggcggggccagcagcgcaaactgcctgcagcggggaccggacctgcacaggccgcctatggcgggcggcgggtgggaccgcgagttacagccggccaactggggccagccaggagcctgagggtcggaagcccccaacacaagatgctgagctccttcctgagcccccagaatggcacctgggcagacaccttctctctgctcttggctcttgccgttgccctctacttgggctactactgggcatgtgtgcttcagaggcctcggctggtggctgggccgcagtttctggccttcctggagccacactgttccatcaccaccgagactttctacccaacgctgtggtgttttgaggggcgactacaaagcatcttccaagtcctcctgcagtctcagcccctagtcctttatcagagtgacatcctccaaacaccagatggaggccagctcctgctagactgggccaagcagcctgacagcagccaagaccctgatcctactacccagcccattgtgctgctgcttcctggcatcactggcagtagccaggagacatacgtcttgcacctagttaaccaagctctgagggatggctaccaggctgtcgtgtttaacaaccggggctgccgtggggaggaactgcggacccacagggctttttgtgccagcaatactgaagatctagagacagtcgtgaaccacataaagcatcgttatccccaagctccactgctggccgtgggcatctcttttggagggatactggtgctgaatcacctggcacaggccaggcaggctgcagggctggtggcagcactgactctgtctgcatgctgggattcctttgagaccactcgctccctggaaaccccactcaactcactgctcttcaatcagcccctcactgctgggctctgccaacttgtggaacgcctatcctatggtaagacctgcaggcccgtacaatccgccagtttgatgagcgctacacatctgtggcctttggatatcaagactgtgttacctactacaaagcagcaagccctagaaccaagatag

SEQ ID NO: 103202 - DNA, 2590 bp, Homo sapiens
  Payload ID: 127
  Gene Symbol: ABHD10
  Gene Name: abhydrolase domain containing 10
  Uniprot ID: Q9NUJ1
  ENST ID: ENST00000273359
  CDS Start-End: 28-948
ctgcagggtgcggggacaactacgaagatggcggttgcgcgcttggcagctgtggcggcctgggtaccttgtcggagctggggctgggcagccgtccccttcggtccccaccgtggcctcagcgtgctgcttgcacggatacctcagcgggcgccacggtggctcccagcttgtagacaaaagacgtcactctcattccttaatcgaccagaccttccaaacctggcttataagaagctaaaaggcaaaagtccaggaattatcttcatccctggctatctttcttatatgaatggtacaaaagcgttggcgattgaggagttttgcaaatctctaggtcacgcctgcataaggtttgattactcaggagttggaagttcagatggtaactcagaggaaagcacactggggaaatggagaaaagatgttctttctataattgatgacttagctgatgggccacagattcttgttggatctagccttggagggtggcttatgcttcatgctgcaattgcacgaccagagaaggtcgtggctcttattggtgtagctacagctgcagataccttagtgacaaagtttaatcagcttcctgttgagctaaaaaaggaagtagagatgaaaggtgtgtggagcatgccatcaaaatactctgaagaaggagtttataacgttcagtacagtttcattaaagaagctgaacatcactgcttgttacatagcccaattcctgtgaactgccccataagattgctccatggcatgaaggatgacattgtaccttggcatacatcaatgcaggttgccgatcgagtactcagcacagatgtggatgtcatcctccgaaaacacagtgatcaccgaatgagggaaaaagcagacattcaacttcttgtttacactattgatgacttaattgataagctctcaactatagttaactagtatcacatgtttagttggtatgtaaactaatgtatccagaagattggaagagggataagaaatgaaagatcctgatactttaggtttttccctttcctctattttgtaaatataagatgagtattatttaatgatgtatttgcataagtaatgcaaattgtgaagaaggaccagctgctgtttagaaaattttctccttccttctgtccttgattttttttcattaaagtatttcctttttttaattcaagaaaagtttacctttcttatgcttatgttagctatgccagctcttaattgcatccttttctaattaggattattaataaagcgtgaatattttgttttttattatagacagaaatttgtaacattacttctgatttgaaaatgcaattcacaaaatatagggaaatttttattgaagtaaatttgaaatgatggagaaatttcagaagcataataaagttcacaataaggataatactttatataatgtataaagtatatataatataatatatatgttatataaactgcacattatattcaaacttaaaattgagctttttttttaaaggcccaaaattgtacagtgatacaaggagctatttctaaaatttggcttatgtataatatatttaaatggggaatttcatctaaaacaatgatgtagtatttttaatattctgattggtaaaattaaagaggaaattaatctttatatattatttcttgcagaaacattcattattttattaatattgccctaagtacaactaggcaagtgattgccacctaaatcagaagacgttctaaagtcagtaagaaagtgtgaaatgctagtataaaggttattttttttctttcctaaataactaaagtgaggtgtagattgagccttgatattatttagttaatgttttttattaattaattttggctggactttatttagcttgattaggttattatctgtcaaaccttttaagttgacaacatgactcatatatatacatgtgtataagatgagcatgtgtcgaagacttattcgactcattaatgaggaaaccagcagatagtaaacctggttcaaagtacaattcaagaaactgagtatttatgggcattgaagaaaaaatgttgagataaaattgctgtgcagaaaaaagtgttaatgaagccgacctgactacttaaccttagagacctgctttacaaggttggcccttgattggcatctgggaacttggagttcagggggcttccaccattcccagaactgatcaaagtagcttactatatctaaactgtaaaacaatatagtttctcctgaacacctgctttccttctgggagtctggaattttggtatgtgccaggcagagactacctttgtgaccagctcccagtaaaaaccccaggcactcagtctctaacaagcttttctggttgacagtgtttcacaagtgctgttacaactggttgctgggagaattaagctcatcctctgtgattccactggcggaggattcttggaagcttgcacttagtttcccctgacttcaccccatgtgtcttttttcctttgctgattttgttttgtatcctttcactgtaataaatcatggccgtgagcagaa

SEQ ID NO: 103203 - DNA, 890 bp, Homo sapiens
  Payload ID: 127
  Gene Symbol: ABHD10
  Gene Name: abhydrolase domain containing 10
  ENST ID: ENST00000493784
  CDS Start-End: 11-169
aactacgaagatggcggttgcgcgcttggcagctgtggcggcctgggtaccttgtcggagctggggctgggcagccgtccccttcggtccccaccgtggcctcagcgtgctgcttgcacggatacctcagcgggcgccacggtggctcccagattcttgttggatctagccttggagggtggcttatgcttcatgctgcaattgcacgaccagagaaggtcgtggctcttattggtgtagctacagctgcagataccttagtgacaaagtttaatcagcttcctgttgagctaaaaaaggaagtagagatgaaaggtgtgtggagcatgccatcaaaatactctgaagaaggagtttataacgttcagtacagtttcattaaagaagctgaacatcactgcttgttacatagcccaattcctgtgaactgccccataagattgctccatggcatgaaggatgacattgtaccttggcatacatcaatgcaggttgccgatcgagtactcagcacagatgtggatgtcatcctccgaaaacacagtgatcaccgaatgagggaaaaagcagacattcaacttcttgtttacactattgatgacttaattgataagctctcaactatagttaactagtatcacatgtttagttggtatgtaaactaatgtatccagaagattggaagagggataagaaatgaaagatcctgatactttaggtttttccctttcctctattttgtaaatataagatgagtattatttaatgatgtatttgcataagtaatgcaaattgtgaagaaggaccagctgctgtttagaaaattttctccttccttctgtccttgattttttttcattaaagtatttcctttttttaattcaagaaaa

SEQ ID NO: 103204 - DNA, 1339 bp, Homo sapiens
  Payload ID: 127
  Gene Symbol: ABHD10
  Gene Name: abhydrolase domain containing 10
  ENST ID: ENST00000491580
  CDS Start-End: 53-280
gcgtagcgtgtccctcagtgggacactgcagggtgcggggacaactacgaagatggcggttgcgcgcttggcagctgtggcggcctgggtaccttgtcggagctggggctgggcagccgtccccttcggtccccaccgtggcctcagcgtgctgcttgcacggatacctcagcgggcgccacggtggctcccaggtttgattactcaggagttggaagttcagatggtaactcagaggaaagcacactggggaaatggagaaaagatgttctttctataattgatgacttagctgatgggccacagattcttgttggatctagccttggagggtggcttatgcttcatgctgcaattgcacgaccagagaaggtcgtggctcttattggtgtagctacagctgcagataccttagtgacaaagtttaatcagcttcctgttgagctaaaaaaggaagtagagatgaaaggtgtgtggagcatgccatcaaaatactctgaagaaggagtttataacgttcagtacagtttcattaaagaagctgaacatcactgcttgttacatagcccaattcctgtgaactgccccataagattgctccatggcatgaaggatgacattgtaccttggcatacatcaatgcaggttgccgatcgagtactcagcacagatgtggatgtcatcctccgaaaacacagtgatcaccgaatgagggaaaaagcagacattcaacttcttgtttacactattgatgacttaattgataagctctcaactatagttaactagtatcacatgtttagttggtatgtaaactaatgtatccagaagattggaagagggataagaaatgaaagatcctgatactttaggtttttccctttcctctattttgtaaatataagatgagtattatttaatgatgtatttgcataagtaatgcaaattgtgaagaaggaccagctgctgtttagaaaattttctccttccttctgtccttgattttttttcattaaagtatttcctttttttaattcaagaaaagtttacctttcttatgcttatgttagctatgccagctcttaattgcatccttttctaattaggattattaataaagcgtgaatattttgttttttattatagacagaaatttgtaacattacttctgatttgaaaatgcaattcacaaaatatagggaaatttttattgaagtaaatttgaaatgatggagaaatttcagaagcataataaagttcacaataaggataatactttatataatgtataaagtatatataatataatatatatgttatataaactgcacattatatt

SEQ ID NO: 103205 - DNA, 801 bp, Homo sapiens
  Payload ID: 127
  Gene Symbol: ABHD10
  Gene Name: abhydrolase domain containing 10
  Uniprot ID: Q9NUJ1
  ENST ID: ENST00000494817
  CDS Start-End: 10-627
actacgaagatggcggttgcgcgcttggcagctgtggcggcctgggtaccttgtcggagctggggctgggcagccgtccccttcggtccccaccgtggcctcagcgtgctgcttgcacggatacctcagcgggcgccacggtggctcccagcttgtagacaaaagacgtcactctcattccttaatcgaccagaccttccaaacctggcttataagaagctaaaaggcaaaagtccaggaattatcttcatccctggctatctttcttatatgaatggtacaaaagcgttggcgattgaggagttttgcaaatctctaggtcacgcctgcataaggtttgattactcaggagttggaagttcagatggtaactcagaggaaagcacactggggaaatggagaaaagatgttctttctataattgatgacttagctgatgggccacagattcttgttggatctagccttggagggtggcttatgcttcatgctgcaattgcacgaccagagaaggtcgtggctcttattggtgtagctacagctgcagataccttagtgacaaagtttaatcagcttcctgttgaggactctggaaggaaaaactatatttctttacattcagcctaaaattgcatgactaaaaaaggaagtagagatgaaaggtgtgtggagcatgccatcaaaatactctgaagaaggagtttataacgttcagtacagtttcattaaagaagctgaacatcactgcttgttacatagcccaattcctgtgaactgccccataagattgctccatggcat

SEQ ID NO: 103206 - DNA, 1483 bp, Homo sapiens
  Payload ID: 128
  Gene Symbol: ABHD11
  Gene Name: abhydrolase domain containing 11
  Uniprot ID: Q8NFV4
  ENST ID: ENST00000222800
  CDS Start-End: 71-1018
tgaagacggaaatgggcggggctgcgagctagggcgggagaaggagcgcggggaggacgtaccttgtgagatgcgagccggccaacagcttgcaagcatgctccgctggacccgagcctggaggctcccgcgtgagggactcggcccccacggccctagcttcgcgagggtgcctgtcgcacccagcagcagcagcggcggccgagggggcgccgagccgaggccgcttccgctttcctacaggcttctggacggggaggcagccctcccggccgtcgtctttttgcacgggctcttcggcagcaaaactaacttcaactccatcgccaagatcttggcccagcagacaggccgtagggtgctgacggtggatgctcgtaaccacggtgacagcccccacagcccagacatgagctacgagatcatgagccaggacctgcaggaccttctgccccagctgggcctggtgccctgcgtcgtcgttggccacagcatgggaggaaagacagccatgctgctggcactacagaggccagagctggtggaacgtctcattgctgtagatatcagcccagtggaaagcacaggtgtctcccactttgcaacctatgtggcagccatgagggccatcaacatcgcagatgagctgccccgctcccgtgcccgaaaactggcggatgaacagctcagttctgtcatccaggacatggccgtgcggcagcacctgctcactaacctggtagaggtagacgggcgcttcgtgtggagggtgaacttggatgccctgacccagcacctagacaagatcttggctttcccacagaggcaggagtcctacctcgggccaacactctttctccttggtggaaactcccagttcgtgcatcccagccaccaccctgagattatgcggctcttccctcgggcccagatgcagacggtgccgaacgctggccactggatccacgctgaccgcccacaggacttcatagctgccatccgaggcttcctggtctaagagttgctggcaagaagatggccgggcgtggtggctcatgcctgtaattccagcactttgggaggctaaggcgggaggatgacttgaggccaggagttggagaccagcctggccaacatggtgaaaccctgtctctactaaaaatacaaaaattagcctggcgtggtggtgcacacctgtaatcccagctactctggaggctgaggcaggagaatcacttgaaccctggaggcagaggttgcaatgagccgagatcacaccactacactccagcctaggcaacagagcaagactctgtctcaaaaaaaacaaaacaaaaaggaggcacaaaaccccaggcttcaagtctctgcagcctgctccacatttgggcacagaaggactcagacaggcactgtgtgggcacgaggttttacaggggtggtcagacctcaggctttaatgaataaagacactactcccaaa

SEQ ID NO: 103207 - DNA, 812 bp, Homo sapiens
  Payload ID: 128
  Gene Symbol: ABHD11
  Gene Name: abhydrolase domain containing 11
  Uniprot ID: Q8NFV4
  ENST ID: ENST00000395147
  CDS Start-End: 36-812
gggagaaggagcgcggggaggacgtaccttgtgagatgcgagccggccaacagcttgcaagcatgctccgctggacccgagcctggaggctcccgcgtgagggactcggcccccacggccctagcttcgcgagggtgcctgtcgcacccagcagcagcagcggcggccgagggggcgccgagccgaggccgcttccgctttcctacaggcttctggacggggaggcagccctcccggccgtcgtctttttgcacgggctcttcggcagcaaaactaacttcaactccatcgccaagatcttggcccagcagacaggccgtagggtgctgacggtggatgctcgtaaccacggtgacagcccccacagcccagacatgagctacgagatcatgagccaggacctgcaggaccttctgccccagctgggcctggtgccctgcgtcgtcgttggccacagcatgggaggaaagacagccatgctgctggcactacagagggacatggccgtgcggcagcacctgctcactaacctggtagaggtagacgggcgcttcgtgtggagggtgaacttggatgccctgacccagcacctagacaagatcttggctttcccacagaggcaggagtcctacctcgggccaacactctttctccttggtggaaactcccagttcgtgcatcccagccaccaccctgagattatgcggctcttccctcgggcccagatgcagacggtgccgaacgctggccactggatccacgctgaccgcccacaggacttcatagctgccatccgaggcttcctggtctaa

SEQ ID NO: 103208 - DNA, 852 bp, Homo sapiens
  Payload ID: 128
  Gene Symbol: ABHD11
  Gene Name: abhydrolase domain containing 11
  ENST ID: ENST00000412965
  CDS Start-End: 1-554
cgcgtgagggactcggcccccacggccctagcttcgcgagggtgcctgtcgcacccagcagcagcagcggcggccgagggggcgccgagccgaggccgcttccgctttcctacaggcttctggacggggaggcagccctcccggccgtcgtctttttgcacgggctcttcggcagcaaaactaacttcaactccatcgccaagatcttggcccagcagacaggccgtagggtgctgacggtggatgctcgtaaccacggtgacagcccccacagcccagacatgagctacgagatcatgagccaggacctgcaggaccttctgccccagctgggcctggtgccctgcgtcgtcgttggccacagcatgggaggaaagacagccatgctgctggcactacagagggtgatacacccaaggtgccccggatggtattgtagaccaggacctgtcaagggaagagtggcacccccagaccgcacaaggaacctcccccaactgctgcacccccacaggacatggccgtgcggcagcacctgctcactaacctggtagaggtagacgggcgcttcgtgtggagggtgaacttggatgccctgacccagcacctagacaagatcttggctttcccacagaggcaggagtcctacctcgggccaacactctttctccttggtggaaactcccagttcgtgcatcccagccaccaccctgagattatgcggctcttccctcgggcccagatgcagacggtgccgaacgctggccactggatccacgctgaccgcccacaggacttcatagctgccatccgaggcttcctggtctaagagttgctggcaagaagatggcc

SEQ ID NO: 103209 - DNA, 1463 bp, Homo sapiens
  Payload ID: 128
  Gene Symbol: ABHD11
  Gene Name: abhydrolase domain containing 11
  Uniprot ID: Q8NFV4
  ENST ID: ENST00000357419
  CDS Start-End: 56-361
gcggggctgcgagctagggcgggagaaggagcgcggggaggacgtaccttgtgagatgcgagccggccaacagcttgcaagcatgctccgctggacccgagcctggaggctcccgcgtgagggactcggcccccacggccctagcttcgcgagggtgcctgtcgcacccagcagcagcagcggcggccgagggggcgccgagccgaggccgcttccgctttcctacaggcttctggacggggaggcagccctcccggccgtcgtctttttgcacgggctcttcggcagcaaaactaacttcaactccatcgccaagatcttggcccagcagacaggccgtgctgacggtggatgctcgtaaccacggtgacagcccccacagcccagacatgagctacgagatcatgagccaggacctgcaggaccttctgccccagctgggcctggtgccctgcgtcgtcgttggccacagcatgggaggaaagacagccatgctgctggcactacagaggccagagctggtggaacgtctcattgctgtagatatcagcccagtggaaagcacaggtgtctcccactttgcaacctatgtggcagccatgagggccatcaacatcgcagatgagctgccccgctcccgtgcccgaaaactggcggatgaacagctcagttctgtcatccaggacatggccgtgcggcagcacctgctcactaacctggtagaggtagacgggcgcttcgtgtggagggtgaacttggatgccctgacccagcacctagacaagatcttggctttcccacagaggcaggagtcctacctcgggccaacactctttctccttggtggaaactcccagttcgtgcatcccagccaccaccctgagattatgcggctcttccctcgggcccagatgcagacggtgccgaacgctggccactggatccacgctgaccgcccacaggacttcatagctgccatccgaggcttcctggtctaagagttgctggcaagaagatggccgggcgtggtggctcatgcctgtaattccagcactttgggaggctaaggcgggaggatgacttgaggccaggagttggagaccagcctggccaacatggtgaaaccctgtctctactaaaaatacaaaaattagcctggcgtggtggtgcacacctgtaatcccagctactctggaggctgaggcaggagaatcacttgaaccctggaggcagaggttgcaatgagccgagatcacaccactacactccagcctaggcaacagagcaagactctgtctcaaaaaaaacaaaacaaaaaggaggcacaaaaccccaggcttcaagtctctgcagcctgctccacatttgggcacagaaggactcagacaggcactgtgtgggcacgaggttttacaggggtggtcagacctcaggctttaatgaataaagacactactcccaaa

SEQ ID NO: 103210 - DNA, 890 bp, Homo sapiens
  Payload ID: 128
  Gene Symbol: ABHD11
  Gene Name: abhydrolase domain containing 11
  ENST ID: ENST00000458339
  CDS Start-End: 27-506
agcgcggggaggacgtaccttgtgagatgcgagccggccaacagcttgcaagcatgctccgctggacccgagcctggaggctcccgcgtgagggactcggcccccacggccctagcttcgcgagggtgcctgtcgcacccagcagcagcagcggcggccgagggggcgccgagccgaggccgcttccgctttcctacaggcttctggacggggaggcagccctcccggccgtcgtctttttgcacgggctcttcggcagcaaaactaacttcaactccatcgccaagatcttggcccagcagacaggccgtagggtgctgacggtggatgctcgtaaccacggtgacagcccccacagcccagacatgagctacgagatcatgagccaggacctgcaggaccttctgccccagctgggcctggtgccctgcgtcgtcgttggccacagcatgggaggaaagacagccatgctgctggcactacagaggtcccagccaccaccctgagattatgcggctcttccctcgggcccagatgcagacggtgccgaacgctggccactggatccacgctgaccgcccacaggacttcatagctgccatccgaggcttcctggtctaagagttgctggcaagaagatggccgggcgtggtggctcatgcctgtaattccagcactttgggaggctaaggcgggaggatgacttgaggccaggagttggagaccagcctggccaacatggtgaaaccctgtctctactaaaaatacaaaaattagcctggcgtggtggtgcacacctgtaatcccagctactctggaggctgaggcaggagaatcacttgaaccctggaggcagaggttgcaatgagccgagatcacaccactacact

SEQ ID NO: 103211 - DNA, 760 bp, Homo sapiens
  Payload ID: 128
  Gene Symbol: ABHD11
  Gene Name: abhydrolase domain containing 11
  ENST ID: ENST00000437891
  CDS Start-End: 1-370
gccgcttccgctttcctacaggcttctggacggggaggcagccctcccggccgtcgtctttttgcacgggctcttcggcagcaaaactaacttcaactccatcgccaagatcttggcccagcagacaggccgtagggtgctgacggtggatgctcgtaaccacggtgacagcccccacagcccagacatgagctacgagatcatgagccaggacctgcaggaccttctgccccagctgggcctggtgccctgcgtcgtcgttggccacagcatgggaggaaagacagccatgctgctggcactacagaggatatcagcccagtggaaagcacaggtgtctcccactttgcaacctatgtggcagccatgagggccatcaacatcgcagatgagctgccccgctcccgtgcccgaaaactggcggatgaacagctcagttctgtcatccaggacatggccgtgcggcagcacctgctcactaacctggtagaggtagacgggcgcttcgtgtggagggtgaacttggatgccctgacccagcacctagacaagatcttggctttcccacagaggcaggagtcctacctcgggccaacactctttctccttggtggaaactcccagttcgtgcatcccagccaccaccctgagattatgcggctcttccctcgggcccagatgcagacggtgccgaacgctggccactggatccacgctgaccgcccacaggacttcatagctgccatccgaggcttcctgg

SEQ ID NO: 103212 - DNA, 1447 bp, Homo sapiens
  Payload ID: 128
  Gene Symbol: ABHD11
  Gene Name: abhydrolase domain containing 11
  Uniprot ID: Q8NFV4
  ENST ID: ENST00000437775
  CDS Start-End: 56-982
gcggggctgcgagctagggcgggagaaggagcgcggggaggacgtaccttgtgagatgcgagccggccaacagcttgcaagcatgctccgctggacccgagcctggaggctcccgcgtgagggactcggcccccacggccctagcttcgcgagggtgcctgtcgcacccagcagcagcagcggcggccgagggggcgccgagccgaggcttctggacggggaggcagccctcccggccgtcgtctttttgcacgggctcttcggcagcaaaactaacttcaactccatcgccaagatcttggcccagcagacaggccgtagggtgctgacggtggatgctcgtaaccacggtgacagcccccacagcccagacatgagctacgagatcatgagccaggacctgcaggaccttctgccccagctgggcctggtgccctgcgtcgtcgttggccacagcatgggaggaaagacagccatgctgctggcactacagaggccagagctggtggaacgtctcattgctgtagatatcagcccagtggaaagcacaggtgtctcccactttgcaacctatgtggcagccatgagggccatcaacatcgcagatgagctgccccgctcccgtgcccgaaaactggcggatgaacagctcagttctgtcatccaggacatggccgtgcggcagcacctgctcactaacctggtagaggtagacgggcgcttcgtgtggagggtgaacttggatgccctgacccagcacctagacaagatcttggctttcccacagaggcaggagtcctacctcgggccaacactctttctccttggtggaaactcccagttcgtgcatcccagccaccaccctgagattatgcggctcttccctcgggcccagatgcagacggtgccgaacgctggccactggatccacgctgaccgcccacaggacttcatagctgccatccgaggcttcctggtctaagagttgctggcaagaagatggccgggcgtggtggctcatgcctgtaattccagcactttgggaggctaaggcgggaggatgacttgaggccaggagttggagaccagcctggccaacatggtgaaaccctgtctctactaaaaatacaaaaattagcctggcgtggtggtgcacacctgtaatcccagctactctggaggctgaggcaggagaatcacttgaaccctggaggcagaggttgcaatgagccgagatcacaccactacactccagcctaggcaacagagcaagactctgtctcaaaaaaaacaaaacaaaaaggaggcacaaaaccccaggcttcaagtctctgcagcctgctccacatttgggcacagaaggactcagacaggcactgtgtgggcacgaggttttacaggggtggtcagacctcaggctttaatgaataaagacactactcccaaa

SEQ ID NO: 103213 - DNA, 623 bp, Homo sapiens
  Payload ID: 128
  Gene Symbol: ABHD11
  Gene Name: abhydrolase domain containing 11
  ENST ID: ENST00000474130
  CDS Start-End: 1-264
ctccgctggacccgagcctggaggctcccgcgtgagggactcggcccccacggccctagcttcgcgagggtgcctgtcgcacccagcagcagcagcggcggccgagggggcgccgagccgaggccgcttccgctttcctacaggcttctggacggggaggcagccctcccggccgtcgtctttttgcacgggctcttcggcagcaaaactaacttcaactccatcgccaagatcttggcccagcagacaggccgtaggggatgaccgggagctcaccacctcttatggcagcccattcttctgtgctcctactgttggaaattcctggagtctccttcctggcattctccgagattgccacccagccaggccagcccttcagagacgtggtcacaaccctggggcctgctcttctctggcagagtggccccaggttcttcatctgggcctcctaggtgctgacggtggatgctcgtaaccacggtgacagcccccacagcccagacatgagctacgagatcatgagccaggacctgcaggaccttctgccccagctgggcctggtgccctgcgtcgtcgttggccacagcatgggaggaaagacagccatgctgctggcacta

SEQ ID NO: 103214 - DNA, 2117 bp, Homo sapiens
  Payload ID: 129
  Gene Symbol: ABHD12
  Gene Name: abhydrolase domain containing 12
  Uniprot ID: Q8N2K0
  ENST ID: ENST00000339157
  CDS Start-End: 274-1470
atgctgggcgcgcgctccttggaactagagaggaggtggccggggcggggccgggggaggggggtagggcagagccggcgggagcccggcgctgattggccggcctggctggcgggcccccgccgctggttcgtagccggcgcagcggcctgggctgggatgtgaggagcggcgggttccgggctccgggctctgggtggcggcggctgtgagcggcggcactgcggcgcaggccagcgggcgccgtcggcggctggccctgtcggccgcgggatgaggaagcggaccgagcccgtcgccttggagcatgagcgctgcgccgccgcgggctcgtcctcctccggctcggccgccgcggcgctggacgccgactgccgcctgaagcagaacctacgcctgacgggcccggcggcggctgagccgcgctgcgcagccgacgcgggaatgaagcgggcgctgggcaggcgaaagggcgtgtggttgcgcctgaggaagatacttttctgtgttttggggttgtacattgccattccatttctcatcaaactatgtcctggaatacaggccaaactgattttcttgaatttcgtaagagttccctatttcattgatttgaaaaaaccacaggatcaaggtttgaatcacacgtgtaactactacctgcagccagaggaagacgtgaccattggagtctggcacaccgtccctgcagtctggtggaagaacgcccaaggcaaagaccagatgtggtatgaggatgccttggcttccagccaccctatcattctgtacctgcatgggaacgcaggtaccagaggaggcgaccaccgcgtggagctttacaaggtgctgagttcccttggttaccatgtggtcacctttgactacagaggttggggtgactcagtgggaacgccatctgagcggggcatgacctatgacgcactccacgtttttgactggatcaaagcaagaagtggtgacaaccccgtgtacatctggggccactctctgggcactggcgtggcgacaaatctggtgcggcgcctctgtgagcgagagacgcctccagatgcccttatattggaatctccattcactaatatccgcgaagaagctaagagccatccattttcagtgatatatcgatacttccctgggtttgactggttcttccttgatcctattacaagtagtggaattaaatttgcaaatgatgaaaacgtgaagcacatctcctgtcccctgctcatcctgcacgctgaggacgacccggtggtgcccttccagcttggcagaaagctctatagcatcgccgcaccagctcgaagcttccgagatttcaaagttcagtttgtgccctttcattcagaccttggctacaggcacaaatacatttacaagagccctgagctgccacggatactgagggaattcctggggaagtcggagcctgagcaccagcactgagcctggccgtgggaaggaagcatgaagacctctgccctcctcccgttttcctccagtcagcagcccggtatcctgaagccccggggggccggcacctgcaatgctcaggagcccagctcgcacctggagagcacctcagatcccaggcggggaggcccctgcaggcctgcagtgcccggaggcctgagcatggctgtgtggaaagcgtgggtggcaggcatgtggctctccttgccgcccctcaacctgagatcttgttgggagacttaatggcagcaggcagccatcactgcctgcttgatgctgcactgagctggacagggggagtccgggcaggggactcttggggctcgggaccatgctgagctttttggcaccacccacagagaacgtggggtccaggttctttctgcaccttcccagcacatgcagaatgactccagtggttccatcgtcccctcctgccctgtgtacctgcttgcctttctcagctgccccacctcccctgggctggcccactcacccacagtggaagtgcccgggatctgcacttcctcccctttcacctacctgtacacctaacctggccttagactgagctttatttaagaataaaatcgtggtggtggtccttttgtctctctgca

SEQ ID NO: 103215 - DNA, 1725 bp, Homo sapiens
  Payload ID: 129
  Gene Symbol: ABHD12
  Gene Name: abhydrolase domain containing 12
  Uniprot ID: Q8N2K0
  ENST ID: ENST00000376542
  CDS Start-End: 281-1495
gccagggatgctgggcgcgcgctccttggaactagagaggaggtggccggggcggggccgggggaggggggtagggcagagccggcgggagcccggcgctgattggccggcctggctggcgggcccccgccgctggttcgtagccggcgcagcggcctgggctgggatgtgaggagcggcgggttccgggctccgggctctgggtggcggcggctgtgagcggcggcactgcggcgcaggccagcgggcgccgtcggcggctggccctgtcggccgcgggatgaggaagcggaccgagcccgtcgccttggagcatgagcgctgcgccgccgcgggctcgtcctcctccggctcggccgccgcggcgctggacgccgactgccgcctgaagcagaacctacgcctgacgggcccggcggcggctgagccgcgctgcgcagccgacgcgggaatgaagcgggcgctgggcaggcgaaagggcgtgtggttgcgcctgaggaagatacttttctgtgttttggggttgtacattgccattccatttctcatcaaactatgtcctggaatacaggccaaactgattttcttgaatttcgtaagagttccctatttcattgatttgaaaaaaccacaggatcaaggtttgaatcacacgtgtaactactacctgcagccagaggaagacgtgaccattggagtctggcacaccgtccctgcagtctggtggaagaacgcccaaggcaaagaccagatgtggtatgaggatgccttggcttccagccaccctatcattctgtacctgcatgggaacgcaggtaccagaggaggcgaccaccgcgtggagctttacaaggtgctgagttcccttggttaccatgtggtcacctttgactacagaggttggggtgactcagtgggaacgccatctgagcggggcatgacctatgacgcactccacgtttttgactggatcaaagcaagaagtggtgacaaccccgtgtacatctggggccactctctgggcactggcgtggcgacaaatctggtgcggcgcctctgtgagcgagagacgcctccagatgcccttatattggaatctccattcactaatatccgcgaagaagctaagagccatccattttcagtgatatatcgatacttccctgggtttgactggttcttccttgatcctattacaagtagtggaattaaatttgcaaatgatgaaaacgtgaagcacatctcctgtcccctgctcatcctgcacgctgaggacgacccggtggtgcccttccagcttggcagaaagctctatagcatcgccgcaccagctcgaagcttccgagatttcaaagttcagtttgtgccctttcattcagaccttggctacaggcacaaatacatttacaagagccctgagctgccacggatactgagacctcagcagggcccaggttccagcccagatcccagcatgtggtcagagctggtgtgactgaagccaacaggtgacacggtcatcgaagagcagcagacaaaactaaaactaacccaaaggcagctgaaagtggagggcaggtgaattcccagccctcgccggattcaacttttgccaacggtgaagaactgccctgagctgcaaaccttacaaagtctgtaactctagataaaccataccatgtgctaactgcactgaaataaaacactaactacattataatgtca

SEQ ID NO: 103216 - DNA, 615 bp, Homo sapiens
  Payload ID: 129
  Gene Symbol: ABHD12
  Gene Name: abhydrolase domain containing 12
  ENST ID: ENST00000450393
  CDS Start-End: 55-615
cgggaggcctgaggaggccgctctttcctgatacgaggttacagctggggtctgatgtcaggtggggggcatggtggggtctgctttctctgctgtattcttctgcaagggcgaaagggcgtgtggttgcgcctgaggaagatacttttctgtgttttggggttgtacattgccattccatttctcatcaaactatgtcctggaatacaggccaaactgattttcttgaatttcgtaagagttccctatttcattgatttgaaaaaaccacaggatcaaggtttgaatcacacgtgtaactactacctgcagccagaggaagacgtgaccattggagtctggcacaccgtccctgcagtctggtggaagaacgcccaaggcaaagaccagatgtggtatgaggatgccttggcttccagccaccctatcattctgtacctgcatgggaacgcaggtaccagaggaggcgaccaccgcgtggagctttacaaggtgctgagttcccttggttaccatgtggtcacctttgactacagaggttggggtgactcagtgggaacgccatctgagcggggcatgacctatgacgcactccacgtttttgactggatcaaa

SEQ ID NO: 103217 - DNA, 620 bp, Homo sapiens
  Payload ID: 129
  Gene Symbol: ABHD12
  Gene Name: abhydrolase domain containing 12
  ENST ID: ENST00000576316
  CDS Start-End: 1-585
gcaagaagtggtgacaaccccgtgtacatctggggccactctctgggcactggcgtggcgacaaatctggtgcggcgcctctgtgagcgagagacgcctccagatgcccttatattggaatctccattcactaatatccgcgaagaagctaagagccatccattttcagtgatatatcgatacttccctgggtttgactggttcttccttgatcctattacaagtagtggaattaaatttgcaaatgatgaaaacgtgaagcacatctcctgtcccctgctcatcctgcacgctgaggacgacccggtggtgcccttccagcttggcagaaaggtgggtcctggcctctgcctctggtgtagctggcatcttgcacactcagccagtgtgggtggaccaggctgggagtgggcaggcgggaaggcagcccctgcatgctgcatcacgggctgcgcaccagccacgtcaggctcaggaggccacctcatcctccctgcgtcacctccaggctgcttcggaaggacatgggaggtctggtgtaaaggttggggcaggggcccactgatgctgtctccaagaatatgaaaaataagcagatagttcccagtcctcacacaggg

SEQ ID NO: 103218 - DNA, 474 bp, Homo sapiens
  Payload ID: 129
  Gene Symbol: ABHD12
  Gene Name: abhydrolase domain containing 12
  ENST ID: ENST00000465694
  CDS Start-End: 1-40
ggaattcctggggaagtcggagcctgagcaccagcactgagcctggccgtgggaaggaagcatgaagacctctgccctcctcccgttttcctccagtcagcagcccggtatcctgaagccccggggggccggcacctgcaatgctcaggagcccagctcgcacctggagagcacctcagatcccagacctcagcagggcccaggttccagcccagatcccagcatgtggtcagagctggtgtgactgaagccaacaggtgacacggtcatcgaagagcagcagacaaaactaaaactaacccaaaggcagctgaaagtggagggcaggtgaattcccagccctcgccggattcaacttttgccaacggtgaagaactgccctgagctgcaaaccttacaaagtctgtaactctagataaaccataccatgtgctaactgcactgaaataaaacactaactacattataatgtca

SEQ ID NO: 103219 - DNA, 814 bp, Homo sapiens
  Payload ID: 129
  Gene Symbol: ABHD12
  Gene Name: abhydrolase domain containing 12
  ENST ID: ENST00000491682
  CDS Start-End: 336-814
gtctcacagaagacggatcgggaggcctgaggaggccgctctttcctgatacgaggcgaaagggcgtgtggttgcgcctgaggaagatacttttctgtgttttggggttgtacattgccattccatttctcatcaaactatgtcctggaatacaggccaaactgattttcttgaatttcgtaagagttccctatttcattgatttgaaaaaaccacaggatcaaggtttgaatcacacgtgtaactactacctgcagccagaggaagacgtgaccattggagtctggcacaccgtccctgcagtctggtggaagaacgcccaaggcaaagaccagatgtggtatgaggatgccttggcttccagccaccctatcattctgtacctgcatgggaacgcaggtaccagaggaggcgaccaccgcgtggagctttacaaggtgctgagttcccttggttaccatgtggtcacctttgactacagaggttggggtgactcagtgggaacgccatctgagcggggcatgacctatgacgcactccacgtttttgactggatcaaagcaagaagtggtgacaaccccgtgtacatctggggccactctctgggcactggcgtggcgacaaatctggtgcggcgcctctgtgagcgagagacgcctccagatgcccttatattggaatctccattcactaatatccgcgaagaagctaagagccatccattttcagtgatatatcgatacttccctgggtttgactggttcttccttgatcctattacaagtagtggaattaaatttgcaaatgatgaaaa

SEQ ID NO: 103220 - DNA, 712 bp, Homo sapiens
  Payload ID: 129
  Gene Symbol: ABHD12
  Gene Name: abhydrolase domain containing 12
  ENST ID: ENST00000461204
  CDS Start-End: 51-407
gcggcgcaggccagcgggcgccgtcggcggctggccctgtcggccgcgggatgaggaagcggaccgagcccgtcgccttggagcatgagcgctgcgccgccgcgggctcgtcctcctccggctcggccgccgcggcgctggacgccgactgccgcctgaagcagaacctacgcctgacgggcccggcggcggctgagccgcgctgcgcagccgacgcgggaatgaagcgggcgctgggcaggcgaaagggcgtgtggttgcgcctgaggaagatacttttctgtgttttggggttgtacattgccattccatttctcatcaaactatgtcctggaatacaggccaaactgattttcttgaatttcggtccctgtgccccttcccagctggaggactttctgtgctagtgttgctccccagcactggatttctgtccacagaagactacactgccctgggggaccagcgtatctgtcttcagctgagtaagagttccctatttcattgatttgaaaaaaccacaggatcaaggtttgaatcacacgtgtaactactacctgcagccagaggaagacgtgaccattggagtctggcacaccgtccctgcagtctggtggaagaacgcccaaggcaaagaccagatgtggtatgaggatgccttggcttccagccaccctatcattctgtacctgcatgggaacgcaggtaccag

SEQ ID NO: 103221 - DNA, 805 bp, Homo sapiens
  Payload ID: 129
  Gene Symbol: ABHD12
  Gene Name: abhydrolase domain containing 12
  ENST ID: ENST00000471287
  CDS Start-End: 490-805
gagtccttggaagatccctggacgccaggcacagcagaggcgggaggcagaggggccggcgccagaccctgagagcgctggggcccactcggacctcctcctcctgctctgcatcaggccccacaccgagcgcccgggcgggcgcccctcgggctgggctgcgtgcgcggagccttactggcgccttgggccctcggcggctctccccggcgaaagggcgtgtggttgcgcctgaggaagatacttttctgtgttttggggttgtacattgccattccatttctcatcaaactatgtcctggaatacaggccaaactgattttcttgaatttcgtaagagttccctatttcattgatttgaaaaaaccacaggatcaaggtttgaatcacacgtgtaactactacctgcagccagaggaagacgtgaccattggagtctggcacaccgtccctgcagtctggtggaagaacgcccaaggcaaagaccagatgtggtatgaggatgccttggcttccagccaccctatcattctgtacctgcatgggaacgcaggtaccagaggaggcgaccaccgcgtggagctttacaaggtgctgagttcccttggttaccatgtggtcacctttgactacagaggttggggtgactcagtgggaacgccatctgagcggggcatgacctatgacgcactccacgtttttgactggatcaaagcaagaagtggtgacaaccccgtgtacatctggggccactctctgggcactggcgtggcgacaaatctggtgcggcgcctctgtgagcgag

SEQ ID NO: 103222 - DNA, 1708 bp, Homo sapiens
  Payload ID: 130
  Gene Symbol: ABHD12B
  Gene Name: abhydrolase domain containing 12B
  Uniprot ID: Q7Z5M8
  ENST ID: ENST00000337334
  CDS Start-End: 16-1104
gggacacggcgcgggatggacgcgcaggactgccaggcggccgcatcgcccgagccgcccgggcccccagcccgtagctgcgtggccgcctggtgggacatggtcgaccgcaacctgcgatattttccacactcctgttcaatgctcggaagaaaaattgctgctctgtatgacagctttactagtaaatccttaaaagaacacgttttccttcctctgatagacatgctaatttattttaattttttcaaagccccatttcttgtggatttaaagaaaccagagttaaagattcctcacacagtgaacttctacctgagagttgaacctggggtgatgctagggatctggcacacagtccccagctgccggggggaagatgccaaggggaaggactgttgctggtatgaagcagcccttcgtgatgggaacccaattattgtttatcttcatggcagtgcagaacacagggcagcttcgcacagactgaagctggtaaaggtgctgagtgatggtggctttcatgtcttgtctgttgactacagaggatttggggactctacaggtaagcccacagaggagggactgactacggatgccatttgtgtctatgagtggaccaaggcaagaagtggcatcactcccgtgtgtctctggggccactctctgggtacaggagttgcaacaaatgctgcaaaagtgctagaagaaaaaggatgcccagttgatgctattgtcttggaagctccatttaccaacatgtgggttgcaagtatcaattatcccttgttaaagatttaccggaacattccaggatttttacgtacacttatggatgccctgagaaaagacaaaataatctttcctaatgatgaaaatgttaaattcctttcttctcctcttctcatcttacatggagaggatgacaggacagtgcctttggagtatgggaaaaagctctatgaaattgcacgcaatgcatacaggaacaaagagagggtcaagatggttatctttcctcctggcttccaacacaacctgctttgtaaaagccccacactgttaataaccgtgagagatttcctgagcaagcagtggtcatgagtctgggaggagtggaaatcttcaatgaagacttggcccaaacaccacctgtgatgtatattgttctaatgtaaaattgtactgggctggtcggatgagctgaggccattgacttctctacaaatcacttgccattttaacaacagaaagtacgaatgttaggcagtatggaatgttcttatttagcttatcataatctactttgtaaaacatgctgaaacctcactgtggagaaccagaatttggtaaaatctagatcctatctaaaaatatgtagttattaaacattctgtggatatttgtgaataaggtagttgctatggtccgaatatctgggcctgcccccccaaattatgctgaaacctaatcaccagtgtgatggtaataggaggtgggactgagctctgatgaatgagattagtgcccttataaattatgaccaaaagagctcttcactcctcctaccatttgaggatacagtgagaagccttcatctatgaaccacaaagtagccctcatcagacactgaatcagccagtgccttgctcttggacttcccagcccccagaactgtgagaaataaatttctgttgtttataagcta

SEQ ID NO: 103223 - DNA, 1477 bp, Homo sapiens
  Payload ID: 130
  Gene Symbol: ABHD12B
  Gene Name: abhydrolase domain containing 12B
  Uniprot ID: Q7Z5M8
  ENST ID: ENST00000353130
  CDS Start-End: 16-873
gggacacggcgcgggatggacgcgcaggactgccaggcggccgcatcgcccgagccgcccgggcccccagcccgtagctgcgtggccgcctggtgggacatggtcgaccgcaacctgcggcacacagtccccagctgccggggggaagatgccaaggggaaggactgttgctggtatgaagcagcccttcgtgatgggaacccaattattgtttatcttcatggcagtgcagaacacagggcagcttcgcacagactgaagctggtaaaggtgctgagtgatggtggctttcatgtcttgtctgttgactacagaggatttggggactctacaggtaagcccacagaggagggactgactacggatgccatttgtgtctatgagtggaccaaggcaagaagtggcatcactcccgtgtgtctctggggccactctctgggtacaggagttgcaacaaatgctgcaaaagtgctagaagaaaaaggatgcccagttgatgctattgtcttggaagctccatttaccaacatgtgggttgcaagtatcaattatcccttgttaaagatttaccggaacattccaggatttttacgtacacttatggatgccctgagaaaagacaaaataatctttcctaatgatgaaaatgttaaattcctttcttctcctcttctcatcttacatggagaggatgacaggacagtgcctttggagtatgggaaaaagctctatgaaattgcacgcaatgcatacaggaacaaagagagggtcaagatggttatctttcctcctggcttccaacacaacctgctttgtaaaagccccacactgttaataaccgtgagagatttcctgagcaagcagtggtcatgagtctgggaggagtggaaatcttcaatgaagacttggcccaaacaccacctgtgatgtatattgttctaatgtaaaattgtactgggctggtcggatgagctgaggccattgacttctctacaaatcacttgccattttaacaacagaaagtacgaatgttaggcagtatggaatgttcttatttagcttatcataatctactttgtaaaacatgctgaaacctcactgtggagaaccagaatttggtaaaatctagatcctatctaaaaatatgtagttattaaacattctgtggatatttgtgaataaggtagttgctatggtccgaatatctgggcctgcccccccaaattatgctgaaacctaatcaccagtgtgatggtaataggaggtgggactgagctctgatgaatgagattagtgcccttataaattatgaccaaaagagctcttcactcctcctaccatttgaggatacagtgagaagccttcatctatgaaccacaaagtagccctcatcagacactgaatcagccagtgccttgctcttggacttcccagcccccagaactgtgagaaataaatttctgttgtttataagcta

SEQ ID NO: 103224 - DNA, 1580 bp, Homo sapiens
  Payload ID: 130
  Gene Symbol: ABHD12B
  Gene Name: abhydrolase domain containing 12B
  Uniprot ID: Q7Z5M8
  ENST ID: ENST00000382029
  CDS Start-End: 16-198
gggacacggcgcgggatggacgcgcaggactgccaggcggccgcatcgcccgagccgcccgggcccccagcccgtagctgcgtggccgcctggtgggacatggtcgaccgcaacctgcgtcaaagccccatttcttgtggatttaaagaaaccagagttaaagattcctcacacagtgaacttctacctgagagttgaacctggggtgatgctagggatctggcacacagtccccagctgccggggggaagatgccaaggggaaggactgttgctggtatgaagcagcccttcgtgatgggaacccaattattgtttatcttcatggcagtgcagaacacagggcagcttcgcacagactgaagctggtaaaggtgctgagtgatggtggctttcatgtcttgtctgttgactacagaggatttggggactctacaggtaagcccacagaggagggactgactacggatgccatttgtgtctatgagtggaccaaggcaagaagtggcatcactcccgtgtgtctctggggccactctctgggtacaggagttgcaacaaatgctgcaaaagtgctagaagaaaaaggatgcccagttgatgctattgtcttggaagctccatttaccaacatgtgggttgcaagtatcaattatcccttgttaaagatttaccggaacattccaggatttttacgtacacttatggatgccctgagaaaagacaaaataatctttcctaatgatgaaaatgttaaattcctttcttctcctcttctcatcttacatggagaggatgacaggacagtgcctttggagtatgggaaaaagctctatgaaattgcacgcaatgcatacaggaacaaagagagggtcaagatggttatctttcctcctggcttccaacacaacctgctttgtaaaagccccacactgttaataaccgtgagagatttcctgagcaagcagtggtcatgagtctgggaggagtggaaatcttcaatgaagacttggcccaaacaccacctgtgatgtatattgttctaatgtaaaattgtactgggctggtcggatgagctgaggccattgacttctctacaaatcacttgccattttaacaacagaaagtacgaatgttaggcagtatggaatgttcttatttagcttatcataatctactttgtaaaacatgctgaaacctcactgtggagaaccagaatttggtaaaatctagatcctatctaaaaatatgtagttattaaacattctgtggatatttgtgaataaggtagttgctatggtccgaatatctgggcctgcccccccaaattatgctgaaacctaatcaccagtgtgatggtaataggaggtgggactgagctctgatgaatgagattagtgcccttataaattatgaccaaaagagctcttcactcctcctaccatttgaggatacagtgagaagccttcatctatgaaccacaaagtagccctcatcagacactgaatcagccagtgccttgctcttggacttcccagcccccagaactgtgagaaataaatttctgttgtttataagcta

SEQ ID NO: 103225 - DNA, 1404 bp, Homo sapiens
  Payload ID: 130
  Gene Symbol: ABHD12B
  Gene Name: abhydrolase domain containing 12B
  Uniprot ID: Q7Z5M8
  ENST ID: ENST00000557345
  CDS Start-End: 16-198
gggacacggcgcgggatggacgcgcaggactgccaggcggccgcatcgcccgagccgcccgggcccccagcccgtagctgcgtggccgcctggtgggacatggtcgaccgcaacctgcgtcaaagccccatttcttgtggatttaaagaaaccagagttaaagattcctcacacagtgaacttctacctgagagttgaacctggggtgatgctagggatctggcacacagtccccagctgccggggggaagatgccaaggggaaggactgttgctggtatgaagcagcccttcgtgatgggaacccaattattgtttatcttcatggcagtgcagaacacagggcagcttcgcacagactgaagctggtaaagagttgcaacaaatgctgcaaaagtgctagaagaaaaaggatgcccagttgatgctattgtcttggaagctccatttaccaacatgtgggttgcaagtatcaattatcccttgttaaagatttaccggaacattccaggatttttacgtacacttatggatgccctgagaaaagacaaaataatctttcctaatgatgaaaatgttaaattcctttcttctcctcttctcatcttacatggagaggatgacaggacagtgcctttggagtatgggaaaaagctctatgaaattgcacgcaatgcatacaggaacaaagagagggtcaagatggttatctttcctcctggcttccaacacaacctgctttgtaaaagccccacactgttaataaccgtgagagatttcctgagcaagcagtggtcatgagtctgggaggagtggaaatcttcaatgaagacttggcccaaacaccacctgtgatgtatattgttctaatgtaaaattgtactgggctggtcggatgagctgaggccattgacttctctacaaatcacttgccattttaacaacagaaagtacgaatgttaggcagtatggaatgttcttatttagcttatcataatctactttgtaaaacatgctgaaacctcactgtggagaaccagaatttggtaaaatctagatcctatctaaaaatatgtagttattaaacattctgtggatatttgtgaataaggtagttgctatggtccgaatatctgggcctgcccccccaaattatgctgaaacctaatcaccagtgtgatggtaataggaggtgggactgagctctgatgaatgagattagtgcccttataaattatgaccaaaagagctcttcactcctcctaccatttgaggatacagtgagaagccttcatctatgaaccacaaagtagccctcatcagacactgaatcagccagtgccttgctcttggacttcccagcccccagaactgtgagaaataaatttctgttgtttataagcta

SEQ ID NO: 103226 - DNA, 5338 bp, Homo sapiens
  Payload ID: 131
  Gene Symbol: ABHD13
  Gene Name: abhydrolase domain containing 13
  Uniprot ID: Q7L211
  ENST ID: ENST00000375898
  CDS Start-End: 302-1315
gcgcatgctcggaagagcgggcagggttcccactccgggagcggagacggagaacaggttatgtgggagccggcgggggcatttgccggcgacacccgagcgggggccggaagtggggccacagctcgcagcaggagctccgggctagaccgtggcgccggcagcggcccctgggctggaggaggatgatgaggagcgacggaagcgacgcgggggtacgctgctgcgcggcgcccggtttcgtgcccgcggccgactgcgcagcctgtccgcgagtctgagatacttacagagagctacaatggaaaagtcctggatgctgtggaactttgttgaaagatggctaatagccttggcttcatggtcttgggctctctgccgtatttctcttttacctttaatagtgacttttcatctgtatggaggcattatcttacttttgttaatattcatatcaatagcaggtattctgtataaattccaggatgtattgctttattttccagaacagccatcctcttcacgtctttatgttcccatgcccactggcattccacatgaaaacattttcatcagaaccaaagatggaatacgtctgaatcttattttgatacgatacactggagacaattcaccctattccccaactataatttattttcatgggaatgcaggcaacataggtcacaggttgccaaatgcattacttatgttggttaacctcaaagttaaccttttgctggttgattatcgaggatatggaaaaagtgaaggagaagcaagtgaagaaggactctacttagattctgaagctgtgttagactacgtgatgactagacctgaccttgataaaacaaaaatttttctttttggccgttccttgggtggagcagtggctattcatttggcttctgaaaattcacataggatttcagccattatggtggagaacacatttttaagcataccacatatggccagcactttattttcattctttccgatgcgttaccttcctttatggtgctacaaaaataaatttttgtcctacagaaaaatctctcagtgtagaatgccttcacttttcatctctggactctcagatcaattaattccaccagtaatgatgaaacaactttatgaactctccccatctcggactaagagattagccatttttccagatgggactcacaatgacacatggcagtgccaaggctatttcactgcacttgaacagttcatcaaagaagtcgtaaagagccattctcctgaagaaatggcaaaaacttcatctaatgtaacaattatataatgtttccctttttgattattgcattgtattttaatttgtgcagaatgataaagaatgttccttttagaagtgtgttatgtctgtacctgtctgaagagtgacattaaactttgaaaggacttcactgctcctttacgatattccaaatagttttttacattggaaaaactaattcttgggattctttcatacattttcatcaaaactttcagtgtgattatgtattcatatcttcagtttaatatgtcagtataatagatattgttcaaaagtttcttgttgctaaagtggtgtaatctgttacacagatgaatagctagatgtggaaagagatatgtaaacaagaaacctttgggtattgtttcttaagtaaatattgggacaatcatggtaagcaaacttagttctgtaactgcatttttcaccttaaaagttaaatgaaatgcatgatggtattttattccttgaattatgcaatgcaacattttacatgtaaatagcactggtcatatactgatgtatatggttatctgggttatatctatttttatgtaaactctattttgtttttggcaagaagtgaaattgagacttatgtgcaggttgccattgaattttgctctggtgaatgctgagatccagctttttcttacaaataaatgggaccctgttttccaatacaaatgtaccgtgtttttgttaggtacagtctggatcatggcatgtagaaatagaaatttagaattttactgcagctttgatgtgcatatttgaactttttaacatttgtaactttggtggcaaagagaattttagcttctatcgattttgtaagtcttcagctgaaccactaatagcagtcatagtgaagattagcactacttagaattaaattaggaagtcttttatcattgcaggattgtacatactactttataaaaattctcacctttgattttaaatcccagtacctagttatatctaacctatcaaaggcaagatatcatttattggacttcttgaaaataaaagttacaaaatccaacaacaacaacaacaaaacaatgttcttggttttaatgttccagttgctgtgaaatagaactcctacaatcaaaagacagttttaggaagtcttatttattgattttaaaagttttacatgtaggagtgtgggaatgaaggaattctggagctttttgacacaaaacctattaccacatttagcagttaaatggctataggtgggaagtaggatttagatgtatagaaaagtaagaaaatcttacttagaaaaaagccccttgaaacttgcaggatttacttaataaaaatacacgctatgagtcataattgtgccaagttgtttcatgcagtcctcaaaaattagatgtaattgagctttgtgtaatattatgtcagctttaacatataatattttgaatattttagctatatttagtggctttctgcaagcaactagaacagagaagtaatgggtcaataatcttgaccttaatttaaaactttcaatggagatagggctagaaatacttttgccaaatagcattcttattcactttatgccggtatttagaaaaaataaattatagcaagtatgatttctaagaatgtttttctataaattactaattgtaaaaagtcttgctttttaaaacaagttggtaatgcatatcatggaaggcatattttgtatgtataaattcaccacaattaaagattattcttgtcagtccttgctatgtagaatgactattctaaatattaatgtattaaaaagaaaatacaacaaaatgtatatttagacacgagcttacatggcataccttatatttgtatcattctttaaagtttacaaaaaaaaaccttatgtttttatgtaatcagtcattacactagggagaaatttatcagctttagttctaaatatgctcatgaggtataaaagctatttcttcatcagtattttgcttttatgctgctttttctttttgatactccaggtttataaactatcttttaaaattttaagccaggacttcaaaaattgtagagtacttgtttggcgttccctaccttcattctcttagggttaaggagcctttctttctgcagctaagggcagaggctgtgcctagggctataccaccactagcatctgtatttgagactgtttccttagatgggtaagaggtggaaaacaaacttagtatcaggggtccatgaagcccatggcatcatttttgaaaatatttctagttttgtagccaaagcaattggttttagtaaaatgagacttcttcaggagtcactcctttactgtggacccattgcttagtgggaatggaagtatatgtatctatcttgtgtattaacttctgacttatttatacaagagcagctataggagtttacaaaagaactttaagttattaagttactataaatttggggatcctagagtgatcttaaatatggcaagatacagctcatttagaataaaatctcacatccattattttaaagggaatgattggggggaaaaactggtgaaaaagaaatataaaaaggaccctaaaaagaattctgcaaaataagagaagaaataatttgtgacaggtaatagaatactagtaggatagaaacaactagaaaggaaagtgtgacacagtttttaaatttagatgtagaaaataatgaattaatgagattggtgaaaggaaatcatgcaaaacatttgaatgcaaagcatttctaacaaaaagtgactggagcacttgccattgcaacaaccctgtttttgcaattaggtttttgactgttaaaatggatattttcataaaaatggtgttctgaattttgctacagggctgcttaaatttatgattacctgtagacacttgatatttacatagattacagctttggtaatatgtcactggagtaattacgctgtaatacctgttgagaattcataccatctgatgcttatatattaatttcttatgtttgtaagtttggctttgtgggaataggtgtggagaaattaaagagtgaaggccatatttcattttttataaattatctttcaagctcagatagcttaagagcagtttatattaaggagacccttttctccttgaggatagggataggtaaggtaaacttgtaaaaaggatgtcacagaagtcactttttaattaagtcatgattgagatactgaactcttccactcattcttctttcccattttcctattatgtttgataattatatgtatttttaaaaactgtgagaggaaaaattagtcataacccttttgggttatccacttaaatttaggtattttcatattactcaggtaaagatggaaatgacagagcacagacatttattttttaaattgatagggtagaaaatgaaatgtacttctgtttattcttaatactatatatatatatacacacatagttttagcaaattggaaataatatattcatttgtatggcaagataaatgcagtcatcttaatactagtctatacatttttgccaaatggcgcaaatatacctccatttatattttgtatcttaaaatgtagtttaaaaataggaccatgtatgagacacttttttacaaaaagtgccgtatatacatatgtaacaggtgagtgtgtgtttaacataatttataattatttctgtcagtacagcgtatatggaaaattcaagttgtttttaacatattcaagtatgttcagtataaaataagttaatcccatttcataatgtaaatcatatttttgttatttgccatattttatttgaagtgataaaattttataactcaaatttgaatgtcatagtacattgtgtgctaaccatggcaagcaaacatttacatttgttttttacaataaatttcttttaaaatatactttctatttttctgtactgacatatgcaataaattggtacattaaaaatttgattaatgtcttca

SEQ ID NO: 103227 - DNA, 1062 bp, Homo sapiens
  Payload ID: 132
  Gene Symbol: ABHD14A
  Gene Name: abhydrolase domain containing 14A
  Uniprot ID: Q9BUJ0
  ENST ID: ENST00000273596
  CDS Start-End: 69-884
gcgcgccgagatggccgcgctcctggccgcctagagccggagcggcccgcggagctgcggaggcagccatggtcggggcgctgtgcggctgctggttccgcctgggcggggcccgcccgctcatcccgttgggcccgactgtggtacagacctccatgagccggtcccaggtagccctgctgggcctgagtctgctgctcatgctcctactgtatgtggggctgccaggcccccctgagcagacttcctgcctctggggagaccccaatgtcacagtcctggctggtctcacccctggcaactcgcccatcttttaccgcgaggtgctcccactcaaccaggcacacagggtggaggtggtgctgcttcatggaaaggcctttaactctcacacgtgggagcagctgggcacactgcagctactgtcacagaggggctaccgggccgtggcccttgaccttccaggttttgggaactcggcaccttcaaaggaggcaagcacagaggcagggcgggcagcgctgctggagcgggcgctgcgggacctggaggtacagaatgccgtgttggtgagcccctcgctgagtggccactatgccctgcccttcctgatgcgaggccaccaccagctacatggatttgtgcccatcgcacccacctccacccagaactacacccaggagcaattctgggctgtgaagactccaacccttatcctgtatggagagctggaccacatcctggctcgagagtcactgcggcagctccgccacctgcccaaccactctgtggtgaagctacgcaatgcaggccatgcctgttacctccacaagccgcaagacttccaccttgtcctgcttgccttccttgaccatctaccttgaactaacccactcccagctcccagcctggcatgagcttggacagtctggaccgccaccctccctgaaccagggagacagcctctgggattggaggccagaggccagggtcagacccagccaggactcctcatttcatctcacagacacaataaaaaagcatatttgtcctgcctgggaa

SEQ ID NO: 103228 - DNA, 1113 bp, Homo sapiens
  Payload ID: 132
  Gene Symbol: ABHD14A
  Gene Name: abhydrolase domain containing 14A
  ENST ID: ENST00000458031
  CDS Start-End: 243-932
ctcggtaactgggttgcaggcccgcggctgcggagtgcgcaggcgcgccgagatggccgcgctcctggccgcctagagccggagcggcccgcggagctgcggaggcagccatggtcggggcgctgtgcggctgctggttccgcctgggcggggcccgcccgctcatcccgttgggcccgactgtggtacagacctccatgagccggtcccaggtagccctgctgggcctgagtctgctgctcatgctcctactgtatgtggggctgccaggcccccctgagcagacttcctgcctctggggagaccccaatgtcacagtcctggctggtctcacccctggcaactcgcccatcttttaccgcgaggtgctcccactcaaccaggcacacagggtggaggtggtgctgcttcatggaaaggcctttaactctcacacgtgggagcagctgggcacactgcagctactgtcacagaggggctaccgggccgtggcccttgaccttccagtcccgggttcaagcaattctcctgcctccgcttccccagtagctgagattacagaaaatagcttctgggcagttttagtgcgggacctggaggtacagaatgccgtgttggtgagcccctcgctgagtggccactatgccctgcccttcctgatgcgaggccaccaccagctacatggatttgtgcccatcgcacccacctccacccagaactacacccaggagcaattctgggctgtgaagactccaacccttatcctgtatggagagctggaccacatcctggctcgagagtcactgcggcagctccgccacctgcccaaccactctgtggtgaagctacgcaatgcaggccatgcctgttacctccacaagccgcaagacttccaccttgtcctgcttgccttccttgaccatctaccttgaactaacccactcccagctcccagcctggcatgagcttggacagtctggaccgccaccctccctgaaccagggagacagcctctgggattggaggccagaggccagggtcagacccagccaggactcctcatttcatctcacagacacaataaaaaagcatatttgtcctgcctgggaagtg

SEQ ID NO: 103229 - DNA, 802 bp, Homo sapiens
  Payload ID: 132
  Gene Symbol: ABHD14A
  Gene Name: abhydrolase domain containing 14A
  ENST ID: ENST00000497864
  CDS Start-End: 129-802
ccaaaccctgcccagaagcctgccccttaagtacctggcaggtcaatggccacagcccggtagccagcctgggccagcctgtgcagtgtacccaggttctgccaggtctcggaggagaagcgaataccatgcagcagcagtacagagaagcgagcctgcccactgccgggcagggcctctcggaagaagagggcctggccctgcacctggatggtgccctcgcgctgctccacgcttgctgccatgcctgctgctgctgtgctggtgaagggcctgtggttcaaaaccacgatgatgaggggccacagaacaccctgcccagggtggcagtcccagaggagcagcaaggaagcctccaggaggtttccagaactttaagaacatgccttgggactgtggtacagacctccatgagccggtcccaggtagccctgctgggcctgagtctgctgctcatgctcctactgtatgtggggctgccaggcccccctgagcagacttcctgcctctggggagaccccaatgtcacagtcctggctggtctcacccctggcaactcgcccatcttttaccgcgaggtgctcccactcaaccaggcacacagggtggaggtggtgctgcttcatggaaaggcctttaactctcacacgtgggagcagctgggcacactgcagctactgtcacagaggggctaccgggccgtggcccttgaccttccaggttttgggaactcggcaccttcaaaggaggcaagcacagaggcagggcgggcagcgctgctggagcgggcgctgcgggacct

SEQ ID NO: 103230 - DNA, 674 bp, Homo sapiens
  Payload ID: 132
  Gene Symbol: ABHD14A
  Gene Name: abhydrolase domain containing 14A
  ENST ID: ENST00000491470
  CDS Start-End: 34-408
gccggagcggcccgcggagctgcggaggcagccatggtcggggcgctgtgcggctgctggttccgcctgggcggggcccgcccgctcatcccgttgggcccgactgtggtacagacctccatgagccggtcccaggtagccctgctgggcctgagtctgctgctcatgctcctactgtatgtggggctgccaggcccccctgagcagacttcctgcctctggggagaccccaatgtcacagtcctggctggtctcacccctggcaactcgcccatcttttaccgcgaggtgctcccactcaaccaggcacacagactccaacccttatcctgtatggagagctggaccacatcctggctcgagagtcactgcggcagctccgccacctgcccaaccactctgtggtgaagctacgcaatgcaggccatgcctgttacctccacaagccgcaagacttccaccttgtcctgcttgccttccttgaccatctaccttgaactaacccactcccagctcccagcctggcatgagcttggacagtctggaccgccaccctccctgaaccagggagacagcctctgggattggaggccagaggccagggtcagacccagccaggactcctcatttcatctcacagacacaataaaaaagcatatttgtcctgcctggga

SEQ ID NO: 103231 - DNA, 626 bp, Homo sapiens
  Payload ID: 132
  Gene Symbol: ABHD14A
  Gene Name: abhydrolase domain containing 14A
  ENST ID: ENST00000494478
  CDS Start-End: 169-626
ttttctagaggcggaaaccgaagcgcccagtgggaaaggcgacccgccggggatgcggggtgctcaacgcgctgccacctggggcccaacgcgttgacctcgcggtcaggttgcttccgcggactacggttctggctcgctagctctggaagggagcaccgggagggaatggtggcaactcccaaggaggggacccagggatccgagaaaggaagacttgggactgtggtacagacctccatgagccggtcccaggtagccctgctgggcctgagtctgctgctcatgctcctactgtatgtggggctgccaggcccccctgagcagacttcctgcctctggggagaccccaatgtcacagtcctggctggtctcacccctggcaactcgcccatcttttaccgcgaggtgctcccactcaaccaggcacacagggtggaggtggtgctgcttcatggaaaggcctttaactctcacacgtgggagcagctgggcacactgcagctactgtcacagaggggctaccgggccgtggcccttgaccttccaggttttgggaactcggcaccttcaaaggaggcaagcacagaggcagggcgggcagcgctgctggagcgggcgctgcg

SEQ ID NO: 103232 - DNA, 2236 bp, Homo sapiens
  Payload ID: 133
  Gene Symbol: ABHD14B
  Gene Name: abhydrolase domain containing 14B
  ENST ID: ENST00000315877
  CDS Start-End: 695-1321
ctactcatggcgcctgccctggttggcgatgtgttaccaacgtctggcctgtcccagcccaaggctccgcgtggcgaccaggcccagcactgggaggctgtgcagagcgtggcgtttactgcttattgctactctgcagaggttggcaacatctgacccgctctactggcaggaaacaggctcgggggcattgggaaaacgatcaaggccacttggctggacactggcggagcctcgcactcaaacctgtcgggcctcaactccgtgccaggccaacaagttgccctgggcagttcaagctggggataagggggatggggagcaggaagacagcagcaaggatgcgatcccgaaggaactttcctcctcagactgctccatgtccatgtggggcaggtcgctgaagagttcgaaaccgtgctcagcaccgcgtttggggcatgtgagaccgagaggctttgggaaactgacgccgctgtgagaacgagtttagcggagtctatggacgctgcgagcttgtggccacaagagggcgccccggagcacggcccagtccccgcccccgctggatggggcccggcctcttcccagcgttcctcctccggccccaggtcaccgccagcacgcgcctgcttcccgtctgcgcgagtccacgcagctccccaggcccttcaccagcacagcagcagcaggcatggcagcaagcgtggagcagcgcgagggcaccatccaggtgcagggccaggccctcttcttccgagaggccctgcccggcagtgggcaggctcgcttctctgtactgctgctgcatggtattcgcttctcctccgagacctggcagaacctgggtacactgcacaggctggcccaggctggctaccgggctgtggccattgacctgccagggctcaagggcgagcctcctgcccaggagcctctcttgtcccaatccagggccagcttcctggcggctgtggtggatgccttggagctgggccccccggttgtgatcagtccatcactgagtggcatgtactccctgcccttcctcacggcccctggctcccagctcccgggctttgtgccagtggcccccatctgcactgacaaaatcaatgctgccaactatgccagtgtgaagactccagctctgattgtatatggagaccaggaccccatgggtcagaccagctttgagcacctgaagcagctgcccaaccaccgggtgctgatcatgaagggggcggggcacccctgttacctggacaaaccagaggagtggcatacagggctgctggacttcctgcaggggctccagtgaagcccagcactgctgcagggggtgggctgcctgcctgctctgagctctctcttgcacgctctctcttctctcccaggctctggctcatgcacatgcaacaggtgcgtctgtctatatgtctgggttcttgtcttttgtggtctgtttgtcttttctacctctttctcttgcagtgatagactgagggggtaaaatcaagagaaaaaactctcaggaatcaaggaacataatcctgtggagggtaatccattacatgagcttctcctgttcttccactttcctgcctggctttcactccttcccctgctctgcccagcctttccctcccacccactcctccttctgcaaatgccctgaaggccagcccttaccccaacacccacttccccacctccttaggccccagatacatacatgcccacatgcacgcttacatgtttagagccatccttgtttccaaatatgacccttcgcttgagggcaactgcataggtacatctaactctggactggcatgcacattgtcatgtgcagctttgcatatacacacatgcatacatgagcctccacacaagcacttgcacacatgtggactcctaaccatgctaacctcactggctgggaaggtggggaccccatgggccagcccttgcaggaggcccttttgcaaggcttagggtgtggccagccctgaaagctacttggacacaggtttcagctggccccagcccagaagtgacccccagaaagggagggccaccgctttgccccctgcttttacccttccttctgggtgctctacacctcaggttaccaggcctgaggcatctcagccaagcttgtttcctgctctgaggcttgtggggtgggagccagagtggaggtcggtgaaataaagtgatgcaattagacccc

SEQ ID NO: 103233 - DNA, 1636 bp, Homo sapiens
  Payload ID: 133
  Gene Symbol: ABHD14B
  Gene Name: abhydrolase domain containing 14B
  Uniprot ID: Q96IU4
  ENST ID: ENST00000361143
  CDS Start-End: 131-763
gctggatggggcccggcctcttcccagcgttcctcctccggccccaggtcaccgccagcacgcgcctgcttcccgtctgcgcgagtccacgcagctccccaggcccttcaccagcacagcagcagcaggcatggcagcaagcgtggagcagcgcgagggcaccatccaggtgcagggccaggccctcttcttccgagaggccctgcccggcagtgggcaggctcgcttctctgtactgctgctgcatggtattcgcttctcctccgagacctggcagaacctgggtacactgcacaggctggcccaggctggctaccgggctgtggccattgacctgccaggtctggggcactccaaggaagcagcagcccctgcccctattggggagctggcccctggcagcttcctggcggctgtggtggatgccttggagctgggccccccggttgtgatcagtccatcactgagtggcatgtactccctgcccttcctcacggcccctggctcccagctcccgggctttgtgccagtggcccccatctgcactgacaaaatcaatgctgccaactatgccagtgtgaagactccagctctgattgtatatggagaccaggaccccatgggtcagaccagctttgagcacctgaagcagctgcccaaccaccgggtgctgatcatgaagggggcggggcacccctgttacctggacaaaccagaggagtggcatacagggctgctggacttcctgcaggggctccagtgaagcccagcactgctgcagggggtgggctgcctgcctgctctgagctctctcttgcacgctctctcttctctcccaggctctggctcatgcacatgcaacaggtgcgtctgtctatatgtctgggttcttgtcttttgtggtctgtttgtcttttctacctctttctcttgcagtgatagactgagggggtaaaatcaagagaaaaaactctcaggaatcaaggaacataatcctgtggagggtaatccattacatgagcttctcctgttcttccactttcctgcctggctttcactccttcccctgctctgcccagcctttccctcccacccactcctccttctgcaaatgccctgaaggccagcccttaccccaacacccacttccccacctccttaggccccagatacatacatgcccacatgcacgcttacatgtttagagccatccttgtttccaaatatgacccttcgcttgagggcaactgcataggtacatctaactctggactggcatgcacattgtcatgtgcagctttgcatatacacacatgcatacatgagcctccacacaagcacttgcacacatgtggactcctaaccatgctaacctcactggctgggaaggtggggaccccatgggccagcccttgcaggaggcccttttgcaaggcttagggtgtggccagccctgaaagctacttggacacaggtttcagctggccccagcccagaagtgacccccagaaagggagggccaccgctttgccccctgcttttacccttccttctgggtgctctacacctcaggttaccaggcctgaggcatctcagccaagcttgtttcctgctctgaggcttgtggggtgggagc

SEQ ID NO: 103234 - DNA, 1818 bp, Homo sapiens
  Payload ID: 133
  Gene Symbol: ABHD14B
  Gene Name: abhydrolase domain containing 14B
  Uniprot ID: Q96IU4
  ENST ID: ENST00000395008
  CDS Start-End: 290-922
ctccggccccaggtcaccgccagcacgcgcctgcttcccgtctgcgcgagtccacgcagctccccagatcaagaagctgaggccccaggttacacactaaagtaaatggcagaggcagaaataacacctatgtcctcctgaccccaaggcatgttcttaaagttctggaaacctcctggaggcttccttgctgctcctctgggactgccaccctgggcagggtgttctgtggcccctcatcatcgtggttttgaaccacaggcccttcaccagcacagcagcagcaggcatggcagcaagcgtggagcagcgcgagggcaccatccaggtgcagggccaggccctcttcttccgagaggccctgcccggcagtgggcaggctcgcttctctgtactgctgctgcatggtattcgcttctcctccgagacctggcagaacctgggtacactgcacaggctggcccaggctggctaccgggctgtggccattgacctgccaggtctggggcactccaaggaagcagcagcccctgcccctattggggagctggcccctggcagcttcctggcggctgtggtggatgccttggagctgggccccccggttgtgatcagtccatcactgagtggcatgtactccctgcccttcctcacggcccctggctcccagctcccgggctttgtgccagtggcccccatctgcactgacaaaatcaatgctgccaactatgccagtgtgaagactccagctctgattgtatatggagaccaggaccccatgggtcagaccagctttgagcacctgaagcagctgcccaaccaccgggtgctgatcatgaagggggcggggcacccctgttacctggacaaaccagaggagtggcatacagggctgctggacttcctgcaggggctccagtgaagcccagcactgctgcagggggtgggctgcctgcctgctctgagctctctcttgcacgctctctcttctctcccaggctctggctcatgcacatgcaacaggtgcgtctgtctatatgtctgggttcttgtcttttgtggtctgtttgtcttttctacctctttctcttgcagtgatagactgagggggtaaaatcaagagaaaaaactctcaggaatcaaggaacataatcctgtggagggtaatccattacatgagcttctcctgttcttccactttcctgcctggctttcactccttcccctgctctgcccagcctttccctcccacccactcctccttctgcaaatgccctgaaggccagcccttaccccaacacccacttccccacctccttaggccccagatacatacatgcccacatgcacgcttacatgtttagagccatccttgtttccaaatatgacccttcgcttgagggcaactgcataggtacatctaactctggactggcatgcacattgtcatgtgcagctttgcatatacacacatgcatacatgagcctccacacaagcacttgcacacatgtggactcctaaccatgctaacctcactggctgggaaggtggggaccccatgggccagcccttgcaggaggcccttttgcaaggcttagggtgtggccagccctgaaagctacttggacacaggtttcagctggccccagcccagaagtgacccccagaaagggagggccaccgctttgccccctgcttttacccttccttctgggtgctctacacctcaggttaccaggcctgaggcatctcagccaagcttgtttcctgctctgaggcttgtggggtgggagccagagtggaggtcggtgaaataa

SEQ ID NO: 103235 - DNA, 1397 bp, Homo sapiens
  Payload ID: 133
  Gene Symbol: ABHD14B
  Gene Name: abhydrolase domain containing 14B
  ENST ID: ENST00000461108
  CDS Start-End: 86-652
aggtcaccgccagcacgcgcctgcttcccgtctgcgcgagtccacgcagctccccaggcccttcaccagcacagcagcagcaggcatggcagcaagcgtggagcagcgcgagggcaccatccaggtgcagggccaggccctcttcttccgagaggccctgcccggcagtgggcaggctcgcttctctgtactgctgctgcatggtattcgcttctcctccgagacctggcagaacctgggtacactgcacaggctggcccaggctggctaccgggctgtggccattgacctgccaggtctggggcactccaaggaagcagcagcccctgcccctattggggagctggcccctggcagcttcctggcggctgtggtggatgccttggagctgggccccccggttgtgatcagtccatcactgagtggcatgtactccctgcccttcctcacggcccctggctcccagctcccgggctttgtgccagtggcccccatctgcactgacaaaatcaatgctgccaactatgccagtgtgaaggtacccttgtgtgggaagctgaggtgcccctgccaggagcaaggaagggtgcatccctgggctttcctcatctgggggctggataatcaaggggtgtcttctgggaggagctgaccacccaactccacccttttggtttactcagcagactactgtgccaagccctgtgctaaactgtgttctggggcagacaccaatctgtgcccccacccactgggccagcttgtctctctccctcatatggggtggtcccaggaagagactgaagtggggagggctggggatgctatggcaggtccctgttgactctgccccacccccctatccttcctctcagactccagctctgattgtatatggagaccaggaccccatgggtcagaccagctttgagcacctgaagcagctgcccaaccaccgggtgctgatcatgaagggggcggggcacccctgttacctggacaaaccagaggagtggcatacagggctgctggacttcctgcaggggctccagtgaagcccagcactgctgcagggggtgggctgcctgcctgctctgagctctctcttgcacgctctctcttctctcccaggctctggctcatgcacatgcaacaggtgcgtctgtctatatgtctgggttcttgtcttttgtggtctgtttgtcttttctacctctttctcttgcagtgatagactgagggggtaaaatcaagagaaaaaactctcaggaatcaaggaacataatcctgtggagggtaatccattacatgagcttctcctgttcttccactttcctgcctggctttcactccttcccctgctctgcccagcctttccctcccacccactcctcctt

SEQ ID NO: 103236 - DNA, 2056 bp, Homo sapiens
  Payload ID: 133
  Gene Symbol: ABHD14B
  Gene Name: abhydrolase domain containing 14B
  Uniprot ID: Q96IU4
  ENST ID: ENST00000483233
  CDS Start-End: 508-1140
cccggcgccagcggccgcgtcggcgcggatgtccccgcccgcctctggttcgggcctcagcgagattactggaggattagatccggatcccgtccccgggcagcggccgccgcggccagcgccgccccgcgagttgcgagctccgggctggccctgctctgacaggctcgccccgccccacacgacacgcctgccactcctgcccccaggtcgctgaagagttcgaaaccgtgctcagcaccgcgtttggggcatgtgagaccgagaggctttgggaaactgacgccgctgtgagaacgagtttagcggagtctatggacgctgcgagcttgtggccacaagagggcgccccggagcacggcccagtccccgcccccgctggatggggcccggcctcttcccagcgttcctcctccggccccaggtcaccgccagcacgcgcctgcttcccgtctgcgcgagtccacgcagctccccaggcccttcaccagcacagcagcagcaggcatggcagcaagcgtggagcagcgcgagggcaccatccaggtgcagggccaggccctcttcttccgagaggccctgcccggcagtgggcaggctcgcttctctgtactgctgctgcatggtattcgcttctcctccgagacctggcagaacctgggtacactgcacaggctggcccaggctggctaccgggctgtggccattgacctgccaggtctggggcactccaaggaagcagcagcccctgcccctattggggagctggcccctggcagcttcctggcggctgtggtggatgccttggagctgggccccccggttgtgatcagtccatcactgagtggcatgtactccctgcccttcctcacggcccctggctcccagctcccgggctttgtgccagtggcccccatctgcactgacaaaatcaatgctgccaactatgccagtgtgaagactccagctctgattgtatatggagaccaggaccccatgggtcagaccagctttgagcacctgaagcagctgcccaaccaccgggtgctgatcatgaagggggcggggcacccctgttacctggacaaaccagaggagtggcatacagggctgctggacttcctgcaggggctccagtgaagcccagcactgctgcagggggtgggctgcctgcctgctctgagctctctcttgcacgctctctcttctctcccaggctctggctcatgcacatgcaacaggtgcgtctgtctatatgtctgggttcttgtcttttgtggtctgtttgtcttttctacctctttctcttgcagtgatagactgagggggtaaaatcaagagaaaaaactctcaggaatcaaggaacataatcctgtggagggtaatccattacatgagcttctcctgttcttccactttcctgcctggctttcactccttcccctgctctgcccagcctttccctcccacccactcctccttctgcaaatgccctgaaggccagcccttaccccaacacccacttccccacctccttaggccccagatacatacatgcccacatgcacgcttacatgtttagagccatccttgtttccaaatatgacccttcgcttgagggcaactgcataggtacatctaactctggactggcatgcacattgtcatgtgcagctttgcatatacacacatgcatacatgagcctccacacaagcacttgcacacatgtggactcctaaccatgctaacctcactggctgggaaggtggggaccccatgggccagcccttgcaggaggcccttttgcaaggcttagggtgtggccagccctgaaagctacttggacacaggtttcagctggccccagcccagaagtgacccccagaaagggagggccaccgctttgccccctgcttttacccttccttctgggtgctctacacctcaggttaccaggcctgaggcatctcagccaagcttgtttcctgctctgaggcttgtggggtgggagccagagtggaggtcggtgaaataaagtgatgcaattagacccca

SEQ ID NO: 103237 - DNA, 980 bp, Homo sapiens
  Payload ID: 133
  Gene Symbol: ABHD14B
  Gene Name: abhydrolase domain containing 14B
  Uniprot ID: Q96IU4
  ENST ID: ENST00000525795
  CDS Start-End: 195-827
ctcttcccagcgttcctcctccggccccaggtcaccgccagcacgcgcctgcttcccgtctgcgcgagtccacgcagctccccagatcaagaagctgaggccccaggttacacactaaagtaaatggcagaggcagaaataacacctatgtcctcctgaccccaaggcccttcaccagcacagcagcagcaggcatggcagcaagcgtggagcagcgcgagggcaccatccaggtgcagggccaggccctcttcttccgagaggccctgcccggcagtgggcaggctcgcttctctgtactgctgctgcatggtattcgcttctcctccgagacctggcagaacctgggtacactgcacaggctggcccaggctggctaccgggctgtggccattgacctgccaggtctggggcactccaaggaagcagcagcccctgcccctattggggagctggcccctggcagcttcctggcggctgtggtggatgccttggagctgggccccccggttgtgatcagtccatcactgagtggcatgtactccctgcccttcctcacggcccctggctcccagctcccgggctttgtgccagtggcccccatctgcactgacaaaatcaatgctgccaactatgccagtgtgaagactccagctctgattgtatatggagaccaggaccccatgggtcagaccagctttgagcacctgaagcagctgcccaaccaccgggtgctgatcatgaagggggcggggcacccctgttacctggacaaaccagaggagtggcatacagggctgctggacttcctgcaggggctccagtgaagcccagcactgctgcagggggtgggctgcctgcctgctctgagctctctcttgcacgctctctcttctctcccaggctctggctcatgcacatgcaacaggtgcgtctgtctatatgtctgggttcttgtcttttgtggtctgtttgtcttt

SEQ ID NO: 103238 - DNA, 3592 bp, Homo sapiens
  Payload ID: 134
  Gene Symbol: ABHD15
  Gene Name: abhydrolase domain containing 15
  Uniprot ID: Q6UXT9
  ENST ID: ENST00000307201
  CDS Start-End: 172-1578
cagccgggcccgaactggctgcctctgcccggccacggccaatccagagcgcgcccgcgcgggagggccctgggcagccgccgccggcgggcggagccgcgggcaaagcgcggagctcgccgagtagacggccccgccgcccgctgcccgccggggctctccagcttcgccatgccgccgtggggcgccgccctcgcgctcatcttggccgtgctcgcccttctcggcctgctcggcccgcggctccggggaccctgggggcgcgccgtcggagagaggaccctgccgggggcccaagaccgagacgacggggaggaggcggacggcggaggcccggcggaccagttcagcgacgggcgcgagccactgccgggagggtgcagccttgtttgcaagccgtcggccctggcccagtgcctgctgcgcgccctgcggcgctcagaggcgctggaggccggcccgcgctcctggttctccgggccccacctgcagaccctctgccacttcgtcctgcccgtagcgcctgggcctgagctggcccgggagtacctgcagttggcggacgatgggctagtggccctggactgggtggtaggaccttgtgttcggggccgccggatcaccagcgccgggggccttcctgcggtgcttctggtgatccccaatgcgtggggtcgcctcacccgcaacgtgctcggcctttgcttgctcgccctggagcgcggctactacccggtcatcttccatcgccgcggccaccacggttgcccactggtcagcccccggctgcagcctttcggggacccgtccgacctcaaggaggcggtcacatacatccgcttccgacacccggcggcgccgctgttcgcggtgagcgaaggctcgggctcggcgctgctcctgtcctacctgggcgagtgcggctcctccagctacgtgacaggcgccgcctgcatctcgcccgtgctgcgctgccgagagtggttcgaggccggcctgccctggccctacgagcggggctttctgctccaccagaagatcgccctcagcaggtatgccacagccctggaggacactgtggacaccagcagactgttcaggagccgttcccttcgagagtttgaggaggctctcttctgccacaccaaaagcttccccatcagctgggatacctactgggaccgcaacgacccgctccgggatgtcgatgaggcagccgtgcctgtgctgtgtatctgcagtgctgacgaccccgtgtgtggacccccagaccacactctgacaactgaactcttccacagcaacccctacttcttcctcctgctcagtcgccacggaggccactgtggcttcctgcgccaggagcccttgccagcctggagccatgaggtcatcttggagtccttccgggccttgactgagttcttccgaacggaggagaggattaaagggctgagcaggcacagagcttccttccttgggggccgtcgtcgtgggggagccttgcagaggcgggaagtctcttcctcttccaacctggaggagatctttaactggaagcgatcatacacaaggtgaaagacctggcctgagaacccccaagtcctgcaaagaaaaacagagctgggcaagggggagtcctggaaagatggggcggactgaacagagggagctccagctctgtgctcctcattcagtccctctctcttaaattggtgccttgaaagagaaggaacgtcctgcgagcctgcactcacttcatcctcagcagaactcctgcctggcctctgctcaacatatccctactcatccggtcagcagcggcgcgttccagtcactgtcacctgtcactgacatcacaagccaaaggatagcactttttcaatccatggactcaggagaaaatgccctcttactggcagtggctagagggatgagacgtttgtgtatgtcactgggcagtgaccccgattctcaagctggagccatttgatgtcatgaggacaggatgtttgtgtctcggccccacttccctcatttgctctgtggttgtggcgccctgctttgaccgaatgctctggcaactgcggcagcaggcttgtgtgtgtgagaagggcggcagaggcagtggggctggctcgctgagggctgagcaggtagagaatgtgaatgtccatctcaaggaatgcgaagttccaatctctcagaggagctctgcaagtctcagctaggaatggggctgatctggcccccaagcctcactggagagatcccaagggtattttacaaataggaagcgctctcatgcaggatctgagggctttgctagaccatggttcaaggagtcagaatcttggctaccctacatgctccctctggcaccatttcaggggattactccagagagctgcagccagaactgtttatctcctgagatatggactttctctaagtcaggaaaagcacaaacctcataacttaggtgttttctggttggttgctcccttttctgatcctactactggcctctccctttccagagccaggagacacatctgggaccagaggaaacaaaagcaccaagaggttgactagagctgaccagtgatttacaaatatttcatattccaatgcttcgtctgctcaattattcaaaaggccatccctgtaaaggcagaaaagcttcctcttagatctggccactcagcaaataagtgggtatttggttttatgaagaataatgctgaggactagagatatagtatatcagagataatatatagtatacaggttgatctaaatattctggtttggattaggcaattaaaatttttttggcaacaggacatatgtttccatgtgttgctaagattcaaaaactttgccctgaagttttattttaatcgtcattgagaaagagggctcctgttctgacctcaaaaacagcaaagctgttgtaaagaagagagctgcttatacgaaaacccacattccaagacttggtataaggtattcctgaggccttgatttcaggtttggataatcttgccccagattctagatcttgttcttctagatcaaatcagaagaaactttgaaataactccaagaatctgcactgaaatgtagacagcactcgataatctaagggacattatcttgttgtgaaaaattatctccctcctggctgggagcggtggcacacacctataatctcagcactttgggaggccgaggtgggtggatcacgaggtcaggagatcgagaccatcctggctaacacagtgaaacctcatctctactaaaaatacaaaaaattagccgggcgtggtagcgggtgcctgtaatcccagttactcaggaggctgaggcaggagaatggcgtgaacccgggaggcggagcttgcagtgagctgagatcgcaccactgcactccagcctgggcgacagagtaagactgtgtttcaaaaaaaaaaaagaaaagaaaaattatctcccttctccccacttcttgtttctcctcctccatattcctcatctgacgttcttttgccgtttctaagcaggataaataaaaaggaactgaaattaa

SEQ ID NO: 103239 - DNA, 2103 bp, Homo sapiens
  Payload ID: 135
  Gene Symbol: ABHD16A
  Gene Name: abhydrolase domain containing 16A
  Uniprot ID: O95870
  ENST ID: ENST00000395952
  CDS Start-End: 164-1840
aactgcgcgaaactcttctcaggaagcactgaaaatgtcgcaactcgcccggaggcggagccggtacgggctgacgtcaagggcacacaacacctcagaggcagggagggcggggccggcagggggacctgctgctggaagagcagcggcccgagccggggccatggcgaagctgctgagctgcgtcctaggcccccggctctacaaaatctaccgggagagggactctgaaagggccccggccagcgtccctgagacgccaacggcagtcactgccccccattccagctcctgggatacgtactatcagccccgtgccctggagaaacatgctgacagcatcctggcactggcttcagtattctggtccatctcttattactcctctcccttcgccttcttctacttgtacaggaaaggttacttgagtttgtccaaagtggtgccgttttctcactatgctgggacattgctgctacttctggcaggtgtggcctgcctccgaggcattggccgctggaccaacccccagtaccggcagttcatcaccatcttggaagcaacacatcggaaccagtcttcagaaaacaagaggcagcttgccaactacaactttgacttccggagctggccagtcgacttccactgggaagaacccagcagccggaaggagtctcgagggggcccttcccgccggggtgtggccctgcttcgcccagagcccctgcaccgggggacagcagacaccctcctcaaccgggttaagaagctgccttgtcagatcaccagctacctggtggcgcacaccctagggcgccggatgctgtatccaggctctgtgtacctgctgcagaaggccctcatgcctgtgctgctgcagggccaggcccgactggtggaagagtgtaatgggcgccgggcaaagctgctggcctgtgatggcaatgagattgacaccatgtttgtggaccggcgggggacagctgagccccagggacagaagctggtgatctgctgtgaggggaatgctgggttttatgaggtgggctgcgtctccacgcccctggaagctggatattcagtcctgggctggaatcatccaggctttgctggaagcacgggggtgccattcccgcagaatgaggctaatgccatggatgtggtggtccagtttgccatccaccgcctaggcttccagccccaggacatcatcatctacgcctggtccatcggcggcttcactgccacgtgggcagccatgtcctacccagatgttagtgccatgatcctggatgcctcctttgatgacctggtgcccttggccttgaaggtcatgccagacagctggaggggcctggtgaccaggaccgtgaggcagcatctcaatctaaacaacgcggagcagctgtgcagataccagggtcctgtactgctgatccggagaaccaaggatgagatcatcaccaccacggttcctgaggacatcatgtccaaccgaggcaatgacctcctgctgaagctcctgcagcatcggtatccccgggtgatggcagaggagggtcttcgagtggtgaggcagtggttggaggcctcctcacagctggaggaagcctcaatttatagccgatgggaggtggaagaggactggtgtctgtctgtcctccgctcctaccaggcagaacacgggcccgacttcccctggagcgtgggggaggacatgagtgcagatggacggcggcagctggctttgtttctggctcggaagcatctgcacaactttgaggccactcactgcaccccactcccagcccagaacttccagatgccctggcacctctagggaccaactgggactcattatggaagaatggggtgagaggagacatgaggaaagaccctcttatttgtgattctctgtgttcatgttgctgtttatagtttgtggaaagtgggggaccatcccccttctcaccactgttcctcttgcacgtttcccctcattcatgtggctgtacttaaccttctccaacatacatcctgcattacatgaatggattattcctaataattaataaaaaggtattttttctactatcaggctaa

SEQ ID NO: 103240 - DNA, 889 bp, Homo sapiens
  Payload ID: 135
  Gene Symbol: ABHD16A
  Gene Name: abhydrolase domain containing 16A
  ENST ID: ENST00000414591
  CDS Start-End: 99-889
agttgagtcttgagtcccgggaagagaccctgcgcggactggggagccgttgaattttgctgtcagactcccagtttcctcttcttcagtgcctcttcatgcctcccccggctctgtttttatcttccctttaccctcgccttgaatttcagaatgacttttacagatcctgtatccgtcggtcctcccctcaacccccgcccaacctagcctggagacccgagtcattgtattctggagagctggcgggtggtggttacttgagtttgtccaaagtggtgccgttttctcactatgctgggacattgctgctacttctggcaggtgtggcctgcctccgaggcattggccgctggaccaacccccagtaccggcagttcatcaccatcttggaagcaacacatcggaaccagtcttcagaaaacaagaggcagcttgccaactacaactttgacttccggagctggccagtcgacttccactgggaagaacccagcagccggaaggagtctcgagggggcccttcccgccggggtgtggccctgcttcgcccagagcccctgcaccgggggacagcagacaccctcctcaaccgggttaagaagctgccttgtcagatcaccagctacctggtggcgcacaccctagggcgccggatgctgtatccaggctctgtgtacctgctgcagaaggccctcatgcctgtgctgctgcagggccaggcccgactggtggaagagtgtaatgggcgccgggcaaagctgctggcctgtgatggcaatgagattgacaccatgtttgtggaccggcgggggacagctgagccccagggacagaagctggtgatctgctgtgaggggaatgctgggttttatgaggtgggctgcgt

SEQ ID NO: 103241 - DNA, 2069 bp, Homo sapiens
  Payload ID: 135
  Gene Symbol: ABHD16A
  Gene Name: abhydrolase domain containing 16A
  ENST ID: ENST00000429735
  CDS Start-End: 7-1812
ctgaaaatgtcgcaactcgcccggaggcggagccggtacgggctgacgtcaagggcacacaacacctcagaggcagggagggcggggccggcagggggacctgctgctggaagagcagcggcccgagccggggccatggcgaagctgctgagctgcgtcctaggcccccggctctacaaaatctaccgggagagggactctgaaagggccccggccagcgtccctgagacgccaacggcagtcactgccccccattccagctcctgggatacgtactatcagccccgtgccctggagaaacatgctgacagcatcctggcactggcttcagtattctggtccatctcttattactcctctcccttcgccttcttctacttgtacaggaaaggttacttgagtttgtccaaagtggtgccgttttctcactatgctgggacattgctgctacttctggcaggtgtggcctgcctccgaggcattggccgctggaccaacccccagtaccggcagttcatcaccatcttggaagcaacacatcggaaccagtcttcagaaaacaagaggcagcttgccaactacaactttgacttccggagctggccagtcgacttccactgggaagaacccagcagccggaaggagtctcgagggggcccttcccgccggggtgtggccctgcttcgcccagagcccctgcaccgggggacagcagacaccctcctcaaccgggttaagaagctgccttgtcagatcaccagctacctggtggcgcacaccctagggcgccggatgctgtatccaggctctgtgtacctgctgcagaaggccctcatgcctgtgctgctgcagggccaggcccgactggtggaagagtgtaatgggcgccgggcaaagctgctggcctgtgatggcaatgagattgacaccatgtttgtggaccggcgggggacagctgagccccagggacagaagctggtgatctgctgtgaggggaatgctgggttttatgaggtgggctgcgtctccacgcccctggaagctggatattcagtcctgggctggaatcatccaggctttgctggaagcacgggggtgccattcccgcagaatgaggctaatgccatggatgtggtggtccagtttgccatccaccgcctaggcttccagccccaggacatcatcatctacgcctggtccatcggcggcttcactgccacgtgggcagccatgtcctacccagatgttagtgccatgatcctggatgcctcctttgatgacctggtgcccttggccttgaaggtcatgccagacagctggaggggcctggtgaccaggaccgtgaggcagcatctcaatctaaacaacgcggagcagctgtgcagataccagggtcctgtactgctgatccggagaaccaaggatgagatcatcaccaccacggttcctgaggacatcatgtccaaccgaggcaatgacctcctgctgaagctcctgcagcatcggtatccccgggtgatggcagaggagggtcttcgagtggtgaggcagtggttggaggcctcctcacagctggaggaagcctcaatttatagccgatgggaggtggaagaggactggtgtctgtctgtcctccgctcctaccaggcagaacacgggcccgacttcccctggagcgtgggggaggacatgagtgcagatggacggcggcagctggctttgtttctggctcggaagcatctgcacaactttgaggccactcactgcaccccactcccagcccagaacttccagatgccctggcacctctagggaccaactgggactcattatggaagaatggggtgagaggagacatgaggaaagaccctcttatttgtgattctctgtgttcatgttgctgtttatagtttgtggaaagtgggggaccatcccccttctcaccactgttcctcttgcacgtttcccctcattcatgtggctgtacttaaccttctccaacatacatcctgcattacatgaatggattattcctaataattaataaaaaggtattttttctactatca

SEQ ID NO: 103242 - DNA, 889 bp, Homo sapiens; identical to SEQ ID NO: 103240
  Payload ID: 135
  Gene Symbol: ABHD16A
  Gene Name: abhydrolase domain containing 16A
  ENST ID: ENST00000422411
  CDS Start-End: 99-889

SEQ ID NO: 103243 - DNA, 889 bp, Homo sapiens; identical to SEQ ID NO: 103240
  Payload ID: 135
  Gene Symbol: ABHD16A
  Gene Name: abhydrolase domain containing 16A
  ENST ID: ENST00000422404
  CDS Start-End: 99-889

SEQ ID NO: 103244 - DNA, 2068 bp, Homo sapiens
  Payload ID: 135
  Gene Symbol: ABHD16A
  Gene Name: abhydrolase domain containing 16A
  Uniprot ID: O95870
  ENST ID: ENST00000446529
  CDS Start-End: 136-1812
ctgaaaatgtcgcaactcgcccggaggcggagccggtacgggctgacgtcaagggcacacaacacctcagaggcagggagggcggggccggcagggggacctgctgctggaagagcagcggcccgagccggggccatggcgaagctgctgagctgcgtcctaggcccccggctctacaaaatctaccgggagagggactctgaaagggccccggccagcgtccctgagacgccaacggcagtcactgccccccattccagctcctgggatacgtactatcagccccgtgccctggagaaacatgctgacagcatcctggcactggcttcagtattctggtccatctcttattactcctctcccttcgccttcttctacttgtacaggaaaggttacttgagtttgtccaaagtggtgccgttttctcactatgctgggacattgctgctacttctggcaggtgtggcctgcctccgaggcattggccgctggaccaacccccagtaccggcagttcatcaccatcttggaagcaacacatcggaaccagtcttcagaaaacaagaggcagcttgccaactacaactttgacttccggagctggccagtcgacttccactgggaagaacccagcagccggaaggagtctcgagggggcccttcccgccggggtgtggccctgcttcgcccagagcccctgcaccgggggacagcagacaccctcctcaaccgggttaagaagctgccttgtcagatcaccagctacctggtggcgcacaccctagggcgccggatgctgtatccaggctctgtgtacctgctgcagaaggccctcatgcctgtgctgctgcagggccaggcccgactggtggaagagtgtaatgggcgccgggcaaagctgctggcctgtgatggcaatgagattgacaccatgtttgtggaccggcgggggacagctgagccccagggacagaagctggtgatctgctgtgaggggaatgctgggttttatgaggtgggctgcgtctccacgcccctggaagctggatattcagtcctgggctggaatcatccaggctttgctggaagcacgggggtgccattcccgcagaatgaggctaatgccatggatgtggtggtccagtttgccatccaccgcctgggcttccagccccaggacatcatcatctacgcctggtccatcggcggcttcactgccacgtgggcagccatgtcctacccagatgttagtgccatgatcctggatgcctcctttgatgacctggtgcccttggccttgaaggtcatgccagacagctggaggggcctggtgaccaggaccgtgaggcagcatctcaatctaaacaacgcggagcagctgtgcagataccagggtcctgtactgctgatccggagaaccaaggatgagatcatcaccaccacggttcctgaggacatcatgtccaaccgaggcaatgacctcctgctgaagctcctgcagcatcggtatccccgggtgatggcagaggagggtcttcgagtggtgaggcagtggttggaggcctcctcacagctggaggaagcctcaatttatagccgatgggaggtggaagaggactggtgtctgtctgtcctccgctcctaccaggcagaacacgggcctgacttcccctggagcgtgggggaggacatgagtgcagatggacggcggcagctggctttgtttctggctcggaagcatctgcacaactttgaggccactcactgcaccccactcccagcccagaacttccagatgccctggcacctctagggaccaactgggactcattatggaagaatggggtgagaggagacatgaggaaagaccctcttatttgtgattctctgtgttcatgttgctgtttatagtttgtggaaagtgggggaccatcccccttctcaccactgttcctcttgcacgtttcccctcattcatgtggctgtacttaaccttctccaacatacatcctgcattacatgaatggattattcctaataattaataaaaaggtattttttctactatc

SEQ ID NO: 103245 - DNA, 889 bp, Homo sapiens; identical to SEQ ID NO: 103240
  Payload ID: 135
  Gene Symbol: ABHD16A
  Gene Name: abhydrolase domain containing 16A
  ENST ID: ENST00000446366
  CDS Start-End: 99-889

SEQ ID NO: 103246 - DNA, 2068 bp, Homo sapiens; identical to SEQ ID NO: 103244
  Payload ID: 135
  Gene Symbol: ABHD16A
  Gene Name: abhydrolase domain containing 16A
  ENST ID: ENST00000432617
  CDS Start-End: 7-1812

SEQ ID NO: 103247 - DNA, 2069 bp, Homo sapiens
  Payload ID: 135
  Gene Symbol: ABHD16A
  Gene Name: abhydrolase domain containing 16A
  ENST ID: ENST00000457366
  CDS Start-End: 7-1812
ctgaaaatgtcgcaactcgcccggaggcggagccggtacgggctgacgtcaagggcacacaacacctcagaggcagggagggcggggccggcagggggacctgctgctggaagagcagcggcccgagccggggccatggcgaagctgctgagctgcgtcctaggcccccggctctacaaaatctaccgggagagggactctgaaagggccccggccagcgtccctgagacgccaacggcagtcactgccccccattccagctcctgggatacgtactatcagccccgtgccctggagaaacatgctgacagcatcctggcactggcttcagtattctggtccatctcttattactcctctcccttcgccttcttctacttgtacaggaaaggttacttgagtttgtccaaagtggtgccgttttctcactatgctgggacattgctgctacttctggcaggtgtggcctgcctccgaggcattggccgctggaccaacccccagtaccggcagttcatcaccatcttggaagcaacacatcggaaccagtcttcagaaaacaagaggcagcttgccaactacaactttgacttccggagctggccagtcgacttccactgggaagaacccagcagccggaaggagtctcgagggggcccttcccgccggggtgtggccctgcttcgcccagagcccctgcaccgggggacagcagacaccctcctcaaccgggttaagaagctgccttgtcagatcaccagctacctggtggcgcacaccctagggcgccggatgctgtatccaggctctgtgtacctgctgcagaaggccctcatgcctgtgctgctgcagggccaggcccgactggtggaagagtgtaatgggcgccgggcaaagctgctggcctgtgatggcaatgagattgacaccatgtttgtggaccggcgggggacagctgagccccagggacagaagctggtgatctgctgtgaggggaatgctgggttttatgaggtgggctgcgtctccacgcccctggaagctggatattcagtcctgggctggaatcatccaggctttgctggaagcacgggggtgccattcccgcagaatgaggctaatgccatggatgtggtggtccagtttgccatccaccgcctgggcttccagccccaggacatcatcatctacgcctggtccatcggcggcttcactgccacgtgggcagccatgtcctacccagatgttagtgccatgatcctggatgcctcctttgatgacctggtgcccttggccttgaaggtcatgccagacagctggaggggcctggtgaccaggaccgtgaggcagcatctcaatctaaacaacgcggagcagctgtgcagataccagggtcctgtactgctgatccggagaaccaaggatgagatcatcaccaccacggttcctgaggacatcatgtccaaccgaggcaatgacctcctgctgaagctcctgcagcatcggtatccccgggtgatggcagaggagggtcttcgagtggtgaggcagtggttggaggcctcctcacagctggaggaagcctcaatttatagccgatgggaggtggaagaggactggtgtctgtctgtcctccgctcctaccaggcagaacacgggcccgacttcccctggagcgtgggggaggacatgagtgcagatggacggcggcagctggctttgtttctggctcggaagcatctgcacaactttgaggccactcactgcaccccactcccagcccagaacttccagatgccctggcacctctagggaccaactgggactcattatggaagaatggggtgagaggagacatgaggaaagaccctcttatttgtgattctctgtgttcatgttgctgtttatagtttgtggaaagtgggggaccatcccccttctcaccactgttcctcttgcacgtttcccctcattcatgtggctgtacttaaccttctccaacatacatcctgcattacatgaatggattattcctaataattaataaaaaggtattttttctactatca

SEQ ID NO: 103248 - DNA, 889 bp, Homo sapiens; identical to SEQ ID NO: 103240
  Payload ID: 135
  Gene Symbol: ABHD16A
  Gene Name: abhydrolase domain containing 16A
  ENST ID: ENST00000440799
  CDS Start-End: 99-889

SEQ ID NO: 103249 - DNA, 2069 bp, Homo sapiens; identical to SEQ ID NO: 103247
  Payload ID: 135
  Gene Symbol: ABHD16A
  Gene Name: abhydrolase domain containing 16A
  ENST ID: ENST00000444818
  CDS Start-End: 7-1812

SEQ ID NO: 103250 - DNA, 1906 bp, Homo sapiens
  Payload ID: 135
  Gene Symbol: ABHD16A
  Gene Name: abhydrolase domain containing 16A
  Uniprot ID: O95870
  ENST ID: ENST00000440843
  CDS Start-End: 303-1880
aatgggaaataaggggagcctgcttgtcaagccagttatccgcaaaatctgcgctctgtgtgcttcctgagttaaagtcacgcctacggactggccgcctcctttctttttcgctctttaccgctttctcattccgactgccactctttgttctttcctctccgcgtccccccgaccctgtgtgtcgtggttcgtgccggtcccagttgagtcttgagtcccgggaagagaccctgcgcggactggggagccgttgaattttgctgtcagactcccagtttcctcttcttcagtgcctcttcatgcctcccccggctctgtttttatcttccctttaccctcgccttgaatttcagaatgacttttacagatcctgtatccgtcggtcctcccctcaacccccgcccaacctagcctggagacccgagtcattgtattctggagagctggcgggtggtggttacttgagtttgtccaaagtggtgccgttttctcactatgctgggacattgctgctacttctggcaggtgtggcctgcctccgaggcattggccgctggaccaacccccagtaccggcagttcatcaccatcttggaagcaacacatcggaaccagtcttcagaaaacaagaggcagcttgccaactacaactttgacttccggagctggccagtcgacttccactgggaagaacccagcagccggaaggagtctcgagggggcccttcccgccggggtgtggccctgcttcgcccagagcccctgcaccgggggacagcagacaccctcctcaaccgggttaagaagctgccttgtcagatcaccagctacctggtggcgcacaccctagggcgccggatgctgtatccaggctctgtgtacctgctgcagaaggccctcatgcctgtgctgctgcagggccaggcccgactggtggaagagtgtaatgggcgccgggcaaagctgctggcctgtgatggcaatgagattgacaccatgtttgtggaccggcgggggacagctgagccccagggacagaagctggtgatctgctgtgaggggaatgctgggttttatgaggtgggctgcgtctccacgcccctggaagctggatattcagtcctgggctggaatcatccaggctttgctggaagcacgggggtgccattcccgcagaatgaggctaatgccatggatgtggtggtccagtttgccatccaccgcctaggcttccagccccaggacatcatcatctacgcctggtccatcggcggcttcactgccacgtgggcagccatgtcctacccagatgttagtgccatgatcctggatgcctcctttgatgacctggtgcccttggccttgaaggtcatgccagacagctggaggggcctggtgaccaggaccgtgaggcagcatctcaatctaaacaacgcggagcagctgtgcagataccagggtcctgtactgctgatccggagaaccaaggatgagatcatcaccaccacggttcctgaggacatcatgtccaaccgaggcaatgacctcctgctgaagctcctgcagcatcggtatccccgggtgatggcagaggagggtcttcgagtggtgaggcagtggttggaggcctcctcacagctggaggaagcctcaatttatagccgatgggaggtggaagaggactggtgtctgtctgtcctccgctcctaccaggcagaacacgggcccgacttcccctggagcgtgggggaggacatgagtgcagatggacggcggcagctggctttgtttctggctcggaagcatctgcacaactttgaggccactcactgcaccccactcccagcccagaacttccagatgccctggcacctctagggaccaactgggactcattatggaag

SEQ ID NO: 103251 - DNA, 889 bp, Homo sapiens; identical to SEQ ID NO: 103240
  Payload ID: 135
  Gene Symbol: ABHD16A
  Gene Name: abhydrolase domain containing 16A
  ENST ID: ENST00000431671
  CDS Start-End: 99-889

SEQ ID NO: 103252 - DNA, 2069 bp, Homo sapiens; identical to SEQ ID NO: 103247
  Payload ID: 135
  Gene Symbol: ABHD16A
  Gene Name: abhydrolase domain containing 16A
  ENST ID: ENST00000413853
  CDS Start-End: 7-1812

SEQ ID NO: 103253 - DNA, 1000 bp, Homo sapiens
  Payload ID: 135
  Gene Symbol: ABHD16A
  Gene Name: abhydrolase domain containing 16A
  ENST ID: ENST00000468037
  CDS Start-End: 217-414
cggactggccgcctcctttctttttcgctctttaccgctttctcattccgactgccactctttgttctttcctctccgcgtccccccgaccctgtgtgtcgtggttcgtgccggtcccagttgagtcttgagtcccgggaagagaccctgcgcggactggggagccgttgaattttgctgtcagactcccagtttcctcttcttcagtgcctcttcatgcctcccccggctctgtttttatcttccctttaccctcgccttgaatttcagaatgacttttacagatcctgtatccgtcggtcctcccctcaacccccgcccaacctagcctggagacccgagtcattgtattctggagagctggcgggtggtggatacgtactatcagccccgtgccctggagaaacatgctgacagcatcctggcactggcttcagtattctggtccatctcttattactcctctcccttcgccttcttctacttgtacaggaaaggttacttgagtttgtccaaagtggtgccgttttctcactatgctgggacattgctgctacttctggcaggtgtggcctgcctccgaggcattggccgctggaccaacccccagtaccggcagttcatcaccatcttggaagcaacacatcggaaccagtcttcagaaaacaagaggcagcttgccaactacaactttgacttccggagctggccagtcgacttccactgggaagaacccagcagccggaaggagtctcgagggggcccttcccgccggggtgtggccctgcttcgcccagagcccctgcaccgggggacagcagacaccctcctcaaccgggttaagaagctgccttgtcagatcaccaggtgggaaacagcagcgaggagaggcccactggggtggaggggccatttcaggagtgctctgggagtgggcgctccattgtaaaatagctgtcactcattgggcctagtgctgtatggtttgtgtagatcattt

SEQ ID NO: 103254 - DNA, 1892 bp, Homo sapiens
  Payload ID: 135
  Gene Symbol: ABHD16A
  Gene Name: abhydrolase domain containing 16A
  ENST ID: ENST00000495769
  CDS Start-End: 60-257
ggagggcggggccggcagggggacctgctgctggaagagcagcggcccgagccggggccatggcgaagctgctgagctgcgtcctaggcccccggctctacaaaatctaccgggagagggactctgaaagggccccggccagcgtccctgagacgccaacggcagtcactgccccccattccagctcctgggatacgtactatcagccccgtgccctggagaaacatgctgacagcatcctggcactggttacttgagtttgtccaaagtggtgccgttttctcactatgctgggacattgctgctacttctggcaggtgtggcctgcctccgaggcattggccgctggaccaacccccagtaccggcagttcatcaccatcttggaagcaacacatcggaaccagtcttcagaaaacaagaggcagcttgccaactacaactttgacttccggagctggccagtcgacttccactgggaagaacccagcagccggaaggagtctcgagggggcccttcccgccggggtgtggccctgcttcgcccagagcccctgcaccgggggacagcagacaccctcctcaaccgggttaagaagctgccttgtcagatcaccagctacctggtggcgcacaccctagggcgccggatgctgtatccaggctctgtgtacctgctgcagaaggccctcatgcctgtgctgctgcagggccaggcccgactggtggaagagtgtaatgggcgccgggcaaagctgctggcctgtgatggcaatgagattgacaccatgtttgtggaccggcgggggacagctgagccccagggacagaagctggtgatctgctgtgaggggaatgctgggttttatgaggtgggctgcgtctccacgcccctggaagctggatattcagtcctgggctggaatcatccaggctttgctggaagcacgggggtgccattcccgcagaatgaggctaatgccatggatgtggtggtccagtttgccatccaccgcctaggcttccagccccaggacatcatcatctacgcctggtccatcggcggcttcactgccacgtgggcagccatgtcctacccagatgttagtgccatgatcctggatgcctcctttgatgacctggtgcccttggccttgaaggtcatgccagacagctggaggggcctggtgaccaggaccgtgaggcagcatctcaatctaaacaacgcggagcagctgtgcagataccagggtcctgtactgctgatccggagaaccaaggatgagatcatcaccaccacggttcctgaggacatcatgtccaaccgaggcaatgacctcctgctgaagctcctgcagcatcggtatccccgggtgatggcagaggagggtcttcgagtggtgaggcagtggttggaggcctcctcacagctggaggaagcctcaatttatagccgatgggaggtggaagaggactggtgtctgtctgtcctccgctcctaccaggcagaacacgggcccgacttcccctggagcgtgggggaggacatgagtgcagatggacggcggcagctggctttgtttctggctcggaagcatctgcacaactttgaggccactcactgcaccccactcccagcccagaacttccagatgccctggcacctctagggaccaactgggactcattatggaagaatggggtgagaggagacatgaggaaagaccctcttatttgtgattctctgtgttcatgttgctgtttatagtttgtggaaagtgggggaccatcccccttctcaccactgttcctcttgcacgtttcccctcattcatgtggctgtacttaaccttctccaacatacatcctgcattacatgaatggattattcct

SEQ ID NO: 103255 - DNA, 582 bp, Homo sapiens
  Payload ID: 135
  Gene Symbol: ABHD16A
  Gene Name: abhydrolase domain containing 16A
  ENST ID: ENST00000477462
  CDS Start-End: 20-160
agcggcccgagccggggccatggcgaagctgctgagctgcgtcctaggcccccggctctacaaaatctaccgggagagggactctgaaagggccccggccagcgtccctgagacgccaacggcagtcactgccccccattccagctcctgggttacttgagtttgtccaaagtggtgccgttttctcactatgctgggacattgctgctacttctggcaggtgtggcctgcctccgagaggcagcttgccaactacaactttgacttccggagctggccagtcgacttccactgggaagaacccagcagccggaaggagtctcgagggggcccttcccgccggggtgtggccctgcttcgcccagagcccctgcaccgggggacagcagacaccctcctcaaccgggttaagaagctgccttgtcagatcaccagctacctggtggcgcacaccctagggcgccggatgctgtatccaggctctgtgtacctgctgcagaaggccctcatgcctgtgctgctgcagggccaggcccgactggtggaagagtgtaatgggcgccgggcaaagctgctggcctg

SEQ ID NO: 103256 - DNA, 864 bp, Homo sapiens
  Payload ID: 135
  Gene Symbol: ABHD16A
  Gene Name: abhydrolase domain containing 16A
  ENST ID: ENST00000482224
  CDS Start-End: 31-228
gctggaagagcagcggcccgagccggggccatggcgaagctgctgagctgcgtcctaggcccccggctctacaaaatctaccgggagagggactctgaaagggccccggccagcgtccctgagacgccaacggcagtcactgccccccattccagctcctgggatacgtactatcagccccgtgccctggagaaacatgctgacagcatcctggcactggttacttgagtttgtccaaagtggtgccgttttctcactatgctgggacattgctgctacttctggcaggtgtggcctgcctccgaggcattggccgctggaccaacccccagtaccggcagttcatcaccatcttggaagcaacacatcggaaccagtcttcagaaaacaagaggcagcttgccaactacaactttgacttccggagctggccagtcgacttccactgggaagaacccagcagccggaaggagtctcgagggggcccttcccgccggggtgtggccctgcttcgcccagagcccctgcaccgggggacagcagacaccctcctcaaccgggttaagaagctgccttgtcagatcaccaggtgggaaacagcagcgaggagaggcccactggggtggaggggccatttcaggagtgctctgggagtgggcgctccattgtaaaatagctgtcactcattgggcctagtgctgtatggtttgtgtagatcatttatggcaaagtcatttttatccatatttatgtttgaagaaaagaggctcagagaggtctggagtctcaaatgtagtaagtaaagaactgggatatgaacaaaagctccttcagtgaggctgaaaaggagcagtgggggtgggg

SEQ ID NO: 103257 - DNA, 2260 bp, Homo sapiens
  Payload ID: 135
  Gene Symbol: ABHD16A
  Gene Name: abhydrolase domain containing 16A
  ENST ID: ENST00000492084
  CDS Start-End: 306-503
cataatgggaaataaggggagcctgcttgtcaagccagttatccgcaaaatctgcgctctgtgtgcttcctgagttaaagtcacgcctacggactggccgcctcctttctttttcgctctttaccgctttctcattccgactgccactctttgttctttcctctccgcgtccccccgaccctgtgtgtcgtggttcgtgccggtcccagttgagtcttgagtcccgggaagagaccctgcgcggactggggagccgttgaattttgctgtcagactcccagtttcctcttcttcagtgcctcttcatgcctcccccggctctgtttttatcttccctttaccctcgccttgaatttcagaatgacttttacagatcctgtatccgtcggtcctcccctcaacccccgcccaacctagcctggagacccgagtcattgtattctggagagctggcgggtggtggatacgtactatcagccccgtgccctggagaaacatgctgacagcatcctggcactggcttcagtattctggtccatctcttattactcctctcccttcgccttcttctacttgtacaggaaaggttacttgagtttgtccaaagtggtgccgttttctcactatgctgggacattgctgctacttctggcaggtgtggcctgcctccgaggcattggccgctggaccaacccccagtaccggcagttcatcaccatcttggaagcaacacatcggaaccagtcttcagaaaacaagaggcagcttgccaactacaactttgacttccggagctggccagtcgacttccactgggaagaacccagcagccggaaggagtctcgagggggcccttcccgccggggtgtggccctgcttcgcccagagcccctgcaccgggggacagcagacaccctcctcaaccgggttaagaagctgccttgtcagatcaccagctacctggtggcgcacaccctagggcgccggatgctgtatccaggctctgtgtacctgctgcagaaggccctcatgcctgtgctgctgcagggccaggcccgactggtggaagagtgtaatgggcgccgggcaaagctgctggcctgtgatggcaatgagattgacaccatgtttgtggaccggcgggggacagctgagccccagggacagaagctggtgatctgctgtgaggggaatgctgggttttatgaggtgggctgcgtctccacgcccctggaagctggatattcagtcctgggctggaatcatccaggctttgctggaagcacgggggtgccattcccgcagaatgaggctaatgccatggatgtggtggtccagtttgccatccaccgcctaggcttccagccccaggacatcatcatctacgcctggtccatcggcggcttcactgccacgtgggcagccatgtcctacccagatgttagtgccatgatcctggatgcctcctttgatgacctggtgcccttggccttgaaggtcatgccagacagctggaggggcctggtgaccaggaccgtgaggcagcatctcaatctaaacaacgcggagcagctgtgcagataccagggtcctgtactgctgatccggagaaccaaggatgagatcatcaccaccacggttcctgaggacatcatgtccaaccgaggcaatgacctcctgctgaagctcctgcagcatcggtatccccgggtgatggcagaggagggtcttcgagtggtgaggcagtggttggaggcctcctcacagctggaggaagcctcaatttatagccgatgggaggtggaagaggactggtgtctgtctgtcctccgctcctaccaggcagaacacgggcccgacttcccctggagcgtgggggaggacatgagtgcagatggacggcggcagctggctttgtttctggctcggaagcatctgcacaactttgaggccactcactgcaccccactcccagcccagaacttccagatgccctggcacctctagggaccaactgggactcattatggaagaatggggtgagaggagacatgaggaaagaccctcttatttgtgattctctgtgttcatgttgctgtttatagtttgtggaaagtgggggaccatcccccttctcaccactgttcctcttgcacgtttcccctcattcatgtggctgtacttaaccttctccaacatacatcctgcattacatgaatggattattcctaataattaataaaaaggtattttttctact

SEQ ID NO: 103258 - DNA, 1137 bp, Homo sapiens
  Payload ID: 135
  Gene Symbol: ABHD16A
  Gene Name: abhydrolase domain containing 16A
  ENST ID: ENST00000498420
  CDS Start-End: 76-216
aacacctcagaggcagggagggcggggccggcagggggacctgctgctggaagagcagcggcccgagccggggccatggcgaagctgctgagctgcgtcctaggcccccggctctacaaaatctaccgggagagggactctgaaagggccccggccagcgtccctgagacgccaacggcagtcactgccccccattccagctcctgggttacttgagtttgtccaaagtggtgccgttttctcactatgctgggacattgctgctacttctggcaggtgtggcctgcctccgaggcattggccgctggaccaacccccagtaccggcagttcatcaccatcttggaagcaacacatcggaaccagtcttcagaaaacaagaggcagcttgccaactacaactttgacttccggagctggccagtcgacttccactgggaagaacccagcagccggaaggagtctcgagggggcccttcccgccggggtgtggccctgcttcgcccagagcccctgcaccgggggacagcagacaccctcctcaaccgggttaagaagctgccttgtcagatcaccagctacctggtggcgcacaccctagggcgccggatgctgtatccaggctctgtgtacctgctgcagaaggccctcatgcctgtgctgctgcagggccaggcccgactggtggaagagtgtaatgggcgccgggcaaagctgctggcctgtgatggcaatgagattgacaccatgtttgtggaccggcgggggacagctgagccccagggacagaagctggtgatctgctgtgaggggaatgctgggttttatgaggtgggctgcgtctccacgcccctggaagctggatattcagtcctgggctggaatcatccaggctttgctggaagcacgggggtgccattcccgcagaatgaggctaatgccatggatgtggtggtccagtttgccatccaccgcctaggcttccagccccaggacatcatcatctacgcctggtccatcggcggcttcactgccacgtgggcagccatgtcctacccagatgttagtgccatgatcctggatgcctcctttgatgacctggtgcccttggccttgaaggtcatgccagacagctgga

SEQ ID NO: 103259 - DNA, 2146 bp, Homo sapiens
  Payload ID: 135
  Gene Symbol: ABHD16A
  Gene Name: abhydrolase domain containing 16A
  Uniprot ID: O95870
  ENST ID: ENST00000550556
  CDS Start-End: 306-1883
cataatgggaaataaggggagcctgcttgtcaagccagttatccgcaaaatctgcgctctgtgtgcttcctgagttaaagtcacgcctacggactggccgcctcctttctttttcgctctttaccgctttctcattccgactgccactctttgttctttcctctccgcgtccccccgaccctgtgtgtcgtggttcgtgccggtcccagttgagtcttgagtcccgggaagagaccctgcgcggactggggagccgttgaattttgctgtcagactcccagtttcctcttcttcagtgcctcttcatgcctcccccggctctgtttttatcttccctttaccctcgccttgaatttcagaatgacttttacagatcctgtatccgtcggtcctcccctcaacccccgcccaacctagcctggagacccgagtcattgtattctggagagctggcgggtggtggttacttgagtttgtccaaagtggtgccgttttctcactatgctgggacattgctgctacttctggcaggtgtggcctgcctccgaggcattggccgctggaccaacccccagtaccggcagttcatcaccatcttggaagcaacacatcggaaccagtcttcagaaaacaagaggcagcttgccaactacaactttgacttccggagctggccagtcgacttccactgggaagaacccagcagccggaaggagtctcgagggggcccttcccgccggggtgtggccctgcttcgcccagagcccctgcaccgggggacagcagacaccctcctcaaccgggttaagaagctgccttgtcagatcaccagctacctggtggcgcacaccctagggcgccggatgctgtatccaggctctgtgtacctgctgcagaaggccctcatgcctgtgctgctgcagggccaggcccgactggtggaagagtgtaatgggcgccgggcaaagctgctggcctgtgatggcaatgagattgacaccatgtttgtggaccggcgggggacagctgagccccagggacagaagctggtgatctgctgtgaggggaatgctgggttttatgaggtgggctgcgtctccacgcccctggaagctggatattcagtcctgggctggaatcatccaggctttgctggaagcacgggggtgccattcccgcagaatgaggctaatgccatggatgtggtggtccagtttgccatccaccgcctgggcttccagccccaggacatcatcatctacgcctggtccatcggcggcttcactgccacgtgggcagccatgtcctacccagatgttagtgccatgatcctggatgcctcctttgatgacctggtgcccttggccttgaaggtcatgccagacagctggaggggcctggtgaccaggaccgtgaggcagcatctcaatctaaacaacgcggagcagctgtgcagataccagggtcctgtactgctgatccggagaaccaaggatgagatcatcaccaccacggttcctgaggacatcatgtccaaccgaggcaatgacctcctgctgaagctcctgcagcatcggtatccccgggtgatggcagaggagggtcttcgagtggtgaggcagtggttggaggcctcctcacagctggaggaagcctcaatttatagccgatgggaggtggaagaggactggtgtctgtctgtcctccgctcctaccaggcagaacacgggcccgacttcccctggagcgtgggggaggacatgagtgcagatggacggcggcagctggctttgtttctggctcggaagcatctgcacaactttgaggccactcactgcaccccactcccagcccagaacttccagatgccctggcacctctagggaccaactgggactcattatggaagaatggggtgagaggagacatgaggaaagaccctcttatttgtgattctctgtgttcatgttgctgtttatagtttgtggaaagtgggggaccatcccccttctcaccactgttcctcttgcacgtttcccctcattcatgtggctgtacttaaccttctccaacatacatcctgcattacatgaatggattattcctaataattaataaaaaggtattttttctactatcaggctaa

SEQ ID NO: 103260 - DNA, 2146 bp, Homo sapiens
  Payload ID: 135
  Gene Symbol: ABHD16A
  Gene Name: abhydrolase domain containing 16A
  Uniprot ID: O95870
  ENST ID: ENST00000549722
  CDS Start-End: 306-1883
cataatgggaaataaggggagcctgcttgtcaagccagttatccgcaaaatctgcgctctgtgtgcttcctgagttaaagtcacgcctacggactggccgcctcctttctttttcgctctttaccgctttctcattccgactgccactctttgttctttcctctccgcgtccccccgaccctgtgtgtcgtggttcgtgccggtcccagttgagtcttgagtcccgggaagagaccctgcgcggactggggagccgttgaattttgctgtcagactcccagtttcctcttcttcagtgcctcttcatgcctcccccggctctgtttttatcttccctttaccctcgccttgaatttcagaatgacttttacagatcctgtatccgtcggtcctcccctcaacccccgcccaacctagcctggagacccgagtcattgtattctggagagctggcgggtggtggttacttgagtttgtccaaagtggtgccgttttctcactatgctgggacattgctgctacttctggcaggtgtggcctgcctccgaggcattggccgctggaccaacccccagtaccggcagttcatcaccatcttggaagcaacacatcggaaccagtcttcagaaaacaagaggcagcttgccaactacaactttgacttccggagctggccagtcgacttccactgggaagaacccagcagccggaaggagtctcgagggggcccttcccgccggggtgtggccctgcttcgcccagagcccctgcaccgggggacagcagacaccctcctcaaccgggttaagaagctgccttgtcagatcaccagctacctggtggcgcacaccctagggcgccggatgctgtatccaggctctgtgtacctgctgcagaaggccctcatgcctgtgctgctgcagggccaggcccgactggtggaagagtgtaatgggcgccgggcaaagctgctggcctgtgatggcaatgagattgacaccatgtttgtggaccggcgggggacagctgagccccagggacagaagctggtgatctgctgtgaggggaatgctgggttttatgaggtgggctgcgtctccacgcccctggaagctggatattcagtcctgggctggaatcatccaggctttgctggaagcacgggggtgccattcccgcagaatgaggctaatgccatggatgtggtggtccagtttgccatccaccgcctgggcttccagccccaggacatcatcatctacgcctggtccatcggcggcttcactgccacgtgggcagccatgtcctacccagatgttagtgccatgatcctggatgcctcctttgatgacctggtgcccttggccttgaaggtcatgccagacagctggaggggcctggtgaccaggaccgtgaggcagcatctcaatctaaacaacgcggagcagctgtgcagataccagggtcctgtactgctgatccggagaaccaaggatgagatcatcaccaccacggttcctgaggacatcatgtccaaccgaggcaatgacctcctgctgaagctcctgcagcatcggtatccccgggtgatggcagaggagggtcttcgagtggtgaggcagtggttggaggcctcctcacagctggaggaagcctcaatttatagccgatgggaggtggaagaggactggtgtctgtctgtcctccgctcctaccaggcagaacacgggcctgacttcccctggagcgtgggggaggacatgagtgcagatggacggcggcagctggctttgtttctggctcggaagcatctgcacaactttgaggccactcactgcaccccactcccagcccagaacttccagatgccctggcacctctagggaccaactgggactcattatggaagaatggggtgagaggagacatgaggaaagaccctcttatttgtgattctctgtgttcatgttgctgtttatagtttgtggaaagtgggggaccatcccccttctcaccactgttcctcttgcacgtttcccctcattcatgtggctgtacttaaccttctccaacatacatcctgcattacatgaatggattattcctaataattaataaaaaggtattttttctactatctggctaa

SEQ ID NO: 103261 - DNA, 2146 bp, Homo sapiens; identical to SEQ ID NO: 103259
  Payload ID: 135
  Gene Symbol: ABHD16A
  Gene Name: abhydrolase domain containing 16A
  Uniprot ID: O95870
  ENST ID: ENST00000549853
  CDS Start-End: 306-1883

SEQ ID NO: 103262 - DNA, 2146 bp, Homo sapiens; identical to SEQ ID NO: 103260
  Payload ID: 135
  Gene Symbol: ABHD16A
  Gene Name: abhydrolase domain containing 16A
  Uniprot ID: O95870
  ENST ID: ENST00000548592
  CDS Start-End: 306-1883

SEQ ID NO: 103263 - DNA, 2146 bp, Homo sapiens
  Payload ID: 135
  Gene Symbol: ABHD16A
  Gene Name: abhydrolase domain containing 16A
  Uniprot ID: O95870
  ENST ID: ENST00000552042
  CDS Start-End: 306-1883
cataatgggaaataaggggagcctgcttgtcaagccagttatccgcaaaatctgcgctctgtgtgcttcctgagttaaagtcacgcctacggactggccgcctcctttctttttcgctctttaccgctttctcattccgactgccactctttgttctttcctctccgcgtccccccgaccctgtgtgtcgtggttcgtgccggtcccagttgagtcttgagtcccgggaagagaccctgcgcggactggggagccgttgaattttgctgtcagactcccagtttcctcttcttcagtgcctcttcatgcctcccccggctctgtttttatcttccctttaccctcgccttgaatttcagaatgacttttacagatcctgtatccgtcggtcctcccctcaacccccgcccaacctagcctggagacccgagtcattgtattctggagagctggcgggtggtggttacttgagtttgtccaaagtggtgccgttttctcactatgctgggacattgctgctacttctggcaggtgtggcctgcctccgaggcattggccgctggaccaacccccagtaccggcagttcatcaccatcttggaagcaacacatcggaaccagtcttcagaaaacaagaggcagcttgccaactacaactttgacttccggagctggccagtcgacttccactgggaagaacccagcagccggaaggagtctcgagggggcccttcccgccggggtgtggccctgcttcgcccagagcccctgcaccgggggacagcagacaccctcctcaaccgggttaagaagctgccttgtcagatcaccagctacctggtggcgcacaccctagggcgccggatgctgtatccaggctctgtgtacctgctgcagaaggccctcatgcctgtgctgctgcagggccaggcccgactggtggaagagtgtaatgggcgccgggcaaagctgctggcctgtgatggcaatgagattgacaccatgtttgtggaccggcgggggacagctgagccccagggacagaagctggtgatctgctgtgaggggaatgctgggttttatgaggtgggctgcgtctccacgcccctggaagctggatattcagtcctgggctggaatcatccaggctttgctggaagcacgggggtgccattcccgcagaatgaggctaatgccatggatgtggtggtccagtttgccatccaccgcctaggcttccagccccaggacatcatcatctacgcctggtccatcggcggcttcactgccacgtgggcagccatgtcctacccagatgttagtgccatgatcctggatgcctcctttgatgacctggtgcccttggccttgaaggtcatgccagacagctggaggggcctggtgaccaggaccgtgaggcagcatctcaatctaaacaacgcggagcagctgtgcagataccagggtcctgtactgctgatccggagaaccaaggatgagatcatcaccaccacggttcctgaggacatcatgtccaaccgaggcaatgacctcctgctgaagctcctgcagcatcggtatccccgggtgatggcagaggagggtcttcgagtggtgaggcagtggttggaggcctcctcacagctggaggaagcctcaatttatagccgatgggaggtggaagaggactggtgtctgtctgtcctccgctcctaccaggcagaacacgggcccgacttcccctggagcgtgggggaggacatgagtgcagatggacggcggcagctggctttgtttctggctcggaagcatctgcacaactttgaggccactcactgcaccccactcccagcccagaacttccagatgccctggcacctctagggaccaactgggactcattatggaagaatggggtgagaggagacatgaggaaagaccctcttatttgtgattctctgtgttcatgttgctgtttatagtttgtggaaagtgggggaccatcccccttctcaccactgttcctcttgcacgtttcccctcattcatgtggctgtacttaaccttctccaacatacatcctgcattacatgaatggattattcctaataattaataaaaaggtattttttctactatcaggctaa

SEQ ID NO: 103264 - DNA, 2146 bp, Homo sapiens; identical to SEQ ID NO: 103259
  Payload ID: 135
  Gene Symbol: ABHD16A
  Gene Name: abhydrolase domain containing 16A
  Uniprot ID: O95870
  ENST ID: ENST00000551038
  CDS Start-End: 306-1883

SEQ ID NO: 103265 - DNA, 1491 bp, Homo sapiens
  Payload ID: 136
  Gene Symbol: ABHD16B
  Gene Name: abhydrolase domain containing 16B
  Uniprot ID: Q9H3Z7
  ENST ID: ENST00000369916
  CDS Start-End: 44-1453
gcggcgatcccggcccagcggctgggcgttagggccaccgctcatgtgcgtcatctgcttcgtgaaggcgctggtgcgcgtgttcaagatctacctgaccgccagctacacctacccattccgcggctggcccgtggccttccgctgggatgacgtgcgcgccgtgggccggagcagcagccaccgggcgctgacctgcgcggcagccgcggcgggcgtgtggttgctgcgggacgagacgctgggcggggatgcgctggggcggcctccacgtggggcgcgcagccaggcgcagtgcctcttgcagcagctccgcgagctgcccggccagctcgctagctacgcgctggcccactcgctgggccgctggctcgtgtaccccggctccgtgtccctgatgacgcgcgcgctgctgccgctgctgcagcagggccaagagcgcctcgtggagcgctaccacggccggcgcgccaagctggtggcctgtgacggcaacgagatcgacactatgttcatggaccgccgccagcacccgggcagccacgtgcacgggccgcgcctcgtcatctgctgcgaaggcaacgcgggcttctacgagatgggctgtctgtctgcaccgctcgaggccggctactccgtgctgggctggaaccaccccggcttcggcagcagcactggcgtgcccttccctcagcacgacgccaacgccatggacgtggtggtcgagtacgcactgcaccgcctgcacttcccgcccgcgcacctggtggtctacggctggtctgttggcggcttcacggccacctgggccaccatgacctacccggagctgggtgcactggtgctggacgccaccttcgacgaccttgtgccgctggcgctgaaggtcatgccccacagttggaaggggctggtggtgcgcaccgtgcgcgagcacttcaacctcaacgtggccgagcagctgtgctgctacccggggccggtgctgctgctccgacgcacgcaggatgacgtggtcagcacttcgggccgcctgcgccccctgtcacctggtgacgtggagggcaaccggggcaatgagctgctgctgcgcctgctggagcaccgctaccccgtcgtgatggcgcgagagggccgcgccgtcgtcacccgctggctgcgcgctggcagcttggcgcaggaggccgccttctatgcacgctaccgcgtggacgaggactggtgcctggcgctgctgcgctcctaccgtgcacgctgcgaagaggagctggagggcgaggaggccctggggccacacggacccgccttcccatggctggtgggccagggcctgagctcgcggcggcgccggcgcctcgcactgttcctggctcggaagcacctcaagaacgtggaggcgactcacttcagccctctggagcctgaggagtttcagttgccctggcggctgtaacctatatgccccagtgggggatcacgcacttgaactcc

SEQ ID NO: 103266 - DNA, 1630 bp, Homo sapiens
  Payload ID: 137
  Gene Symbol: ABHD17A
  Gene Name: abhydrolase domain containing 17A
  Uniprot ID: Q96GS6
  ENST ID: ENST00000250974
  CDS Start-End: 321-1406
gcggagggaccgacggacgcacgggcgggcggccgggagccatggagcgcggccctggggcccgggggcgcgggccggggtgggcttcccacggcacgacatggagacctgtggttgcgaggctccctggggctcggcttggaccgcgatggggctgggccctggcctcctaacggggctgctgtctggggcggtagctgggggggcgctctcccccctgcccgcgactcggagcacccccacccctcccctgccgggccaggccgggcggcgttgttggcgggggccccggtggaggcccggcctgggcggcgcccgccatgaatgggctgtcgctgagtgagctctgctgcctcttctgctgcccgccctgccccggccgcatcgctgccaagctcgccttcctgccgccggaggccacctactccctggtgcctgagcccgagccggggcctggtggggccggggccgcccccttggggaccctgagagcctcctcgggcgcacccgggcgctggaagctgcacctgacggagcgtgccgacttccagtacagccagcgcgagctggacaccatcgaggtcttccccaccaagagcgcccgcggcaaccgcgtctcctgcatgtatgttcgctgcgtgcctggtgccagacaaggacaccaggctcagggaggccatccccagctggcatgggtgggcaggctgggcgactccaacaacccagcgcctggtggttgcctgctgggcaagagctggggcacaggggctgccctggcctgcgggtacatccaccttctcgccaggtacacggtcctcttctcgcacggcaatgccgtggacctgggccagatgagcagcttctacattggcctgggctcccgcctccactgcaacatcttctcctacgactactccggctacggtgccagctcgggcaggccttccgagaggaacctctatgccgacatcgacgccgcctggcaggccctgcgcaccaggtacggcatcagcccggacagcatcatcctgtacgggcagagcatcggcacggtgcccaccgtggacctggcctcgcgctacgagtgtgccgcggtggtgctgcactcgccgctcacctcgggcatgcgcgtcgccttccccgacaccaagaagacctactgcttcgacgccttccctaacatcgagaaggtgtccaagatcacgtctcccgtgctcatcatccacggcacggaggacgaggtgatcgacttctcgcacgggctggcgctctacgagcgctgccccaaggcggtggagccgctgtgggtggagggcgccgggcacaacgacatcgagctctacagccagtacctggagcgcctgcgtcgcttcatctcccaggagctgcccagccagcgcgcctagcggcggccccaaccggccggacctcagcaataaggcggcccccggacctcaccccgcgccggcccccacccaggggctgcatgtggaccccccgggcggcccaggggaccccgccccgacccaggggctgtggacgatgtacaggcaacagagctacgcactcctttccttttggaagcaagaagaaaatacgtgaaaacggaaattaaagatttaaaatttta

SEQ ID NO: 103267 - DNA, 1757 bp, Homo sapiens
  Payload ID: 137
  Gene Symbol: ABHD17A
  Gene Name: abhydrolase domain containing 17A
  Uniprot ID: Q96GS6
  ENST ID: ENST00000292577
  CDS Start-End: 435-1367
gacccccgccccgcgcgctcctcgcgtcacttccggggcggtggtgagaacgaggctcacttccgtccgtggggggagctgcggcggtggcggtgcaggaggccgggcaggggtgcggagggaccgacggacgcacgggcgggcggccgggagccatggagcgcggccctggggcccgggggcgcgggccggggtgggcttcccacggcacgacatggagacctgtggttgcgaggctccctggggctcggcttggaccgcgatggggctgggccctggcctcctaacggggctgctgtctggggcggtagctgggggggcgctctcccccctgcccgcgactcggagcacccccacccctcccctgccgggccaggccgggcggcgttgttggcgggggccccggtggaggcccggcctgggcggcgcccgccatgaatgggctgtcgctgagtgagctctgctgcctcttctgctgcccgccctgccccggccgcatcgctgccaagctcgccttcctgccgccggaggccacctactccctggtgcctgagcccgagccggggcctggtggggccggggccgcccccttggggaccctgagagcctcctcgggcgcacccgggcgctggaagctgcacctgacggagcgtgccgacttccagtacagccagcgcgagctggacaccatcgaggtcttccccaccaagagcgcccgcggcaaccgcgtctcctgcatgtatgttcgctgcgtgcctggtgccaggtacacggtcctcttctcgcacggcaatgccgtggacctgggccagatgagcagcttctacattggcctgggctcccgcctccactgcaacatcttctcctacgactactccggctacggtgccagctcgggcaggccttccgagaggaacctctatgccgacatcgacgccgcctggcaggccctgcgcaccaggtacggcatcagcccggacagcatcatcctgtacgggcagagcatcggcacggtgcccaccgtggacctggcctcgcgctacgagtgtgccgcggtggtgctgcactcgccgctcacctcgggcatgcgcgtcgccttccccgacaccaagaagacctactgcttcgacgccttccctaacatcgagaaggtgtccaagatcacgtctcccgtgctcatcatccacggcacggaggacgaggtgatcgacttctcgcacgggctggcgctctacgagcgctgccccaaggcggtggagccgctgtgggtggagggcgccgggcacaacgacatcgagctctacagccagtacctggagcgcctgcgtcgcttcatctcccaggagctgcccagccagcgcgcctagcggcggccccaaccggccggacctcagcaataaggcggcccccggacctcaccccgcgccggcccccacccaggggctgcatgtggaccccccgggcggcccaggggaccccgccccgacccaggggctgtggacgatgtacaggcaacagagctacgcactcctttccttttggaagcaagaagaaaatacgtgaaaacggaaattaaagatttaaaattttagggctgctctccttcctttcatggctctgctcactctctcgagcgctcagcgagctcgaaagggggccggggttcccaggtttcgtccctgagtccctaggagagatcggcacggacccccttataggttttactctgcggaagtggggtgggtctctgtctagtc

SEQ ID NO: 103268 - DNA, 740 bp, Homo sapiens
  Payload ID: 137
  Gene Symbol: ABHD17A
  Gene Name: abhydrolase domain containing 17A
  ENST ID: ENST00000592757
  CDS Start-End: 1-119
cctacgactactccggctacggtgccagctcgggcaggccttccgagaggaacctctatgccgacatcgacgccgcctggcaggccctgcgcaccaggaacctaggcccagagctgtgagggggaggccagagcgtgcccagggcctccaccggggatgtgtcctgttcgtttgagtggtgacatccaggtggcagctcggggctcctgcctgtagcaggtggcagggctgggctggctcagcacactactgaccatggctgccagggagcaggccagggaggccgaggcagagctggagccacaggcaccagccaggcagcatcctttggggcatgggtacggcatcagcccggacagcatcatcctgtacgggcagagcatcggcacggtgcccaccgtggacctggcctcgcgctacgagtgtgccgcggtggtgctgcactcgccgctcacctcgggcatgcgcgtcgccttccccgacaccaagaagacctactgcttcgacgccttccctaacatcgagaaggtgtccaagatcacgtctcccgtgctcatcatccacggcacggaggacgaggtgatcgacttctcgcacgggctggcgctctacgagcgctgccccaaggcggtggagccgctgtgggtggagggcgccgggcacaacgacatcgagctctacagccagtacctggagcgcctgcgtcgcttcatctcccaggagctgcccagccagcgcgc

SEQ ID NO: 103269 - DNA, 1079 bp, Homo sapiens
  Payload ID: 137
  Gene Symbol: ABHD17A
  Gene Name: abhydrolase domain containing 17A
  ENST ID: ENST00000590661
  CDS Start-End: 20-697
ggcctgggcggcgcccgccatgaatgggctgtcgctgagtgagctctgctgcctcttctgctgcccgccctgccccggccgcatcgctgccaagctcgccttcctgccgccggaggccacctactccctggtgcctgagcccgagccggggcctggtggggccggggccgcccccttggggaccctgagagcctcctcgggcgcacccgggcgctggaagctgcacctgacggagcgtgccgacttccagtacagccagcgcgagctggacaccatcgaggtcttccccaccaagagcgcccgcggcaaccgcgtctcctgcatgtatgttcgctgcgtgcctggtgccagcttctacattggcctgggctcccgcctccactgcaacatcttctcctacgactactccggctacggtgccagctcgggcaggccttccgagaggaacctctatgccgacatcgacgccgcctggcaggccctgcgcaccagagcatcggcacggtgcccaccgtggacctggcctcgcgctacgagtgtgccgcggtggtgctgcactcgccgctcacctcgggcatgcgcgtcgccttccccgacaccaagaagacctactgcttcgacgccttccctaacatcgagaaggtgtccaagatcacgtctcccgtgctcatcatccacggcacggaggacgaggtgatcgacttctcgcacgggctggcgctctacgagcgctgccccaaggcggtggagccgctgtgggtggagggcgccgggcacaacgacatcgagctctacagccagtacctggagcgcctgcgtcgcttcatctcccaggagctgcccagccagcgcgcctagcggcggccccaaccggccggacctcagcaataaggcggcccccggacctcaccccgcgccggcccccacccaggggctgcatgtggaccccccgggcggcccaggggaccccgccccgacccaggggctgtggacgatgtacaggcaacagagctacgcactcctttccttttggaagcaagaagaaaatacgtgaaaacggaaattaaagatttaaaatt

SEQ ID NO: 103270 - DNA, 2614 bp, Homo sapiens
  Payload ID: 138
  Gene Symbol: ABHD17B
  Gene Name: abhydrolase domain containing 17B
  Uniprot ID: Q5VST6
  ENST ID: ENST00000333421
  CDS Start-End: 113-979
cggacggcgcccggagcgcggatctcgccttgtggaggacagcgcgtcggctgcggttctctctcgaccccttctgcccggcgcttcggcccgggccgctcaggtgcagagcatgaataatctttcatttagtgagctatgttgcctcttctgctgtccaccttgtccagggaagattgcttcaaaattagcgtttttgccacctgatccaacttacacactgatgtgtgatgaaagcggaagccgttggactttacatctgtctgaacgagcagactggcagtattcttctagagaaaaagatgctattgagtgtttcatgactagaaccagtaaaggcaacagaattgcttgtatgtttgtacgttgttcacccaatgcgaaatacactttactcttctcacatggaaatgctgttgatcttggtcaaatgagcagcttttacataggactaggatcacggattaattgtaatatattctcatatgattattctggatatggtgccagttccgggaaacccacagagaagaacctctatgcagacattgaagctgcttggcttgctcttaggacaagatatggcattcgccctgaaaatgtgattatatatggccaaagtatagggacagtaccgtctgtggatcttgctgctcgatatgagagtgctgctgttattcttcattctcctctgacttcgggaatgcgagttgcctttcctgataccaagaagacctactgttttgatgcattcccaaacattgacaaaatctctaagataacctctccagtattaataattcatgggactgaagatgaagtcattgacttttcacatggcctcgcattgtttgaacgttgccaaagacctgtggagcctctctgggttgaaggagcaggtcacaatgatgtggaactttatggacagtatcttgaaaggttgaaacagtttgtgtcacaggaactggtaaatttgtaaaatattctgtaaatttgctactgggttttcctttcttgctgaactgcactctttggtaaataacataaaacctgaaggttttgtttgcaaatcatgtcagttgccttcataaatgtacaggtaatgatttgttaacagacttaatgaaggttttaattaccagaactaaaaactggaaataacagtaccgtgcagtcaggctgtgtaatttatattttttctgtgaatttttttttaacatcaagatgagtactgtatgagattttaattctataaaatcaaatgctgtaaaagtattgccaaatgcttttgcatactagaaacaaatttataaatatttttaaaacatctcaatatattaaatcttatcctggaatacaactgtaatattttgaaaaaagctatgtatctaaagcaatttaagtactcataatggaatgaactgtaaaagagatttaaaaccatgcaagttcactagaattaacctaaaccctgttgtacagggatagaggtttaaagttattttattgtaaaatacattgaattttctgtatactctgattacatacatttatcctttaaaaaagatgtaaatcttaatttttatgccatctattaatttaccaatgagttaccttgtaaatgagaagtcatgatagcactgaattttaactagttttgacttctaagtttggtactgtgaggcaagtacttaaaattttcatgctggttacttaaaaggcatttagagatttcaagaatgattttgtatacgatgttttaaattttgactgatctcatagtcttcatagaattgcagtagtcttcattgtatgaaatcccgaaagtccatgagttgatcttaaagaccactaacagactggctatcagatcccttttcactttggctatttttttcattttttgagatggagtcttgctgtgtcactgaggctggagtgcagtggcgcgatcttgattcactgcaacctctgcctcccgggatcaagtgattctcctgcctcagcctcctgagtagctggtattacagatgcttgccaccacgcctggctaatttttgtatttttagtagagacagggttttgccatgttgatcaggctggtcttgaactcctgacctcatgatctgcccttggcctcccaaagtgtcggaattacaggcatgagccactgcgcctggcccactttagctatttttaaaaataggacctattgttttggattactatctgagaatttcatggattcactcctgggtataggagataagaatacgtttaattcataacttttatattaaccaatatagtaaaaaaataaagctcacacatacaaaaactaagttgcctttccttgaatgaaccctgtctgaataaaacaatgaaaaataaaaataaaattaatggtatgtagtctaatttgtaaatgaatgaatatggaaataatacacactgtggatatattttaaggccttatgtagttttaattgttctgctcgttccgtggttatgtttaagactatagtatatgactctcttcaaagtatatcaagtattgtgaatgctttggttcagatgtgtcaaattaacagtaaaacaacaaatataccactga

SEQ ID NO: 103271 - DNA, 1312 bp, Homo sapiens
  Payload ID: 138
  Gene Symbol: ABHD17B
  Gene Name: abhydrolase domain containing 17B
  Uniprot ID: Q5VST6
  ENST ID: ENST00000377041
  CDS Start-End: 302-1183
cagcgccccgcaccggggccgttagtcagcagaacgcgagctcttgtggaggagcagggccggcgcgaggcgagactcgggagcgtgagcggggcccctggggcgccgccgtccttcttcgccccggcgccgggggctgtagccctggtccccgctcctctgtcgggccagtctgcaggcggagagagtcggacggcgcccggagcgcggatctcgccttgtggaggacagcgcgtcggctgcggttctctctcgaccccttctgcccggcgcttcggcccgggccgctcaggtgcagagcatgaataatctttcatttagtgagctatgttgcctcttctgctgtccaccttgtccagggaagattgcttcaaaattagcgtttttgccacctgatccaacttacacactgatgtgtgatgaaagcggaagccgttggactttacatctgtctgaacgagcagactggcagtattcttctagagaaaaagatgctattgagtgtttcatgactagaaccagtaaaggcaacagaattgcttgtatgtttgtacgttgttcacccaatgcgaaatacactttactcttctcacatggaaatgctgttgatcttggtcaaatgagcagcttttacataggactaggatcacggattaattgtaatatattctcatatgattattctggatatggtgccagttccgggaaacccacagagaagaacctctatgcagacattgaagctgcttggcttgctcttaggacaagatatggcattcgccctgaaaatgtgattatatatggccaaagtatagggacagtaccgtctgtggatcttgctgctcgatatgagagtgctgctgttattcttcattctcctctgacttcgggaatgcgagttgcctttcctgataccaagaagacctactgttttgatgcattcccaaacattgacaaaatctctaagataacctctccagtattaataattcatgggactgaagatgaagtcattgacttttcacatggcctcgcattgtttgaacgttgccaaagacctgtggagcctctctgggttgaaggagcaggtcacaatgatgtggaactttatggacagtatcttgaaaggttgaaacagtttgtgtcacaggaactggtgcagaaacataaagaagggaagtgattttctcaaggtctacagttttcaatgacggtactatgtattccattatcttctctttaccaaacttaactggattaatataccaatgatcctttcaaattatatgacataaacttatttgctctccaa

SEQ ID NO: 103272 - DNA, 2368 bp, Homo sapiens
  Payload ID: 139
  Gene Symbol: ABHD17C
  Gene Name: abhydrolase domain containing 17C
  Uniprot ID: Q6PCB6
  ENST ID: ENST00000258884
  CDS Start-End: 128-1117
ggcgggcgggctgcagccgccctccgcgctcgcctgccagctccctcgccgcgcgtccgtcctccgtcctcccgggccagccagccagccagccagccgggccggcggcgggcaccaggccgtcccgatgcccgagccaggccccaggatgaacggcttctcgctgggtgagctgtgctggctcttctgctgcccgccctgcccgagccgcatcgccgccaagctggccttcctgccgcccgagcccacctacacggtgctggcgccggagcagcgcggcgccggcgcgtccgccccggccccggcccaggctaccgccgccgccgccgcggcccagccggcaccgcagcagcccgaggagggcgcgggcgcggggcccggtgcgtgcagcctgcacctcagcgagcgcgccgactggcagtactcgcagcgcgagctggacgccgtcgaggtcttcttctcgcgcacggcccgggacaaccggctcggctgcatgttcgtgcgctgcgcgccctccagccgctacacgctgctcttctcgcacggcaacgccgtggacctgggccagatgtgcagcttctacattggcctcggctcccgcatcaactgcaacatcttctcctacgactactcgggatacggcgtcagctcgggcaagccctccgagaagaacctctacgccgacatcgacgccgcgtggcaggcgctgcgcacccggtatggcgtgagtcccgagaacattatcctctatggtcagagcattgggactgtccccacggtagacttggcctcgaggtatgaatgcgcagcggtaattctccattcccctctgatgtctggtttgcgtgtggcttttccggataccaggaaaacatactgctttgatgctttccccagcattgacaagatatctaaagtcacctctcctgtgttggtcattcatggtacagaggatgaggtcatcgatttctcccatggcctagcgatgtacgagcgctgtccccgagccgtggagcccctttgggttgaaggggctgggcataatgacatagagctttatgcacaatacctagaaagactaaaacagttcatatctcacgaacttcctaattcctgaagacaacaacttgatcttacctcatttactgtgaacagaagagtcctctgttttgcacatgctttaactgggtagctgtaaaggcttgataaccatgaagaagtgcccaacctttagggtgttctaatcaaagagctgatgaaatctcagtcttttgtatctagaggtggttctgctaattcacacaacacgttaaactgaacagtcgtgattcccagcttcattaccttgcaggaatgggaatgagagctgaatgtagggacaattttctagtgctgtataaagtagcctcgcatctgtttctcaaccttatccatcatttctgacattcatgcaggacttgccctgttgccaccaatgttctcggtatttcacatgcagctctctttctgccactggatacatgggttcaatccatttgtgaagctgtgatagtgtaactggaaagctagtgtggtgaaaattcctttattattttttgttaacatgctgatctttcccggacaaatgaactgaagggtaatttactggaactctcgtgtacagcttcatcaactgtaaccatataaatataactggaatattcttaaacaaaaagaaactaggggtttttttaagtgtaaatttattactagccaacagagttttactattttgattgtctggttggtttaacaaagagcctagctgactttccttctgtaaagtcctccttgtaggcttttttaaagtactgtacatatttgcaatcacattgtgcatagattcttaatggtagatatgatttcttttgtcaggctacaacaatgaactgcagattccttgtttgtaatgtaaatgattgaatacattttgttaatatgtttttattcctatgttttgctattaaaaattttataacatttccaagacaaaaattccaagtttatgctttgaagaatttatgtaattaaaatttcactaaactaatctttttagtttaggaattatttgggttttgacactggaagttgcgccaaataagcatcagaaataggagatgcttaacattgctatactacttgtgttggttaggggtttggatttgggggttctttggttttaatttttttttccacatttaaaagccttaaatgtactgtaagcctcagatcgttgtacaactggactgcggttgattgccagtttgtgtactgttgcttggatgcggcacagtggttggtaatggaataaaggatgcatggatcagaa

SEQ ID NO: 103273 - DNA, 1976 bp, Homo sapiens
  Payload ID: 139
  Gene Symbol: ABHD17C
  Gene Name: abhydrolase domain containing 17C
  Uniprot ID: Q6PCB6
  ENST ID: ENST00000558464
  CDS Start-End: 120-1007
ggctgcagccgccctccgcgctcgcctgccagctccctcgccgcgcgtccgtcctccgtcctcccgggccagccagccagccagccagccgggccggcggcgggcaccaggccgtcccgatgcccgagccaggccccaggatgaacggcttctcgctgggtgagctgtgctggctcttctgctgcccgccctgcccgagccgcatcgccgccaagctggccttcctgccgcccgagcccacctacacggtgctggcgccggagcagcgcggcgccggcgcgtccgccccggccccggcccaggctaccgccgccgccgccgcggcccagccggcaccgcagcagcccgaggagggcgcgggcgcggggcccggtgcgtgcagcctgcacctcagcgagcgcgccgactggcagtactcgcagcgcgagctggacgccgtcgaggtcttcttctcgcgcacggcccgggacaaccggctcggctgcatgttcgtgcgctgcgcgccctccagccgctacacgctgctcttctcgcacggcaacgccgtggacctgggccagatgtgcagcttctacattggcctcggctcccgcatcaactgcaacatcttctcctacgactactcgggatacggcgtcagctcgggcaagccctccgagaagaacctctacgccgacatcgacgccgcgtggcaggcgctgcgcacccggtatggcgtgagtcccgagaacattatcctctatggtcagagcattgggactgtccccacggtagacttggcctcgagcattgacaagatatctaaagtcacctctcctgtgttggtcattcatggtacagaggatgaggtcatcgatttctcccatggcctagcgatgtacgagcgctgtccccgagccgtggagcccctttgggttgaaggggctgggcataatgacatagagctttatgcacaatacctagaaagactaaaacagttcatatctcacgaacttcctaattcctgaagacaacaacttgatcttacctcatttactgtgaacagaagagtcctctgttttgcacatgctttaactgggtagctgtaaaggcttgataaccatgaagaagtgcccaacctttagggtgttctaatcaaagagctgatgaaatctcagtcttttgtatctagaggtggttctgctaattcacacaacacgttaaactgaacagtcgtgattcccagcttcattaccttgcaggaatgggaatgagagctgaatgtagggacaattttctagtgctgtataaagtagcctcgcatctgtttctcaaccttatccatcatttctgacattcatgcaggacttgccctgttgccaccaatgttctcggtatttcacatgcagctctctttctgccactggatacatgggttcaatccatttgtgaagctgtgatagtgtaactggaaagctagtgtggtgaaaattcctttattattttttgttaacatgctgatctttcccggacaaatgaactgaagggtaatttactggaactctcgtgtacagcttcatcaactgtaaccatataaatataactggaatattcttaaacaaaaagaaactaggggtttttttaagtgtaaatttattactagccaacagagttttactattttgattgtctggttggtttaacaaagagcctagctgactttccttctgtaaagtcctccttgtaggcttttttaaagtactgtacatatttgcaatcacattgtgcatagattcttaatggtagatatgatttcttttgtcaggctacaacaatgaactgcagattccttgtttgtaatgtaaatgattgaatacattttgttaatatgtttttattcctatgttttgctattaaaaattttataacatttccaagacaaaaattccaagtttatgctttgaagaatttatgtaattaaaatttcactaaactaa

SEQ ID NO: 103274 - DNA, 627 bp, Homo sapiens
  Payload ID: 139
  Gene Symbol: ABHD17C
  Gene Name: abhydrolase domain containing 17C
  ENST ID: ENST00000560609
  CDS Start-End: 194-478
ttttactcagtccctgttcaagatggagctgctcccattcaaacacttctgacatgtttactactgcctggcacagaggtatggcgtgagtcccgagaacattatcctctatggtcagagcattgggactgtccccacggtagacttggcctcgaggtatgaatgcgcagcggtaattctccattcccctctgatgtctggtttgcgtgtggcttttccggataccaggaaaacatactgctttgatgctttccccagcattgacaagatatctaaagtcacctctcctgtgttggtcattcatggtacagaggatgaggtcatcgatttctcccatggcctagcgatgtacgagcgctgtccccgagccgtggagcccctttgggttgaaggggctgggcataatgacatagagctttatgcacaatacctagaaagactaaaacagttcatatctcacgaacttcctaattcctgaagacaacaacttgatcttacctcatttactgtgaacagaagagtcctctgttttgcacatgctttaactgggtagctgtaaaggcttgataaccatgaagaagtgcccaacctttagggtgttctaatcaaagagctgatgaaatctca

SEQ ID NO: 103275 - DNA, 5450 bp, Homo sapiens
  Payload ID: 140
  Gene Symbol: ABHD18
  Gene Name: abhydrolase domain containing 18
  ENST ID: ENST00000388795
  CDS Start-End: 404-1552
gccgcgccgccctgctccgggtttgtcttcctccctccgtttctccttccgctgtatctagcatttcggttcctggaaaggttaccggagctgcgattggggctgggaccaaagttgagtcctggaaagggagcctggagagcggcggtgctgggaggcccggccagctcgatcgcaggcttccacctggcggccaatgcttgtttgctactgatgggtgtgagcaagttagatattctataccggagacttctcctaacaaaactttttatcagaggatggggaaggccagaagatctcaaaagactctttgaattcagaaagatgattggaaatcgggaaagatgccagaatctggtttcaagcgattatccagtacacattgataaggattattgatgaaatgcttgataccaacttgattcttctacctttgttccaatttattgtgcctaaagaatggaacagcaaatatagacctgtatgcattcatcttgctggaacaggagatcatcattactggaggcgacgaacactaatggcccgtcctatgattaaagaagcccgaatggcttctttattgttagaaaacccttattatggctgcaggaaacccaaggaccaagtaaggtccagcttaaaaaatgtgtccgacctttttgtgatgggaggagctcttgttttagaatctgcagctctcttgcactggctagagagggaaggttacggccctttaggaatgactggaatatccatgggaggacacatggcttccttagcggtatccaactggcctaagcccatgccattgattccatgcctgtcttggtccacagcatctggggtcttcactacgggtgtgttgagtaaatcaattaattggagggagctggaaaagcaatattatacccagacagtttatgaagaagaaattattcacatgcttgaatactgtggaacagattctttcaaaatgggacaagagtttgtgaaacacttcactagcagtgcagacaagctaactaaccttaatctggtttccagaactttaaatttagatatatcaaaccaagttgtatcccaaaaacctgctgactgccataattctagcaaaacatctgtcagtgcgacatcagaaggactcttattgcaagatacctctaagatgaagcgcttcaatcaaacactttcaaccaacaaaagtggttatacaagtcgcaaccctcagtcataccacctacttagtaaagaacaaagcagaaacagtcttcggaaagagtctttaatatttatgaaaggagtcatggatgaatgtactcatgtagcaaatttctcagtcccagttgatccaagcctcattatagtggttcaagccaaagaagatgcctatattccacgaacaggagttcgaagtttacaagaaatttggcctggttgtgaaatccgatacttagaagggggtcatattagtgcttatctttttaaacaaggactcttcagacaagccatctatgatgcatttgaccgcttcctccataaatacgctaactagttggattattatatgtaaccagtgtggccatgatgtttcttacaaaagggagcttcatcctgtgatcatgtgaaggacaagcagacagcactaatatatctaatcgctatcaatttggtctggaattcattgttacacatcagttaactataaacttcgaatacatttgaataatttcaagataatatttgaagtaaataatgttaaagtgtttttactattgtttattggaatcccatatattcagtgtttagtctgttgttactgtttatgaaaaactaaatttttaatcatgaataatttattaaattaaataaatttattcatagaaacttttctgggttttagtaaaattgctaaatcaaaccaagattttaatatatcagcatttactttgtacccttataacatttcactcttgacttgatttgagaaacatgtttattttttgaatgttcttgtgttcaactaattttctgctgtggaaataaatacttatgatatataaaatcagtgttaactttgaattctaaaatatcctgatagcttcatagataagtgcttttctttttcttttttttttcttttaacatgtacctctacttgaatgtaagtgcttttaataatcaaagtgagtggcagggtgcggtggctcacgcctgtaatcccagcactgggatgctgaagcgggcagattacctgaggttgggagttcaagaccagcctgaccaatatagagaaaccccctctctactacaaatacaaaaaattagccaagcatggtggcgcatgcctataatcccagatactcaggaggcagaggcaggagaatcgcttgaacccgggaggcagaggttgcggtgatccgagatcacaccattgcactccagcctgggcaacaagagtgaaactccgtctcaaaataataataataaccaaaatgagtgttctgcagataaaatgcattagactttgctagactaaaactttactaaagattagggtttttaaaaaatgccaataggccgggtgcagtggctcatgcctgtaatcccagcactttgggacgctcaggcgggcggatcacaaggtcaggagtttaagaccagcctggccaacatggtgaaaccccatgtctactaaaagtacaaaaaaattagccgggcattgtggcgtgtgcctgtaatcccagctactcaggaggctgaggcaggagaattggttgaaccaaggaggcggaggttgcactgagctgagattgcgccactgcactccagcctgggcaacagagcaaaactccatctcaaaaaaaaaaaaaaaaaaaaaaaaaaattaagccgggcatggtggcaggcacctgtaatcccagctactcgggaggctgaggcaggagaattgcttgaacccgggaggcagaagttgcagtgagcggagatcgcaccactgcactccagcctaggagaaggagcaagactctgtctcaaaacaaaacaaaatgccaaacttatttctccctactaaaaagtttcaattcacaaaaatggaaacattggaagacctgttgcattaactgacggagtgcagtggcatgatcttggctcactgcgacctccgcctctcaggttcaagcggttctcctgcctccacctgagtagctgagattacaggtgcccgccaccatgcctggctaatttttgtatttttaatagacacgaggtttcaccatgttggccaagctggtctcgaattcctgacctcaagtgatatgcctgccttggcctcccaaagtgctgggattataggtttgagccaccacacccgacctgacattttatttttatttttttaattacatttttctatatgcttattctttggattgctaaccatctaactacccaaatacttaacagccttggcttttaatttcaaaatttaatagacacatatgcaattgatttgtcccatataaactttattttacagaaaatatttaaagttttatgtaatagctattaactctcttaaatggggtttatatggctcgatttggtgctttctttttatgttaaacttctctagctgtcagctaaaatgttaaaaaagtcgaaaatattttagggtattgtgtgaagttttacagtaggtatttttgagttttgtttgaaatctgtgttgtctgtgaattatttttaaatagggattcttagtctactaacgatatttgaattataatgtgcctttgcagtctttttaaaggagatttcatttgtcacctctatgcctctatcatcttaattttttacaaatatttaaaaattattaatgtgaagttattgatggtagacaaagtagtaacttctttcaaactactttggcataacaagccaacactgtacagctctttgagctataagcaattttacatgttcagatgagaacctttagttttaaccaaaagtataacatctactaaagttcttccacaaaatactttttaaaataaaacttgtcaactgaattacgattttcttatattatgtatatagtgaggttatatgattgaatgctttttgaacaatggttttagtaaaacaaatactttattattgttcacataaacatttcttactaagcaataatgtactatgttgtgtgaatttctattgttaaaaaaatgaaatgttgatttagttttaattcttaggcataactaacttttctcaaataaagtgtgaaagaaagtatttttaaaatttcatctcttaaccagatgttttaagaatatatccctaggccgggtgcagtggctcacacctgtaatcccagcactttgggaggccgaggtggggggaccacctgaggttgggagttcgagactagcctgaccaatatggagaaaccccatctctattaaaaatacaaaatttttaaaaaaaatacaaaattagccaggcgtggtggcacatgcctgtaatcccagctactcaggaggctgagccaggagaatcgcttgaacccgggagacggaggttgcagtaagccgagattgtgccattgcactccagcctgggcaacaagagcaaaactctgtctcaaaaaatatatatatatccctaaaactacctcagttgaagaattcaaagtgcaaaataacttttcttaggattttttaatctattccccccaaaatggtggcttaagtgttctcaaatacataaatatacacatatacgtatatgtatacgttttatatatatatacacacacacgtatgtgtgtatatatatgtatgtacgtatatatatgtattatatatacacacatatgcatatatatatatatatatatatatatatatatatatatataatctcaaagaagtgcggtctgccatttatctgccattttgaggatttaggtactacataaaatattagaaattcatttagaccagatctgtaaactggtagttcacataggccagtttgacccacagttattttattagatgtacataatgtttcaaaaatgtttgaatttgaaaagtcttttgattgggtgtgtgttccccagtttgccacagcctactggacttccctcttatatcagacaacttctctactttgtagttcctgctcagccctgaagacctctaagtttgagacccctgatttagatctgtaattagaaaaaggttctgaatttcatgatttgctaatgtaattactattaagtcattttagcatgtgcattttagagtccttctttgtatttttgtaatgtggtgctttctctcataaagataattgaattgttaacactgtaattgaaattttaaaaatcatttccaaatcttttattatatttcacagtaaaagtctatttaaaaagctaa

SEQ ID NO: 103276 - DNA, 2177 bp, Homo sapiens
  Payload ID: 140
  Gene Symbol: ABHD18
  Gene Name: abhydrolase domain containing 18
  Uniprot ID: Q0P651
  ENST ID: ENST00000398965
  CDS Start-End: 319-1563
agcgcagggcgaaaggaggctgtgtcctcagcctcctccctcggcacgcgcctcccatcctgacggggactgagagcccaggagagctcggggcgtgtccaaactgccgcgccgccctgctccgggtttgtcttcctccctccgtttctccttccgctgtatctagcatttcggttcctggaaaggttaccggagctgcgattggggctgggaccaaagttgagtcctggaaagggagcctggagagcggcggtgctgggaggcccggccagctcgatcgcaggcttccacctggcggccaatgcttgtttgctactgatgggtgtgagcaagttagatattctataccggagacttctcctaacaaaactttttatcagaggatggggaaggccagaagatctcaaaagactctttgaattcagaaagatgattggaaatcgggaaagatgccagaatctggtttcaagcgattatccagtacacattgataagattgaagagcaatcagattgtaagatcttagatggacactttgtttcccccatggctcactatgtgcctgatatcatgccaattgaatctgttattgcaaggttccaatttattgtgcctaaagaatggaacagcaaatatagacctgtatgcattcatcttgctggaacaggagatcatcattactggaggcgacgaacactaatggcccgtcctatgattaaagaagcccgaatggcttctttattgttagaaaacccttattatggctgcaggaaacccaaggaccaagtaaggtccagcttaaaaaatgtgtccgacctttttgtgatgggaggagctcttgttttagaatctgcagctctcttgcactggctagagagggaaggttacggccctttaggaatgactggaatatccatgggaggacacatggcttccttagcggtatccaactggcctaagcccatgccattgattccatgcctgtcttggtccacagcatctggggtcttcactacgacagattctttcaaaatgggacaagagtttgtgaaacacttcactagcagtgcagacaagctaactaaccttaatctggtttccagaactttaaatttagatatatcaaaccaagttgtatcccaaaaacctgctgactgccataattctagcaaaacatctgtcagtgcgacatcagaaggactcttattgcaagatacctctaagatgaagcgcttcaatcaaacactttcaaccaacaaaagtggttatacaagtcgcaaccctcagtcataccacctacttagtaaagaacaaagcagaaacagtcttcggaaagagtctttaatatttatgaaaggagtcatggatgaatgtactcatgtagcaaatttctcagtcccagttgatccaagcctcattatagtggttcaagccaaagaagatgcctatattccacgaacaggagttcgaagtttacaagaaatttggcctggttgtgaaatccgatacttagaagggggtcatattagtgcttatctttttaaacaaggactcttcaggtaagacggctggtctaaacatgtattcgttcatttgttgtttgttttctggattttttgcttcaacaaatgtaaaagatcacatatttttatagtctgtttcaatctttgaattccctcctcacctcccacaaatctcacagagttacttttccctctttcctagaatttgatcttcttattttcttctagagaactaagcatgatgcatattataggcatgctttatcgtgtggctttcccctcttcaaatattaatggccaggtattttaggatgtgagaaggaagatcatggcttgttaaagttgctttggtgcatcaagagttttttcactctattctgatgttttttcagaatggcctgaacatctgtggaataatttagcaatgtttttcagttagcaagtgaatattgaaccttaaataagaagtgcttttaatgtgaacaaccttatatgactccactattttagttagaacttataaaaacttttatgctggctgggcgcggtggcttacgcctgtaatcccagcactttgggaggcggaggcgggtgtatcacgaggtcaggagatcaaggccatcctggctaacacggtgaaaccccgtctctagt

SEQ ID NO: 103277 - DNA, 2129 bp, Homo sapiens
  Payload ID: 140
  Gene Symbol: ABHD18
  Gene Name: abhydrolase domain containing 18
  Uniprot ID: Q0P651
  ENST ID: ENST00000444616
  CDS Start-End: 248-1492
gagagcccaggagagctcggggcgtgtccaaactgccgcgccgccctgctccgggtttgtcttcctccctccgtttctccttccgctgtatctagcatttcggttcctggaaaggttaccggagctgcgattggggctgggaccaaagttgagtcctggaaagggagcctggagagcggcggtgctgggaggcccggccagctcgatcgcaggcttccacctggcggccaatgcttgtttgctactgatgggtgtgagcaagttagatattctataccggagacttctcctaacaaaactttttatcagaggatggggaaggccagaagatctcaaaagactctttgaattcagaaagatgattggaaatcgggaaagatgccagaatctggtttcaagcgattatccagtacacattgataagattgaagagcaatcagattgtaagatcttagatggacactttgtttcccccatggctcactatgtgcctgatatcatgccaattgaatctgttattgcaaggttccaatttattgtgcctaaagaatggaacagcaaatatagacctgtatgcattcatcttgctggaacaggagatcatcattactggaggcgacgaacactaatggcccgtcctatgattaaagaagcccgaatggcttctttattgttagaaaacccttattatggctgcaggaaacccaaggaccaagtaaggtccagcttaaaaaatgtgtccgacctttttgtgatgggaggagctcttgttttagaatctgcagctctcttgcactggctagagagggaaggttacggccctttaggaatgactggaatatccatgggaggacacatggcttccttagcggtatccaactggcctaagcccatgccattgattccatgcctgtcttggtccacagcatctggggtcttcactacgacagattctttcaaaatgggacaagagtttgtgaaacacttcactagcagtgcagacaagctaactaaccttaatctggtttccagaactttaaatttagatatatcaaaccaagttgtatcccaaaaacctgctgactgccataattctagcaaaacatctgtcagtgcgacatcagaaggactcttattgcaagatacctctaagatgaagcgcttcaatcaaacactttcaaccaacaaaagtggttatacaagtcgcaaccctcagtcataccacctacttagtaaagaacaaagcagaaacagtcttcggaaagagtctttaatatttatgaaaggagtcatggatgaatgtactcatgtagcaaatttctcagtcccagttgatccaagcctcattatagtggttcaagccaaagaagatgcctatattccacgaacaggagttcgaagtttacaagaaatttggcctggttgtgaaatccgatacttagaagggggtcatattagtgcttatctttttaaacaaggactcttcaggtaagacggctggtctaaacatgtattcgttcatttgttgtttgttttctggattttttgcttcaacaaatgtaaaagatcacatatttttatagtctgtttcaatctttgaattccctcctcacctcccacaaatctcacagagttacttttccctctttcctagaatttgatcttcttattttcttctagagaactaagcatgatgcatattataggcatgctttatcgtgtggctttcccctcttcaaatattaatggccaggtattttaggatgtgagaaggaagatcatggcttgttaaagttgctttggtgcatcaagagttttttcactctattctgatgttttttcagaatggcctgaacatctgtggaataatttagcaatgtttttcagttagcaagtgaatattgaaccttaaataagaagtgcttttaatgtgaacaaccttatatgactccactattttagttagaacttataaaaacttttatgctggctgggcgcggtggcttacgcctgtaatcccagcactttgggaggcggaggcgggtgtatcacgaggtcaggagatcaaggccatcctggctaacacggtgaaaccccgtctctagtaaaaatacaaaaaaaaaaaaaaa

SEQ ID NO: 103278 - DNA, 569 bp, Homo sapiens
  Payload ID: 140
  Gene Symbol: ABHD18
  Gene Name: abhydrolase domain containing 18
  ENST ID: ENST00000513371
  CDS Start-End: 254-569
tttcggttcctggaaaggttaccggagctgcgattggggctgggaccaaagttgagtcctggaaagggagcctggagagcggcggtgctgggaggcccggccagctcgatcgcaggcttccacctggcggccagtccccggatgcgcaccccaacggcgcctgcgcctacgggggcctcagccttgcaaaatgtcactcagcagagcctgctgctgaaacgtgggagttgaaaaagatgcttgtttgctactgatgggtgtgagcaagttagatattctataccggagacttctcctaacaaaactttttatcagaggatggggaaggccagaagatctcaaaagactctttgaattcagaaagatgattggaaatcgggaaagatgccagaatctggtttcaagcgattatccagtacacattgataagattgaagagcaatcagattgtaagatcttagatggacactttgtttcccccatggctcactatgtgcctgatatcatgccaattgaatctgttattgcaaggttccaatttattgtgcctaaagaatggaacagcaaat

SEQ ID NO: 103279 - DNA, 2139 bp, Homo sapiens
  Payload ID: 140
  Gene Symbol: ABHD18
  Gene Name: abhydrolase domain containing 18
  ENST ID: ENST00000473040
  CDS Start-End: 310-507
cgaaaggaggctgtgtcctcagcctcctccctcggcacgcgcctcccatcctgacggggactgagagcccaggagagctcggggcgtgtccaaactgccgcgccgccctgctccgggtttgtcttcctccctccgtttctccttccgctgtatctagcatttcggttcctggaaaggttaccggagctgcgattggggctgggaccaaagttgagtcctggaaagggagcctggagagcggcggtgctgggaggcccggccagctcgatcgcaggcttccacctggcggccaatgcttgtttgctactgatgggtgtgagcaagttagatattctataccggagacttctcctaacaaaactttttatcagaggatggggaaggccagaagatctcaaaagactctttgaattcagaaagatgattggaaatcgggaaagatgccagaatctggtttcaagcgattatccagtacacattgataaggttccaatttattgtgcctaaagaatggaacagcaaatatagacctgtatgcattcatcttgctggaacaggagatcatcattactggaggcgacgaacactaatggcccgtcctatgattaaagaagcccgaatggcttctttattgttagaaaacccttattatatccttttactattcacagaagaagaaatgaaactggtgcacagatataaagaaatgttcaacgttgctggtaataaatgtagagctagaaggtccagcttaaaaaatgtgtccgacctttttgtgatgggaggagctcttgttttagaatctgcagctctcttgcactggctagagagggaaggttacggccctttaggaatgactggaatatccatgggaggacacatggcttccttagcggtatccaactggcctaagcccatgccattgattccatgcctgtcttggtccacagcatctggggtcttcactacgggtgtgttgagtaaatcaattaattggagggagctggaaaagcaatattatacccagacagtttatgaagaagaaattattcacatgcttgaatactgtggaacagattctttcaaaatgggacaagagtttgtgaaacacttcactagcagtgcagacaagctaactaaccttaatctggtttccagaactttaaatttagatatatcaaaccaagttgtatcccaaaaacctgctgactgccataattctagcaaaacatctgtcagtgcgacatcagaaggactcttattgcaagatacctctaagatgaagcgcttcaatcaaacactttcaaccaacaaaagtggttatacaagtcgcaaccctcagtcataccacctacttagtaaagaacaaagcagaaacagtcttcggaaagagtctttaatatttatgaaaggagtcatggatgaatgtactcatgtagcaaatttctcagtcccagttgatccaagcctcattatagtggttcaagccaaagaagatgcctatattccacgaacaggagttcgaagtttacaagaaatttggcctggttgtgaaatccgatacttagaagggggtcatattagtgcttatctttttaaacaaggactcttcagacaagccatctatgatgcatttgaccgcttcctccataaatacgctaactagttggattattatatgtaaccagtgtggccatgatgtttcttacaaaagggagcttcatcctgtgatcatgtgaaggacaagcagacagcactaatatatctaatcgctatcaatttggtctggaattcattgttacacatcagttaactataaacttcgaatacatttgaataatttcaagataatatttgaagtaaataatgttaaagtgtttttactattgtttattggaatcccatatattcagtgtttagtctgttgttactgtttatgaaaaactaaatttttaatcatgaataatttattaaattaaataaatttattcatagaaacttttctgggttttagtaaaattgctaaatcaaaccaagattttaatatatcagcatttactttgtacccttataacatttcactcttgacttgatttgagaaacatgtttattttttgaatgttcttgtgttcaactaat

SEQ ID NO: 103280 - DNA, 1493 bp, Homo sapiens
  Payload ID: 140
  Gene Symbol: ABHD18
  Gene Name: abhydrolase domain containing 18
  Uniprot ID: Q0P651
  ENST ID: ENST00000611882
  CDS Start-End: 399-1364
attggggctgggaccaaagttgagtcctggaaagggagcctggagagcggcggtgctgggaggcccggccagctcgatcgcaggcttccacctggcggccaatgcttgtttgctactgatgggtgtgagcaagttagatattctataccggagacttctcctaacaaaactttttatcagaggatggggaaggccagaagatctcaaaagactctttgaattcagaaagatgattggaaatcgggaaagatgccagaatctggtttcaagcgattatccagtacacattgataaggttccaatttattgtgcctaaagaatggaacagcaaatatagacctgtatgcattcatcttgctggaacaggagatcatcattactggaggcgacgaacactaatggcccgtcctatgattaaagaagcccgaatggcttctttattgttagaaaacccttattatggctgcaggaaacccaaggaccaagtaaggtccagcttaaaaaatgtgtccgacctttttgtgatgggaggagctcttgttttagaatctgcagctctcttgcactggctagagagggaaggttacggccctttaggaatgactggaatatccatgggaggacacatggcttccttagcggtatccaactggcctaagcccatgccattgattccatgcctgtcttggtccacagcatctggggtcttcactacgggtgtgttgagtaaatcaattaattggagggagctggaaaagcaatattatacccagacagtttatgaagaagaaattattcacatgcttgaatactgtggaacagattctttcaaaatgggacaagagtttgtgaaacacttcactagcagtgcagacaagctaactaaccttaatctggtttccagaactttaaatttagatatatcaaaccaagttgtatcccaaaaacctgctgactgccataattctagcaaaacatctgtcagtgcgacatcagaaggactcttattgcaagatacctctaagatgaagcgcttcaatcaaacactttcaaccaacaaaagtggttatacaagtcgcaaccctcagtcataccacctacttagtaaagaacaaagcagaaacagtcttcggaaagagtctttaatatttatgaaaggagtcatggatgaatgtactcatgtagcaaatttctcagtcccagttgatccaagcctcattatagtggttcaagccaaagaagatgcctatattccacgaacaggagttcgaagtttacaagaaatttggcctggttgtgaaatccgatacttagaagggggtcatattagtgcttatctttttaaacaaggactcttcaggtaagacggctggtctaaacatgtattcgttcatttgttgtttgttttctggattttttgcttcaacaaatgtaaaagatcacatatttttatagtctgtttcaatctttgaattccctcctcacctcccaca

SEQ ID NO: 103281 - DNA, 8735 bp, Homo sapiens
  Payload ID: 141
  Gene Symbol: ABHD2
  Gene Name: abhydrolase domain containing 2
  Uniprot ID: P08910
  ENST ID: ENST00000352732
  CDS Start-End: 521-1798
agccctcctcccctttccccgcccactccgggctggccttatccagtagcgtctgggtccctggactaaagccgtcaaatgtaaccaattgctgaggagctctcccctaagaatcccgcctccactctgaggaacagcttcgctgatcaatggatcccctcctagacgcaatgagcgcgcggggcaagtggagaagcggctgaactgcccaatgaacaagcggtttccgtggttaggggcgtggcagaagcggtcgtcaggggcgtggcggcagttacttgggcggggccggtagcggcgggagctgcactggccaggggttccggctgtatatccatgagcgccgctggcagccggggagctgcaggaaccagactgggggcgagctgagcacctgtagtcaatcacacgcagcttttaggtttgtttgaataagagatctgacctgaccggcccaactgtacaactcttcaaggaaaattcgtatttgcagtgggaagaataagtaacattgatcaagatgaatgccatgctggagactcccgaactcccagccgtgtttgatggagtgaagctggctgcagtggctgctgtgctgtacgtgatcgtccggtgtttgaacctgaagagccccacagccccacctgacctctacttccaggactcggggctctcacgctttctgctcaagtcctgtcctcttctgaccaaagaatacattccaccgttgatctgggggaaaagtggacacatccagacagccttgtatgggaagatgggaagggtgaggtcgccacatccttatgggcaccggaagttcatcactatgtctgatggagccacttctacattcgacctcttcgagcccttggctgagcactgtgttggagatgatatcaccatggtcatctgccctggaattgccaatcacagcgagaagcaatacatccgcactttcgttgactacgcccagaaaaatggctatcggtgcgccgtgctgaaccacctgggtgccctgcccaacattgaattgacctcgccacgcatgttcacctatggctgcacgtgggaatttggagccatggtgaactacatcaagaagacatatcccctgacccagctggtcgtcgtgggcttcagcctgggtggtaacattgtgtgcaaatacttgggggagactcaggcaaaccaagagaaggtcctgtgctgcgtcagcgtgtgccaggggtacagtgcactgagggcccaggaaaccttcatgcaatgggatcagtgccggcggttctacaacttcctcatggctgacaacatgaagaagatcatcctctcgcacaggcaagctctttttggagaccatgttaagaaaccccagagcctggaagacacggacttgagccggctctacacagcaacatccctgatgcagattgatgacaatgtgatgaggaagtttcacggctataactccctgaaggaatactatgaggaagaaagttgcatgcggtacctgcacaggatttatgttcctctcatgctggttaatgcagctgacgatccgttggtgcatgaaagtcttctaaccattccaaaatctctttcagagaaacgagagaacgtcatgtttgtgctgcctctgcatgggggccacttgggcttctttgagggctctgtgctgttccccgagcccctgacatggatggataagctggtggtggagtacgccaacgccatttgccaatgggagcgtaacaagttgcagtgctctgacacggagcaggtggaggccgacctggagtgaggcctccggactctggcacgctccagcagccctcctctggaagctgcgtcccctcaccccctgtttcaggtctcccatctccctcagtgacctggatctgacctcacaccatcagcagggggcacccaccatgcacacctgtctcggagtaggcagctcttcctgggagctccaggctatttttgtgcttagttactggttttctccattgcattgttaggcatggtgacaagtgacagagttcttgccctctgtccagtttcagcatctggttgcttttaagccaagtacatctagtttccctattaaaaatgtgtctgaatagcgattttgctttgccaccaaaaggcttttccctgagaacagtgaaggatgtatgtcattttgtggtggttgtatgtgtccttacatagaccttaaaaagagctcacccttccaggccaatgctgaagacacagctccgcttgggagcctgagaacccaggcttcccaggccagagtgtggcttcttaaacggcaaaggaaattcctttgagtcacaagccaagttttcgccctgtctcctgagaccatttccctacgctttgctgctgctgagagttacgtgaggcacttgttaaaaattcagcctcccaggtccctcccctcggagaggctgattcactgggtctgggaaggagcctggggattttaatttttcacaagtgccccagatgattctcatcaccaagcaaattttggaaatgctgttcaacagcgcccttaaattggaaacatctttgcagctcgttttattgaaattcataatcaggggtgtcctctagctcccacggtctccagagcagcaaggccggctatggagctgccgtcgtgtgaccacagtgtgatgtctcagaagggctctgggtgggctgagcatctgggctgtgccctggctctgcttttcaccctggacaaagtcgctgtggacttcaatttcttcacctctaaaatgggggacttggaccaggtagattgctgagctcactaccaggttcaaagttcaatgacaaactcagtttactgaggtttgagagaacatccctccaggggagcctgggagctgctctcccagtctaagcatgtagatatcatcgtttgccttttgtgtgtgtgtgtcccttatttgataaaaagatgttttgagttgttttttttttaagcactcacttgtaattttagtttttaaacccaagtccctctaactttgcctttgataccaaacaattcaaaagttggatctgagtttggagaaagatatttccaacctaagtgggtattattttgaaaccagatttttaatttaatagcctatatttgtagtctgttggataggtgtttccaaagtgtgtcttctcaagtgaaaacgcaactctaggtttcaagtactccttttctccgatcctgtggtacttgaatatccaaaaaccctgcactttgaacaatcagctgttgctatctggaactaaacagaactatgagtaaaattgcctggatactttaaaaagatatttttcctccttcatctcctttgactccaggacagactggaatataagtagtgggtctgcatggatgtttcagggatcaaaggagccacctgggcgcctgagtgccaaccctcagggccacaggtgggtgtggtttgggcacgggtccaagtgactgtgacgggacccgtgggcatgggtccaggtctgtaacctgaagaagttgttttctgacaatcaccaaatcatccgaatgacatcaaaagcagcccttatctcagagactgagatttctgtggtctcaacttcgctttggtataatttctggcactcaccagcctctatcattatgactttccccccagtgtattatttctctaataggtttccttttcacgttcttttagcacagactggcactttaccctctcagtttggaagttagcccctctcctctgttacttttcccttcacccaactacagctgtgatctagaacattcatagtcatatttctgctactactaccttcatttatcaagactttttatgagaataggtaaaccaagcaataacttcctaggactgaatcaccaccccagaagagcgagaggctcctttcatatgcctgaggccacaccccttaacctgttctgacaaaatagtggctggcccatgtaccagctccattcagaaattcaggaagagaaaagacagccctgttgtcacacaaaccggtgtgggggagggtggagcctggtctgcacggcagtcctggtggcccctgtggaggacaggcagggctggcagcatagcctttgttgccacacaaccggaatttgctcccccaggactgtgggagccagtgtcccagctgaaatctttttagtgtgtggctctgaatggcactcacattccattttggctcacatgaaactaactgaagccctttgttcaagcttcaggctcttaggcatggaaatgagaatgtgactgtggctgtcttacaggaaaattcttgtttgtccctgaatgagagcacagaggcattgaattcacagagctgcaaacttgcctgataaatgagggagtggcagtttatagataggtcatcttttttccttcctccaggtgtccttgcctttcttcccaaagtcattcatttctgatgagtatatgaatccccctcttgctagtaaggttctatttgggctaaaacaaggctgaatttttaaagagtatttgaatatattttagaatcaaattgaggctataaattgcatcaatctggacaattccattgcaggaataatatgttaaaaaccaatggggagaagcacccacatctctcctgtagcactccgtgtctcataagcaatttgaagacacttacaagtaactgattccagtcaaattaggattaactgactcaaaaaatggtgtcaagtttctttaatgtttttatgttagaagtgagtttaacagacttgaagaaaactgttatcttttcctgctgtgagtttacacaaatgattccagagcagaatgaaagcagaaagctgttggttacaatattcttttaacctctctgcagcattttacacttactgggaaccttatgattcaccgtaagagtggaaatatacctgagttcgtgtcctaatggtctctaattcacattggatcgtgggcaaatcacctcacctctctgagcctgttccctcctcttagaccatctctaagaccacttcatctatttacacatcatttgcttgaacattgctgaacatctgcgtgaacttggcctctccagcccttgcaggtggaaacagctgtgtcaaggctcaaggctcacgctgaggggacttggagggagggggcttctgcattaagctttcctggtgaagacccttgatcttgtccaaagccctgtgtctttgactggcttctcttcagagtccccgttgtcatcgtaagacccttgctgtttggagggtggtcttgtgactgtggcagctgctggccgctggaatgaggagcctatctccatcctccagtgtgactcaggcagagcattgagaattcccagggcagaaatccttcctgctcaggctttcattctaaaactacagtcttcattaaagctgaactttctgggtagctgagcttatatgcccggcatctgaatgagagctctctttgtaactgtgtgacttgagatctagtttgccagctcctgggaaacaatacatgtgttcttgtttgtgtttgctcagcaagcagatgtctgagatgtaagaagcttttcttttcctgtggcattgattctgacttagagctgaagtaaaagatcactgaaacatcacgtcaagttgaagtcactcataggtctttgtcctttaggcaggacaggagagtcattaagaagcatttcactgtagcattctatcacaatatcatctggaattgttttctttgcccagaaagccttaacttgcctctagagaatccctggtattacaacgatattgcggcattagaattccaactcttctgctgtggaagtttgaagcgaagctgcagcaaaaccagagaatttcctcaagtggcctgtaggctccttgttatcttatgcccccacccctccctcaacaatatgagtgatccagaactggcccaaacacctcagctctggtccctttttgcccttcttggccttactctgttgttcaaagccactttggattgcttggatgcttcgaacagccatgaaaagtagcctgcctgtggcatttagaggccaagcaattgacagaaagggtttcttctacctctgttatctaagcagagggaagtaaacctctcaccgccccccacccctcactgcccccgattaccctagaattgctttcgccaaattgtagttgaagctaaggaaggggaatctggcccctgctgggagagggaactggaatgccacacaaggcaaggcctgcttccttccttcccctctgctgctgctgcctcggaacgctgcagcccaggcttcctcccacagtggcccttggaagcaggccgcagagtagacagctgctccttttggaagagtcagtcccctgtgttttctgaactgtttttcctagcatgtatgtgggtagagctttcatgcatctctagtaataataagctgaaattagttttttttttaattctccaatttaaaacttttaattaaaaagtaaattttaatgtcgaaaatgcaaacttggggagggcagaaagatcacacacaaggctgtcacttcatacttgcaggattgcacagcagccgggcagaggcgctcctcacttcccagatggggcggcgggcagcagagacgcacctcacttcctagacagtgcggcagccaggcacaggcacacctcacttcccagacagttgggcggccaggcaagcgctcctcacttcccagatggggcggctcccgggaagcggggctcctcacttcccagacagggtggccaggcagaggtgctcctcacttcccagaacaattctttatgaatttgataaaggactgaagtgcaactgaaagctgctagtgatgatctggtaatatacaatttgtccagtagccagtttgtttttattgtgttttctaaccataagagatcattaaaggcaaagcctgtatgacgctgtacacacacaaaaaaatggtcaccgcaggccatactaccaatgaaatggtaggtaaacaaatcttctggtcaagagaaaaaaaaaagaaatagcactctgcatgctttgctctacaagacgaatttccctagaaagaatccaatgaaggccgggcatagtggctcactcctgtaatcccagcactttggaggccgaggcgggtagatcacctgaggttaggagttcaagaccagcctggccaacatggtgaaaccccttctctactaaaaatgcaaaaattagctgggtgtggtggcgggcgcctgtaatcccagctactcgggaggctgaggtgggagaattgcttgaacccaggagacggaggttgcagtgagccgagatcacgcctctgcactccagcctgggcaacaagagtgagactccgtctccaaaaaaagaaaaggaatccagtgaaaatggctgcaattacaacaagaagtgaaggaagaagactggtgacatctctgaaggatgcagttgaggttgatccaggtttatccgaatatgctacctttctgagccttaaaccttcatctctcaggtgttgatttgcttctgatagcttcatcatttctccctgaagtcttttacactcttctgttagtttccttgtttcagtatcatgaagtgaagcactgtgtggttgtggcgtgggcccgtcttgcttagatgcattcagtgggacagctttgctgggttccatgtcattcaatttatcattttcattggggatctccatttggaatccattaattcatgaggttttgcctcattccacacagcttccatatctgaagtgtttagtggagcaaaaattgtaccataaacttgtgtttactcttttcattcggatcatagtcaaagggctgtagcattactgaaacagtcacagttgaccctgggtcaataattccactgttgggcctcacacagtaccggtgaggcacggtagtcttcactttgaaacacacttttctatccgatggatttcgcaatttaagatttgtagtgactacatctgtgaaggggcctttgaatttgaggtctatgggcgggtcgaggaccaggatctgctcgtgcttcgccgtggccccggaggcagacgccattggagagacagcgcagagcagggggcggcttgctcgctgggggcgggggacgatggcgagaggggagggggagcgagttcgcatctctccttttcctggttagactctgttcaaccacattcttatgttggcagatctgcttccagattgatttttagagcaccatcactttcacattcctgattctgattttgttttgttttgtttgggttttctgaaacttaaaatgctgccccgaaaatactatatttttgagtttgtgttctgaaagcctccgtgctgctggatctttggggggaaatacaggatccttcagcactgaggtgtttaagatttgcaactagcaatgcaattttttctaaatatggggatatttacctttattaagaaattatactaaacattgatgtccttgatcattttatgttctcatattacttttgattctactatgattgtgtggtggtgaacaaagatcattacaaacaaaaactgtaattttgttatatttgattcaatggaatttacctaaaaaataaagactaaaaatgtggtgtg

SEQ ID NO: 103282 - DNA, 8688 bp, Homo sapiens
  Payload ID: 141
  Gene Symbol: ABHD2
  Gene Name: abhydrolase domain containing 2
  Uniprot ID: P08910
  ENST ID: ENST00000355100
  CDS Start-End: 474-1751
tgtcaggagggcgtagtttgcaaaacatccctcccagtggtactgatgccttttcgcaggttctgtcctcttcatttgcaagccactgctttatccacgagggtgctccctacttatgccagtgaattaatttttggcacagatgaatccttcatatttatctggatttagctggtagcatttgtctcctaagacttggtcacagaggaatccatgtgaccttcaggccttctgctctaaactggcaggagatcctgtttctactcacagcgtccgagggtctggtggccgagccctgaggggcgctgttgctcccaggtggcagaattcagcatcagagagccacacagctgaaagagatggatggcttttaggtttgtttgaataagagatctgacctgaccggcccaactgtacaactcttcaaggaaaattcgtatttgcagtgggaagaataagtaacattgatcaagatgaatgccatgctggagactcccgaactcccagccgtgtttgatggagtgaagctggctgcagtggctgctgtgctgtacgtgatcgtccggtgtttgaacctgaagagccccacagccccacctgacctctacttccaggactcggggctctcacgctttctgctcaagtcctgtcctcttctgaccaaagaatacattccaccgttgatctgggggaaaagtggacacatccagacagccttgtatgggaagatgggaagggtgaggtcgccacatccttatgggcaccggaagttcatcactatgtctgatggagccacttctacattcgacctcttcgagcccttggctgagcactgtgttggagatgatatcaccatggtcatctgccctggaattgccaatcacagcgagaagcaatacatccgcactttcgttgactacgcccagaaaaatggctatcggtgcgccgtgctgaaccacctgggtgccctgcccaacattgaattgacctcgccacgcatgttcacctatggctgcacgtgggaatttggagccatggtgaactacatcaagaagacatatcccctgacccagctggtcgtcgtgggcttcagcctgggtggtaacattgtgtgcaaatacttgggggagactcaggcaaaccaagagaaggtcctgtgctgcgtcagcgtgtgccaggggtacagtgcactgagggcccaggaaaccttcatgcaatgggatcagtgccggcggttctacaacttcctcatggctgacaacatgaagaagatcatcctctcgcacaggcaagctctttttggagaccatgttaagaaaccccagagcctggaagacacggacttgagccggctctacacagcaacatccctgatgcagattgatgacaatgtgatgaggaagtttcacggctataactccctgaaggaatactatgaggaagaaagttgcatgcggtacctgcacaggatttatgttcctctcatgctggttaatgcagctgacgatccgttggtgcatgaaagtcttctaaccattccaaaatctctttcagagaaacgagagaacgtcatgtttgtgctgcctctgcatgggggccacttgggcttctttgagggctctgtgctgttccccgagcccctgacatggatggataagctggtggtggagtacgccaacgccatttgccaatgggagcgtaacaagttgcagtgctctgacacggagcaggtggaggccgacctggagtgaggcctccggactctggcacgctccagcagccctcctctggaagctgcgtcccctcaccccctgtttcaggtctcccatctccctcagtgacctggatctgacctcacaccatcagcagggggcacccaccatgcacacctgtctcggagtaggcagctcttcctgggagctccaggctatttttgtgcttagttactggttttctccattgcattgttaggcatggtgacaagtgacagagttcttgccctctgtccagtttcagcatctggttgcttttaagccaagtacatctagtttccctattaaaaatgtgtctgaatagcgattttgctttgccaccaaaaggcttttccctgagaacagtgaaggatgtatgtcattttgtggtggttgtatgtgtccttacatagaccttaaaaagagctcacccttccaggccaatgctgaagacacagctccgcttgggagcctgagaacccaggcttcccaggccagagtgtggcttcttaaacggcaaaggaaattcctttgagtcacaagccaagttttcgccctgtctcctgagaccatttccctacgctttgctgctgctgagagttacgtgaggcacttgttaaaaattcagcctcccaggtccctcccctcggagaggctgattcactgggtctgggaaggagcctggggattttaatttttcacaagtgccccagatgattctcatcaccaagcaaattttggaaatgctgttcaacagcgcccttaaattggaaacatctttgcagctcgttttattgaaattcataatcaggggtgtcctctagctcccacggtctccagagcagcaaggccggctatggagctgccgtcgtgtgaccacagtgtgatgtctcagaagggctctgggtgggctgagcatctgggctgtgccctggctctgcttttcaccctggacaaagtcgctgtggacttcaatttcttcacctctaaaatgggggacttggaccaggtagattgctgagctcactaccaggttcaaagttcaatgacaaactcagtttactgaggtttgagagaacatccctccaggggagcctgggagctgctctcccagtctaagcatgtagatatcatcgtttgccttttgtgtgtgtgtgtcccttatttgataaaaagatgttttgagttgttttttttttaagcactcacttgtaattttagtttttaaacccaagtccctctaactttgcctttgataccaaacaattcaaaagttggatctgagtttggagaaagatatttccaacctaagtgggtattattttgaaaccagatttttaatttaatagcctatatttgtagtctgttggataggtgtttccaaagtgtgtcttctcaagtgaaaacgcaactctaggtttcaagtactccttttctccgatcctgtggtacttgaatatccaaaaaccctgcactttgaacaatcagctgttgctatctggaactaaacagaactatgagtaaaattgcctggatactttaaaaagatatttttcctccttcatctcctttgactccaggacagactggaatataagtagtgggtctgcatggatgtttcagggatcaaaggagccacctgggcgcctgagtgccaaccctcagggccacaggtgggtgtggtttgggcacgggtccaagtgactgtgacgggacccgtgggcatgggtccaggtctgtaacctgaagaagttgttttctgacaatcaccaaatcatccgaatgacatcaaaagcagcccttatctcagagactgagatttctgtggtctcaacttcgctttggtataatttctggcactcaccagcctctatcattatgactttccccccagtgtattatttctctaataggtttccttttcacgttcttttagcacagactggcactttaccctctcagtttggaagttagcccctctcctctgttacttttcccttcacccaactacagctgtgatctagaacattcatagtcatatttctgctactactaccttcatttatcaagactttttatgagaataggtaaaccaagcaataacttcctaggactgaatcaccaccccagaagagcgagaggctcctttcatatgcctgaggccacaccccttaacctgttctgacaaaatagtggctggcccatgtaccagctccattcagaaattcaggaagagaaaagacagccctgttgtcacacaaaccggtgtgggggagggtggagcctggtctgcacggcagtcctggtggcccctgtggaggacaggcagggctggcagcatagcctttgttgccacacaaccggaatttgctcccccaggactgtgggagccagtgtcccagctgaaatctttttagtgtgtggctctgaatggcactcacattccattttggctcacatgaaactaactgaagccctttgttcaagcttcaggctcttaggcatggaaatgagaatgtgactgtggctgtcttacaggaaaattcttgtttgtccctgaatgagagcacagaggcattgaattcacagagctgcaaacttgcctgataaatgagggagtggcagtttatagataggtcatcttttttccttcctccaggtgtccttgcctttcttcccaaagtcattcatttctgatgagtatatgaatccccctcttgctagtaaggttctatttgggctaaaacaaggctgaatttttaaagagtatttgaatatattttagaatcaaattgaggctataaattgcatcaatctggacaattccattgcaggaataatatgttaaaaaccaatggggagaagcacccacatctctcctgtagcactccgtgtctcataagcaatttgaagacacttacaagtaactgattccagtcaaattaggattaactgactcaaaaaatggtgtcaagtttctttaatgtttttatgttagaagtgagtttaacagacttgaagaaaactgttatcttttcctgctgtgagtttacacaaatgattccagagcagaatgaaagcagaaagctgttggttacaatattcttttaacctctctgcagcattttacacttactgggaaccttatgattcaccgtaagagtggaaatatacctgagttcgtgtcctaatggtctctaattcacattggatcgtgggcaaatcacctcacctctctgagcctgttccctcctcttagaccatctctaagaccacttcatctatttacacatcatttgcttgaacattgctgaacatctgcgtgaacttggcctctccagcccttgcaggtggaaacagctgtgtcaaggctcaaggctcacgctgaggggacttggagggagggggcttctgcattaagctttcctggtgaagacccttgatcttgtccaaagccctgtgtctttgactggcttctcttcagagtccccgttgtcatcgtaagacccttgctgtttggagggtggtcttgtgactgtggcagctgctggccgctggaatgaggagcctatctccatcctccagtgtgactcaggcagagcattgagaattcccagggcagaaatccttcctgctcaggctttcattctaaaactacagtcttcattaaagctgaactttctgggtagctgagcttatatgcccggcatctgaatgagagctctctttgtaactgtgtgacttgagatctagtttgccagctcctgggaaacaatacatgtgttcttgtttgtgtttgctcagcaagcagatgtctgagatgtaagaagcttttcttttcctgtggcattgattctgacttagagctgaagtaaaagatcactgaaacatcacgtcaagttgaagtcactcataggtctttgtcctttaggcaggacaggagagtcattaagaagcatttcactgtagcattctatcacaatatcatctggaattgttttctttgcccagaaagccttaacttgcctctagagaatccctggtattacaacgatattgcggcattagaattccaactcttctgctgtggaagtttgaagcgaagctgcagcaaaaccagagaatttcctcaagtggcctgtaggctccttgttatcttatgcccccacccctccctcaacaatatgagtgatccagaactggcccaaacacctcagctctggtccctttttgcccttcttggccttactctgttgttcaaagccactttggattgcttggatgcttcgaacagccatgaaaagtagcctgcctgtggcatttagaggccaagcaattgacagaaagggtttcttctacctctgttatctaagcagagggaagtaaacctctcaccgccccccacccctcactgcccccgattaccctagaattgctttcgccaaattgtagttgaagctaaggaaggggaatctggcccctgctgggagagggaactggaatgccacacaaggcaaggcctgcttccttccttcccctctgctgctgctgcctcggaacgctgcagcccaggcttcctcccacagtggcccttggaagcaggccgcagagtagacagctgctccttttggaagagtcagtcccctgtgttttctgaactgtttttcctagcatgtatgtgggtagagctttcatgcatctctagtaataataagctgaaattagttttttttttaattctccaatttaaaacttttaattaaaaagtaaattttaatgtcgaaaatgcaaacttggggagggcagaaagatcacacacaaggctgtcacttcatacttgcaggattgcacagcagccgggcagaggcgctcctcacttcccagatggggcggcgggcagcagagacgcacctcacttcctagacagtgcggcagccaggcacaggcacacctcacttcccagacagttgggcggccaggcaagcgctcctcacttcccagatggggcggctcccgggaagcggggctcctcacttcccagacagggtggccaggcagaggtgctcctcacttcccagaacaattctttatgaatttgataaaggactgaagtgcaactgaaagctgctagtgatgatctggtaatatacaatttgtccagtagccagtttgtttttattgtgttttctaaccataagagatcattaaaggcaaagcctgtatgacgctgtacacacacaaaaaaatggtcaccgcaggccatactaccaatgaaatggtaggtaaacaaatcttctggtcaagagaaaaaaaaaagaaatagcactctgcatgctttgctctacaagacgaatttccctagaaagaatccaatgaaggccgggcatagtggctcactcctgtaatcccagcactttggaggccgaggcgggtagatcacctgaggttaggagttcaagaccagcctggccaacatggtgaaaccccttctctactaaaaatgcaaaaattagctgggtgtggtggcgggcgcctgtaatcccagctactcgggaggctgaggtgggagaattgcttgaacccaggagacggaggttgcagtgagccgagatcacgcctctgcactccagcctgggcaacaagagtgagactccgtctccaaaaaaagaaaaggaatccagtgaaaatggctgcaattacaacaagaagtgaaggaagaagactggtgacatctctgaaggatgcagttgaggttgatccaggtttatccgaatatgctacctttctgagccttaaaccttcatctctcaggtgttgatttgcttctgatagcttcatcatttctccctgaagtcttttacactcttctgttagtttccttgtttcagtatcatgaagtgaagcactgtgtggttgtggcgtgggcccgtcttgcttagatgcattcagtgggacagctttgctgggttccatgtcattcaatttatcattttcattggggatctccatttggaatccattaattcatgaggttttgcctcattccacacagcttccatatctgaagtgtttagtggagcaaaaattgtaccataaacttgtgtttactcttttcattcggatcatagtcaaagggctgtagcattactgaaacagtcacagttgaccctgggtcaataattccactgttgggcctcacacagtaccggtgaggcacggtagtcttcactttgaaacacacttttctatccgatggatttcgcaatttaagatttgtagtgactacatctgtgaaggggcctttgaatttgaggtctatgggcgggtcgaggaccaggatctgctcgtgcttcgccgtggccccggaggcagacgccattggagagacagcgcagagcagggggcggcttgctcgctgggggcgggggacgatggcgagaggggagggggagcgagttcgcatctctccttttcctggttagactctgttcaaccacattcttatgttggcagatctgcttccagattgatttttagagcaccatcactttcacattcctgattctgattttgttttgttttgtttgggttttctgaaacttaaaatgctgccccgaaaatactatatttttgagtttgtgttctgaaagcctccgtgctgctggatctttggggggaaatacaggatccttcagcactgaggtgtttaagatttgcaactagcaatgcaattttttctaaatatggggatatttacctttattaagaaattatactaaacattgatgtccttgatcattttatgttctcatattacttttgattctactatgattgtgtggtggtgaacaaagatcattacaaacaaaaactgtaattttgttatatttgattcaatggaatttacctaaaaaataaagactaaaaatgtggtgtg

SEQ ID NO: 103283 - DNA, 845 bp, Homo sapiens
  Payload ID: 141
  Gene Symbol: ABHD2
  Gene Name: abhydrolase domain containing 2
  ENST ID: ENST00000565066
  CDS Start-End: 476-845
acttgggcggggccggtagcggcgggagctgcactggccaggggttccggctgtatatccatgagcgccgctggcagccggggagctgcaggaaccagactgggggcgagctgagcacctgtagtcaatcacacgcaggcacagatgaatccttcatatttatctggatttagctggtagcatttgtctcctaagacttggtcacagaggaatccatgtgaccttcaggccttctgctctaaactggcaggagatcctgtttctactcacagcgtccgagggtctggtggccgagccctgaggggcgctgttgctcccaggtggcagaattcagcatcagagagccacacagctgaaagagatggatggcttttaggtttgtttgaataagagatctgacctgaccggcccaactgtacaactcttcaaggaaaattcgtatttgcagtgggaagaataagtaacattgatcaagatgaatgccatgctggagactcccgaactcccagccgtgtttgatggagtgaagctggctgcagtggctgctgtgctgtacgtgatcgtccggtgtttgaacctgaagagccccacagccccacctgacctctacttccaggactcggggctctcacgctttctgctcaagtcctgtcctcttctgaccaaagaatacattccaccgttgatctgggggaaaagtggacacatccagacagccttgtatgggaagatgggaagggtgaggtcgccacatccttatgggcaccggaagttcatcactatgtctgatggagccacttctacattcgacctcttcgagcccttggctgagcactgtgttggag

SEQ ID NO: 103284 - DNA, 557 bp, Homo sapiens
  Payload ID: 141
  Gene Symbol: ABHD2
  Gene Name: abhydrolase domain containing 2
  ENST ID: ENST00000569550
  CDS Start-End: 391-557
agttacttgggcggggccggtagcggcgggagctgcactggccaggggttccggctgtatatccatgagcgccgctggcagccggggagctgcaggaaccagactgggggcgagctgagcacctgtagtcaatcacacgcaggcacagatgaatccttcatatttatctggatttagctggtagcatttgtctcctaagacttggtcacagaggaatccatgtgaccttcaggccttctgctctaaactggcaggagatcctgtttctactcacagcgtccgagcttttaggtttgtttgaataagagatctgacctgaccggcccaactgtacaactcttcaaggaaaattcgtatttgcagtgggaagaataagtaacattgatcaagatgaatgccatgctggagactcccgaactcccagccgtgtttgatggagtgaagctggctgcagtggctgctgtgctgtacgtgatcgtccggtgtttgaacctgaagagccccacagccccacctgacctctacttccaggactcggggctctcacgctttctgct

SEQ ID NO: 103285 - DNA, 2347 bp, Homo sapiens
  Payload ID: 141
  Gene Symbol: ABHD2
  Gene Name: abhydrolase domain containing 2
  Uniprot ID: P08910
  ENST ID: ENST00000565973
  CDS Start-End: 742-2019
gggcggggccggtagcggcgggagctgcactggccaggggttccggctgtatatccatgagcgccgctggcagccggggagctgcaggaaccagactgggggcgagctgagcacctgtagtcaatcacacgcagaaataataatgatacttatgttagaagattgttttgagaagtgcatggagttactacatctgaagcatttagaacagtacctggcacaggaggttagagtgatgtctttcgtccctgtggggagtgaggtggaatgtcaggagggcgtagtttgcaaaacatccctcccagtggtactgatgccttttcgcaggttctgtcctcttcatttgcaagccactgctttatccacgagggtgctccctacttatgccagtgaattaatttttggcacagatgaatccttcatatttatctggatttagctggtagcatttgtctcctaagacttggtcacagaggaatccatgtgaccttcaggccttctgctctaaactggcaggagatcctgtttctactcacagcgtccgagggtctggtggccgagccctgaggggcgctgttgctcccaggtggcagaattcagcatcagagagccacacagctgaaagagatggatggcttttaggtttgtttgaataagagatctgacctgaccggcccaactgtacaactcttcaaggaaaattcgtatttgcagtgggaagaataagtaacattgatcaagatgaatgccatgctggagactcccgaactcccagccgtgtttgatggagtgaagctggctgcagtggctgctgtgctgtacgtgatcgtccggtgtttgaacctgaagagccccacagccccacctgacctctacttccaggactcggggctctcacgctttctgctcaagtcctgtcctcttctgaccaaagaatacattccaccgttgatctgggggaaaagtggacacatccagacagccttgtatgggaagatgggaagggtgaggtcgccacatccttatgggcaccggaagttcatcactatgtctgatggagccacttctacattcgacctcttcgagcccttggctgagcactgtgttggagatgatatcaccatggtcatctgccctggaattgccaatcacagcgagaagcaatacatccgcactttcgttgactacgcccagaaaaatggctatcggtgcgccgtgctgaaccacctgggtgccctgcccaacattgaattgacctcgccacgcatgttcacctatggctgcacgtgggaatttggagccatggtgaactacatcaagaagacatatcccctgacccagctggtcgtcgtgggcttcagcctgggtggtaacattgtgtgcaaatacttgggggagactcaggcaaaccaagagaaggtcctgtgctgcgtcagcgtgtgccaggggtacagtgcactgagggcccaggaaaccttcatgcaatgggatcagtgccggcggttctacaacttcctcatggctgacaacatgaagaagatcatcctctcgcacaggcaagctctttttggagaccatgttaagaaaccccagagcctggaagacacggacttgagccggctctacacagcaacatccctgatgcagattgatgacaatgtgatgaggaagtttcacggctataactccctgaaggaatactatgaggaagaaagttgcatgcggtacctgcacaggatttatgttcctctcatgctggttaatgcagctgacgatccgttggtgcatgaaagtcttctaaccattccaaaatctctttcagagaaacgagagaacgtcatgtttgtgctgcctctgcatgggggccacttgggcttctttgagggctctgtgctgttccccgagcccctgacatggatggataagctggtggtggagtacgccaacgccatttgccaatgggagcgtaacaagttgcagtgctctgacacggagcaggtggaggccgacctggagtgaggcctccggactctggcacgctccagcagccctcctctggaagctgcgtcccctcaccccctgtttcaggtctcccatctccctcagtgacctggatctgacctcacaccatcagcagggggcacccaccatgcacacctgtctcggagtaggcagctcttcctgggagctccaggctatttttgtgcttagttactggttttctccattgcattgttaggcatggtgacaagtgacagagttcttgccctctgtccagtttcagcatctggttgcttttaagccaagtacatctagtttccctattaaaaatgtgtctgaatagcga

SEQ ID NO: 103286 - DNA, 558 bp, Homo sapiens
  Payload ID: 141
  Gene Symbol: ABHD2
  Gene Name: abhydrolase domain containing 2
  ENST ID: ENST00000569411
  CDS Start-End: 165-558
aaagcagtttcaggctcatagaattttagaaatgggcctagtttcccagccggatgagcttttaggtttgtttgaataagagatctgacctgaccggcccaactgtacaactcttcaaggaaaattcgtatttgcagtgggaagaataagtaacattgatcaagatgaatgccatgctggagactcccgaactcccagccgtgtttgatggagtgaagctggctgcagtggctgctgtgctgtacgtgatcgtccggtgtttgaacctgaagagccccacagccccacctgacctctacttccaggactcggggctctcacgctttctgctcaagtcctgtcctcttctgaccaaagaatacattccaccgttgatctgggggaaaagtggacacatccagacagccttgtatgggaagatgggaagggtgaggtcgccacatccttatgggcaccggaagttcatcactatgtctgatggagccacttctacattcgacctcttcgagcccttggctgagcactgtgttggagatgatatcaccatggtcatctgcc

SEQ ID NO: 103287 - DNA, 2064 bp, Homo sapiens
  Payload ID: 142
  Gene Symbol: ABHD3
  Gene Name: abhydrolase domain containing 3
  Uniprot ID: Q8WU67
  ENST ID: ENST00000289119
  CDS Start-End: 141-1370
gtcggaagccgcgctccgccaggcaggagacactgtggtcgggagtaggcagcggcgccgcgtccgctctcgcccgctctcgcccgctcgccagccggctctcctcccgccgcaggacccgcgcgccgcgctcgggggccatgcagcgcctggccatggacctgcggatgttgtcccgggagctctccctctacctggaacaccaagtccgggtggggttcttcggctcgggggtgggcttatcccttatcctgggcttcagcgtcgcttatgccttctactacctgagcagcattgccaagaaaccccagttagtgaccgggggtgagagtttcagccgcttccttcaagaccactgtcccgtggttacagaaacgtactacccgacggtctggtgctgggagggtcgaggacagaccctgcttagacctttcatcacttcgaagcccccggtgcagtacaggaatgaacttattaaaactgcagatggaggacagatttcactggactggtttgataatgataacagtacgtgttatatggatgccagcaccagacctactatcttattgttgcctggcctcacgggaacaagcaaggagtcatatatccttcatatgatccatcttagtgaagaattaggatacagatgtgtggtttttaacaacagaggagtggcgggggagaatctcttgacgccaaggacttattgttgtgctaacactgaagacttggagacagttattcaccatgtacacagcctgtacccttctgctcctttcctggcagcaggggtttcaatgggaggaatgctgcttctaaattacttgggcaaaattgggtccaaaacgcctttgatggcagctgcaactttttccgttggttggaacaccttcgcttgctcagagtcattggaaaaaccactgaactggctactttttaattactatttgacaacctgccttcagtcttcagttaataagcaccgacatatgtttgtaaaacaagttgatatggatcatgtcatgaaggctaaatccatcagagagtttgataagcgattcacttcagtcatgtttggataccaaacaattgatgattattatactgatgccagtccgagtcctagactgaagtcagtaggaattccagtattgtgtctaaattctgtggatgatgttttctcacccagtcatgctattccaatagaaactgctaagcaaaatcctaatgttgctttggtccttacttcttatggaggccatattggttttctggagggaatctggccaagacagtccacttacatggatcgtgtcttcaagcaatttgtgcaagccatggttgagcatggacatgaactctcttaacatgtagttctttgggtgcattttgtctgaaccacaattgtgaaggcagctcagcttagtgcacaaattttaactgttgtatataaagcaaataagccagcagatgggtgaagaggtccagaatgatatgcaaaaactactttttagagaaacaaaacaactttgtagcaacaaattaaatatagtattagattgttacttacgtagattttatttttactatgccttaccaagtacatccttaaacaaagtagtatgtacatgaaattgcacttaaccaaaactattgtgtaaaacaaattttaattcctcagggttttaatttaaactagtatttttttagattatttgttttaggtgatttaatggtactttaataactactaagaaatattggctatttcaatgtaagttataaggtggtacattcctaagggtatttatagttgatgataacatgaaaactgaaataagataaaatacaacgtgctaaatcttttatgtattctaactttaaaagacaagtgcaacaaagttagactgacttctatatgtgctcttttactctgataatattaaattaggactaacttatgttttataatgattataatttacatgcttatttttaaaatagtatatgtggacacatatatatcattatattaaaataaattctaccattttaaattgg

SEQ ID NO: 103288 - DNA, 2080 bp, Homo sapiens
  Payload ID: 142
  Gene Symbol: ABHD3
  Gene Name: abhydrolase domain containing 3
  ENST ID: ENST00000578270
  CDS Start-End: 942-1586
aagtctttgccggtttctggtttacggttggcagaaactttgctctgggcccttctctgatactgcttttcccttcagaaaccccagttagtgaccgggggtgagagtttcagccgcttccttcaagaccactgtcccgtggttacagaaacgtactacccgacggtctggtgctgggagggtcgaggacagaccctgcttagacctttcatcacttcgaagcccccggtgcagtacaggaatgaacttattaaaactgcagatggaggacagatttcactggactggtttgataatgataacagtacgtgttatatggatgccagcaccagacctactatcttattgttgcctggcctcacgggaacaagcaaggagtcatatatccttcatatgatccatcttagtgaagaattaggatacagatgtgtggtttttaacaacagaggagtggcgggggagaatctcttgacgccaaggacttattgttgtgctaacactgaagacttggagacagttattcaccatgtacacagcctgtacccttctgctcctttcctggcagcaggggtttcaatgggagggtaaggttttccctttctaaaataatctctgagagggaagctattttattggctgtctctttgagaggactataagctagctgtatggacactttttaaataaatgtctgattatgtttatcatattttattaaatgcggttgattgaatgaacgaaggaaggaaagaattaattcaggtgaattttaatatttttcttaactacgggtctctgtgactgcggattttgtgagcctgaaggtttgtctgaagcccatgaagtcgattgcatcactcaccggctgccatgttgaccttctgattcctgacgcactcccagccatccctggagctgcgttctgaagctgaacttgtagcatgactttcatcactccagttacagaaataatcacttattgctctctccagctgcagtggccttcaaaattatttttccccagaatgctgcttctaaattacttgggcaaaattgggtccaaaacgcctttgatggcagctgcaactttttccgttggttggaacaccttcgcttgctcagagtcattggaaaaaccactgaactggctactttttaattactatttgacaacctgccttcagtcttcagttaataagcaccgacatatgtttgtaaaacaagttgatatggatcatgtcatgaaggctaaatccatcagagagtttgataagcgattcacttcagtcatgtttggataccaaacaattgatgattattatactgatgccagtccgagtcctagactgaagtcagtaggaattccagtattgtgtctaaattctgtggatgatgttttctcacccagtcatgctattccaatagaaactgctaagcaaaatcctaatgttgctttggtccttacttcttatggaggccatattggttttctggagggaatctggccaagacagtccacttacatggatcgtgtcttcaagcaatttgtgcaagccatggttgagcatggacatgaactctcttaacatgtagttctttgggtgcattttgtctgaaccacaattgtgaaggcagctcagcttagtgcacaaattttaactgttgtatataaagcaaataagccagcagatgggtgaagaggtccagaatgatatgcaaaaactactttttagagaaacaaaacaactttgtagcaacaaattaaatatagtattagattgttacttacgtagattttatttttactatgccttaccaagtacatccttaaacaaagtagtatgtacatgaaattgcacttaaccaaaactattgtgtaaaacaaattttaattcctcagggttttaatttaaactagtatttttttagattatttgttttaggtgatttaatggtactttaataactactaagaaatattggctatttcaatgtaagttataaggtggtacattcctaagggtatttatagttgatgataacatgaaaactgaaataagataaaatacaacgtgctaaa

SEQ ID NO: 103289 - DNA, 1836 bp, Homo sapiens
  Payload ID: 142
  Gene Symbol: ABHD3
  Gene Name: abhydrolase domain containing 3
  ENST ID: ENST00000580981
  CDS Start-End: 103-1173
tcgggagtaggcagcggcgccgcgtccgctctcgcccgctctcgcccgctcgccagccggctctcctcccgccgcaggacccgcgcgccgcgctcgggggccatgcagcgcctggccatggacctgcggatgttgtcccgggagctctccctctacctggaacaccaagtccgggtggggttcttcggctcgggggtgggcttatcccttatcctgggcttcagcgtcgcttatgccttctactacctgagcagcattgccaagaaaccccagttagtgaccgggggtgagagtttcagccgcttccttcaagaccactgtcccgtggttacagaaacgtactacccgacggtctggtgctgggagggtcgaggacagaccctgcttagacctttcatcacttcgaagcccccggtgcagtacaggaatgaacttattaaaactgcagatggaggacagatttcactggactggtttgataatgataacagtacgtgttatatggatgccagcaccagacctactatcttattgttgcctggcctcacgggaacaagcaaggagtcatatatccttcatatgatccatcttagtgaagaattaggatacagaatgctgcttctaaattacttgggcaaaattgggtccaaaacgcctttgatggcagctgcaactttttccgttggttggaacaccttcgcttgctcagagtcattggaaaaaccactgaactggctactttttaattactatttgacaacctgccttcagtcttcagttaataagcaccgacatatgtttgtaaaacaagttgatatggatcatgtcatgaaggctaaatccatcagagagtttgataagcgattcacttcagtcatgtttggataccaaacaattgatgattattatactgatgccagtccgagtcctagactgaagtcagtaggaattccagtattgtgtctaaattctgtggatgatgttttctcacccagtcatgctattccaatagaaactgctaagcaaaatcctaatgttgctttggtccttacttcttatggaggccatattggttttctggagggaatctggccaagacagtccacttacatggatcgtgtcttcaagcaatttgtgcaagccatggttgagcatggacatgaactctcttaacatgtagttctttgggtgcattttgtctgaaccacaattgtgaaggcagctcagcttagtgcacaaattttaactgttgtatataaagcaaataagccagcagatgggtgaagaggtccagaatgatatgcaaaaactactttttagagaaacaaaacaactttgtagcaacaaattaaatatagtattagattgttacttacgtagattttatttttactatgccttaccaagtacatccttaaacaaagtagtatgtacatgaaattgcacttaaccaaaactattgtgtaaaacaaattttaattcctcagggttttaatttaaactagtatttttttagattatttgttttaggtgatttaatggtactttaataactactaagaaatattggctatttcaatgtaagttataaggtggtacattcctaagggtatttatagttgatgataacatgaaaactgaaataagataaaatacaacgtgctaaatcttttatgtattctaactttaaaagacaagtgcaacaaagttagactgacttctatatgtgctcttttactctgataatattaaattaggactaacttatgttttataatgattataatttacatgcttatttttaaaatagtatatgtggacacatatatatcatta

SEQ ID NO: 103290 - DNA, 1311 bp, Homo sapiens
  Payload ID: 142
  Gene Symbol: ABHD3
  Gene Name: abhydrolase domain containing 3
  Uniprot ID: Q8WU67
  ENST ID: ENST00000577891
  CDS Start-End: 110-520
actgtggtcgggagtaggcagcggcgccgcgtccgctctcgcccgctctcgcccgctcgccagccggctctcctcccgccgcaggacccgcgcgccgcgctcgggggccatgcagcgcctggccatggacctgcggatgttgtcccgggagctctccctctacctggaacaccaagtccgggtggggttcttcggctcgggggtgggcttatcccttatcctgggcttcagcgtcgcttatgccttctactacctgagcagcattgccaagaaacgtactacccgacggtctggtgctgggagggtcgaggacagaccctgcttagacctttcatcacttcgaagcccccggtgcagtacaggaatgaacttattaaaactgcagatggaggacagatttcactggactggtttgataatgataacagtacgtgttatatggatgccagcaccagacctactatcttattgttgcctggcctcacgggaacaagcaaggagtcatatatccttcatatgatccatcttagtgaagaattaggatacagatgtgtggtttttaacaacagaggagtggcgggggagaatctcttgacgccaaggacttattgttgtgctaacactgaagacttggagacagttattcaccatgtacacagcctgtacccttctgctcctttcctggcagcaggggtttcaatgggagggtaaggttttccctttctaaaataatctctgagagggaagctattttattggctgtctctttgagaggactataagctagctgtatggacactttttaaataaatgtctgattatgtttatcatattttattaaatgcggttgattgaatgaacgaaggaaggaaagaattaattcaggtgaattttaatatttttcttaactacgggtctctgtgactgcggattttgtgagcctgaaggtttgtctgaagcccatgaagtcgattgcatcactcaccggctgccatgttgaccttctgattcctgacgcactcccagccatccctggagctgcgttctgaagctgaacttgtagcatgactttcatcactccagttacagaaataatcacttattgctctctccagctgcagtggccttcaaaattatttttccccagaatgctgcttctaaattacttgggcaaaattgggtccaaaacgcctttgatggcagctgcaactttttccgttggttggaacaccttcgcttgctcagagtcattggaaaaaccactgaactggctactttttaattactatttgacaacctgccttcagtctt

SEQ ID NO: 103291 - DNA, 440 bp, Homo sapiens
  Payload ID: 142
  Gene Symbol: ABHD3
  Gene Name: abhydrolase domain containing 3
  ENST ID: ENST00000584464
  CDS Start-End: 1-337
cgtggttacagaaacgtactacccgacggtctggtgctgggagggtcgaggacagaccctgcttagacctttcatcacttcgaagcccccggtgcagtacaggaatgaacttattaaaactgcagatggaggacagatttcactggactggtttgataatgataacagtacgtgttatatggatgccagcaccagacctactatcttattgttgcctggcctcacgggaacaagcaaggagtcatatatccttcatatgatccatcttagtgaagaattaggatacagatgtgtggtttttaacaacagaggagtggcgggggagaatctcttgtgacttaggcactggaggaaatgaagatcaacacgatttcgaaagcaaaagttgcagagtgttatggtcttactcaagtgccttgtaataaatagcttgacgtgaa

SEQ ID NO: 103292 - DNA, 291 bp, Homo sapiens
  Payload ID: 142
  Gene Symbol: ABHD3
  Gene Name: abhydrolase domain containing 3
  ENST ID: ENST00000580477
  CDS Start-End: 1-113
attatactgatgccagtccgagtcctagactgaagtcagtaggaattccagtattgtgtctaaattctgtggatgatgttttctcacccagtcatggtaatcttagaagctgaaacttacagccttgaccacaatttagaaaatgaaactctgaactttaatatcagttgacttacatggtgattgttttagcatattttcattggattaaggaagtccagtatttctctacccgtttttatatttcactgccctttttaccaataaaaagttcccaacattttaacctta

SEQ ID NO: 103293 - DNA, 716 bp, Homo sapiens
  Payload ID: 143
  Gene Symbol: ABHD4
  Gene Name: abhydrolase domain containing 4
  ENST ID: ENST00000216327
  CDS Start-End: 8-457
gtttactatggccgatgatctggagcagcagtctcaaggctggctgagtagctggctgcccacgtggcgccccacttccatgtctcagctgaagaatgtggaagccaggatcctccagtgcttcgggcgaagctcaaggccagcattcccaagggacccggagggggctgaggatgagtttgtgacatcgatagagacatggcgggagaccatggggatccccagcatgatcctcctggggcacagtttgggaggattcctggccacttcttactcaatcaagtaccctgatagagttaaacacctcatcctggtggacccatggggctttcccctccgaccaactaaccccagtgagatccgtgcacccccagcctgggtcaaagccgtggcatctgtcctaggacgttccaatccattggctgttcttcgagtagctgggccctggggtgagtagcctgaatacaaaggtgactaagattctgcctcagtctctgaagagaccaacaagttgacatattctgctgtgaagtttattgctgttttgcttttgacagtggtgagacagcattcaaagccatgatggagtcctttggctgggcccggcgccctatgctggagcgaattcacttgattcgaaaagatgtgcctatcactatgatctacgggtccgacacctggatagataccagtacgggaaaaaaggtgaagatgca

SEQ ID NO: 103294 - DNA, 1003 bp, Homo sapiens
  Payload ID: 143
  Gene Symbol: ABHD4
  Gene Name: abhydrolase domain containing 4
  Uniprot ID: Q8TB40
  ENST ID: ENST00000418446
  CDS Start-End: 4-549
actatggccgatgatctggagcagcagtctcaaggctggctgagtagctggctgcccacgtggcgccccacttccatgtctcagctgaagaatgtggaagccaggatcctccagtgtctccagaataagttcctggccagatatgtatccctcccaaaccagaataagatctggacggtgactgtgagccccgagcaaaacgaccgcacccccttggtgatggtgcatggttttgggggcggcgtgggtctctggatcctcaacatggactcactgagtgcccgccgcacactgcacaccttcgatctgcttggcttcgggcgaagctcaaggccagcattcccaagggacccggagggggctgaggatgagtttgtgacatcgatagagacatggcgggagaccatggggatccccagcatgatcctcctggggcacagtttgggaggattcctggccacttcttactcaatcaagtaccctgatagggcctggtctggtgcagcgattccggccggacttcaaacgcaagtttgcagacttctttgaagatgataccatatcagagtatatttaccactgcaacgcacagaatcccagtggtgagacagcattcaaagccatgatggagtcctttggctgggcccggcgccctatgctggagcgaattcacttgattcgaaaagatgtgcctatcactatgatctacgggtccgacacctggatagataccagtacgggaaaaaaggtgaagatgcagcggccggattcctatgtccgagacatggagattaagggtgcctcccaccatgtctatgctgaccagccacacatcttcaatgctgtggtggaggagatctgcgactcagttgattgagctgctctctgaagaggaagaggagaaagccagagagtcactcttacctccctgtctgcttactcacccactctgtcctttcctcaccaactaacatgtgccagccaggcagagtcttgtgctgtt

SEQ ID NO: 103295 - DNA, 3366 bp, Homo sapiens
  Payload ID: 143
  Gene Symbol: ABHD4
  Gene Name: abhydrolase domain containing 4
  Uniprot ID: Q8TB40
  ENST ID: ENST00000428304
  CDS Start-End: 71-1099
ctcccgggtcagctggtgctggcgtcaggcgctgggcgggctcgccaggacctggcaaggcttgtttactatggccgatgatctggagcagcagtctcaaggctggctgagtagctggctgcccacgtggcgccccacttccatgtctcagctgaagaatgtggaagccaggatcctccagtgtctccagaataagttcctggccagatatgtatccctcccaaaccagaataagatctggacggtgactgtgagccccgagcaaaacgaccgcacccccttggtgatggtgcatggttttgggggcggcgtgggtctctggatcctcaacatggactcactgagtgcccgccgcacactgcacaccttcgatctgcttggcttcgggcgaagctcaaggccagcattcccaagggacccggagggggctgaggatgagtttgtgacatcgatagagacatggcgggagaccatggggatccccagcatgatcctcctggggcacagtttgggaggattcctggccacttcttactcaatcaagtaccctgatagagttaaacacctcatcctggtggacccatggggctttcccctccgaccaactaaccccagtgagatccgtgcacccccagcctgggtcaaagccgtggcatctgtcctaggacgttccaatccattggctgttcttcgagtagctgggccctgggggcctggtctggtgcagcgattccggccggacttcaaacgcaagtttgcagacttctttgaagatgataccatatcagagtatatttaccactgcaacgcacagaatcccagtggtgagacagcattcaaagccatgatggagtcctttggctgggcccggcgccctatgctggagcgaattcacttgattcgaaaagatgtgcctatcactatgatctacgggtccgacacctggatagataccagtacgggaaaaaaggtgaagatgcagcggccggattcctatgtccgagacatggagattaagggtgcctcccaccatgtctatgctgaccagccacacatcttcaatgctgtggtggaggagatctgcgactcagttgattgagctgctctctgaagaggaagaggagaaagccagagagtcactcttacctccctgtctgcttactcacccactctgtcctttcctcaccaactaacatgtgccagccaggcagagtcttgtgctgttcccagaacaggacgacagtgaaaagaacactcttgaccctacactgaaggctgaaggcagaagccacaagaggccttgagtgccacccccagggaagaacataaagggttgcacaatgccacccatccactccttgccaagtgttacccagatggtggaggatgtgaagggattgcaccaagccacattcactctctctgtggcctttcttcctctgggcaaagaagggcttccagtggcctttcctcactctgtagtgtttgtggggataggttccatgcaagaacaccttcctcctccatcccccacttcaccccatcccataccagttccatccagggtctgcttaactgccaagagcaggtcctggagttcccttcacctgcagagtccttttcatgacctaggaggtcttattcaaagccctcattgacagaggaggaaacaggccaaggcaggacatggctggaccatggtgatacagctctgtgtgattcaagttctggcagagcttgtaaggctagagcccaggtctgccgacaccctgtgcttgttgcacacttgatttgctaaggctggagacaggcaccattgccatggggctggtcctagtcactggccgaggataagcccgtccctgtcccacattctagccccactatgcgggggtgctgttgtcctgcctgtgtctcatccccggctgcctaagctagggacactcaagtgcttccttccttgccccatcttcctcccaactggaggcctctgagcctcccctgtgccttgggccctgaagccccatatgtagtatagagcaaaggtggctcctggtgaagagagggtggaaaggcccttcagccccagggccatgtctgggttctccatgcccatcagtctctgcagtttctctacctgcccccagagctgaggccatctgcaagcccctgcccatggcccaatggggagcctccagccacaagttccctgtccttatcagccactgggtggttcccactgcatgaccctctatccctgccatctgtccccatggtttccagctcaatccacccctgacccatctgtcagctttttcccagggagccgtttcaggggttctgggcagtaggctgggcctggcctcagaacctggtggctcctgcctgctccttcacttttgtaaaaccatccccttcaccagaatggtattaactcctggtgctttgtactactggtccagctgccctgggctccttttctatattaataaagaaacgagtaaaaattaccggtggggatgatgtttaaaattgctctgatcactggtggtgctgaattcgcaacagcctgtgtgatgcctgagagaagggagtcctgagggttgcctgcctacccacgactccttctccttttagtgtggcgtttgcccgctagacccagcccagagtccaggtcagcacaggccctctcagccaaccactcatgacaaatgaggagtcgagatccacagtgtggatggggcaagccccagttcacagtagagaggtggaacttagtacttcctgctgcccattagacaccctttcttcctaagttcaagggaagcccacacatgtactgctccctgcatcctgctctaacttcctctcatcctctggatctcagctcaaatattccttatgcagagatgccttcccctgattccctaaactagactcggacccctctgttctgcatctctgtggcatatcatctgccccttttgtaaaacttataaacttgtggttacttgtttagcgtctctttcctccccagaccataagcaacataaagacaaagggtacatctagcacatagttcgtgttcaataaatgtttgttttcatcatgccacgggaagtgagatataccaagtattcaaaaaagtgttcaaatcattactaacagtgcttgctctgtgctggctgagtccagctgggcccagaattccacggttctaaatggcgcatattccatgtgcataggctgattgaaaatgtattaaacctaaattttaaaaaaaaagcacatgatactacacatgtcatgatgaatgaatagacagaactcctcctgaatataattacaaagttctgatccatctca

SEQ ID NO: 103296 - DNA, 465 bp, Homo sapiens
  Payload ID: 143
  Gene Symbol: ABHD4
  Gene Name: abhydrolase domain containing 4
  ENST ID: ENST00000542041
  CDS Start-End: 195-465
ttgtttactatggccgatgatctggagcagcagtgagttaatcctgtccctttctctctttctctctctctctctgggccatgatcctgggactgtctgtggctgaggaacagttgtagacaccttcccgctcttccttttccaggtctcaaggctggctgagtagctggctgcccacgtggcgccccacttccatgtctcagctgaagaatgtggaagccaggatcctccagtgtctccagaataagttcctggccagatatgtatccctcccaaaccagaataagatctggacggtgactgtgagccccgagcaaaacgaccgcacccccttggtgatggtgcatggttttgggggcggcgtgggtctctggatcctcaacatggactcactgagtgcccgccgcacactgcacaccttcgatctgcttggcttcgggcgaagctcaaggccagcattcccaa

SEQ ID NO: 103297 - DNA, 662 bp, Homo sapiens
  Payload ID: 143
  Gene Symbol: ABHD4
  Gene Name: abhydrolase domain containing 4
  ENST ID: ENST00000541962
  CDS Start-End: 1-163
gtctcaaggctggctgagtagctggctgcccacgtggcgccccacttccatgtctcagctgaagaatgtggaagccaggatcctccagtgtctccagaataagttcctggccagatatgtatccctcccaaaccagaataagatctggacggtgactagttaaacacctcatcctggtggacccatggggctttcccctccgaccaactaaccccagtgagatccgtgcacccccagcctgggtcaaagccgtggcatctgtcctaggacgttccaatccattggctgttcttcgagtagctgggccctgggggcctggtctggtgcagcgattccggccggacttcaaacgcaagtttgcagacttctttgaagatgataccatatcagagtatatttaccactgcaacgcacagaatcccagtggtgagacagcattcaaagccatgatggagtcctttggctgggcccggcgccctatgctggagcgaattcacttgattcgaaaagatgtgcctatcactatgatctacgggtccgacacctggatagataccagtacgggaaaaaaggtgaagatgcagcggccggattcctatgtccgagacatggagattaagggtgcctcccaccatgtctatgctgaccagccacacatcttc

SEQ ID NO: 103298 - DNA, 550 bp, Homo sapiens
  Payload ID: 143
  Gene Symbol: ABHD4
  Gene Name: abhydrolase domain containing 4
  ENST ID: ENST00000537243
  CDS Start-End: 18-275
ggcaaggcttgtttactatggccgatgatctggagcagcagtctcaaggctggctgagtagctggctgcccacgtggcgccccacttccatgtctcagctgaagaatgtggaagccaggatcctccagtgtctccagaataagttcctggccagatatgtatccctcccaaaccagaataagatctggacggtgactgtgagccccgagcaaaacgaccgcacccccttggtgatgctcaaggccagcattcccaagggacccggagggggctgaggatgagtttgtgacatcgatagagacatggcgggagaccatggggatccccagcatgatcctcctggggcacagtttgggaggattcctggccacttcttactcaatcaagtaccctgatagagttaaacacctcatcctggtggacccatggggctttcccctccgaccaactaaccccagtgagatccgtgcacccccagcctgggtcaaagccgtggcatctgtcctaggacgttccaatccattggctgttcttcgagtagctgggccct

SEQ ID NO: 103299 - DNA, 185 bp, Homo sapiens
  Payload ID: 143
  Gene Symbol: ABHD4
  Gene Name: abhydrolase domain containing 4
  ENST ID: ENST00000545034
  CDS Start-End: 53-185
ttattacctcccttttaaagatgaggaagctctgacacagaaaagctaaataatgtgcccacagtcacattgctggtctcaaggctggctgagtagctggctgcccacgtggcgccccacttccatgtctcagctgaagaatgtggaagccaggatcctccagtgtctccagaataagttcctgg

SEQ ID NO: 103300 - DNA, 833 bp, Homo sapiens
  Payload ID: 144
  Gene Symbol: ABHD5
  Gene Name: abhydrolase domain containing 5
  ENST ID: ENST00000013894
  CDS Start-End: 43-177
gccggcttcgagataagtcccggcgcttgcgcggcggcggctatggcggcggaggaggaggaggtggactctgccgacaccggagagaggtcaggatggctaactggttggctccccacatggtgccctacgtctatatcacaccttaaagaagctgaagagaagatgttaaaataaagtacagaaatgaatgtcgggggctggcaggagtataataccctcatttgacagatgtggaaagaagttagaaggtaatatgacttgccaaagaccttgatcacaggttacttgaggtttgtctgaggtgtgccttgcacatacaaaaaagaacctgttcgtatatctaatggaaataaaatatggacactgaagttctctcataatatttcaaataagactccacttgtccttctccatggttttggaggaggtcttgggctctgggcactgaattttggagatctttgcaccaacagacctgtctatgcttttgacctattgggttttggacgaagtagtagacccaggtttgacagtgatgcagaagaagtggagaatcagtttgtggaatccattgaagagtggagatgtgccctaggattggacaaaatgatcttgcttgggcacaacctaggtggattcttggctgctgcttactcgctgaagtacccatcaagggttaatcatctcattttagtggagccttggggtttccctgaacgaccagaccttgctgatcaagacagaccaattccagtttggatcagagccttgggagcagcattgactccctttaaccctttagctggcctaaggattgcaggaccctttgg

SEQ ID NO: 103301 - DNA, 1690 bp, Homo sapiens
  Payload ID: 144
  Gene Symbol: ABHD5
  Gene Name: abhydrolase domain containing 5
  Uniprot ID: Q8WTS1
  ENST ID: ENST00000458276
  CDS Start-End: 124-1173
agtgcgcggaagacgcatgcgctggcggcctgcgccgccttaagtgccgcgccagcccggggcggcccagtcggcctgtcagccggcttcgagataagtcccggcgcttgcgcggcggcggctatggcggcggaggaggaggaggtggactctgccgacaccggagagaggtcaggatggctaactggttggctccccacatggtgccctacgtctatatcacaccttaaagaagctgaagagaagatgttaaaatgtgtgccttgcacatacaaaaaagaacctgttcgtatatctaatggaaataaaatatggacactgaagttctctcataatatttcaaataagactccacttgtccttctccatggttttggaggaggtcttgggctctgggcactgaattttggagatctttgcaccaacagacctgtctatgcttttgacctattgggttttggacgaagtagtagacccaggtttgacagtgatgcagaagaagtggagaatcagtttgtggaatccattgaagagtggagatgtgccctaggattggacaaaatgatcttgcttgggcacaacctaggtggattcttggctgctgcttactcgctgaagtacccatcaagggttaatcatctcattttagtggagccttggggtttccctgaacgaccagaccttgctgatcaagacagaccaattccagtttggatcagagccttgggagcagcattgactccctttaaccctttagctggcctaaggattgcaggaccctttggtttaagtctagtgcagcgtttaaggcctgatttcaaacgaaagtattcttcaatgttcgaagacgatactgtgacagaatacatctaccactgtaatgtgcagactccaagtggtgagacagctttcaagaatatgactattccttatggatgggcaaaaaggccaatgctccagcgaattggtaaaatgcaccctgacattccagtttcagtgatctttggcgcccgatcctgcatagatggcaattctggcaccagcatccagtccttacgaccacattcatatgtgaagacaatagctattcttggggcaggacattatgtatatgcagatcaaccagaagaattcaaccagaaagtaaaggagatctgcgacactgtggactgaacacactgaagctctgatgggaaaacctggtgactgatatagttgttcagcaataattcatagtctgtgatgaagagtagtgaatacaacacacaaccaggcagccttcttgactatactttgcacatgttttctttaggaattcactcacacatttaaaccagttagtgccttctagaagaatggctttcctttctcctacacaaaattgaaatatacaagtctctaaatataatacctttaaataaaaggttatttgtccctctgatgtactgaaaaactgtaatttttcagctgaaaattttttaatctaactttgctagttatttttatattgcaatctatattaccaatttaggaagtgatttctgagtctcttacactgtaaaggtgcactttattttctttgtcttccccatcatgtatttattgtgtcttgataactgatattaatctaaattcaatgtgtttttatgtaaaaatttgtcagttgtttagaatatttcactttgttttt

SEQ ID NO: 103302 - DNA, 876 bp, Homo sapiens
  Payload ID: 144
  Gene Symbol: ABHD5
  Gene Name: abhydrolase domain containing 5
  ENST ID: ENST00000456453
  CDS Start-End: 497-876
gcaatggtgcgatctcggctcaccgcaacctccgcctcccgagttcaagcgattctcctacctcaggctcccgagtagctggaattacaggtatctagagagtcgagtgggagggaaattgctggctctggccactacagtaacatcagcacctagagcagtgctcaactgactgaaggctcctgtgagtcgccctctccccctggccccccaacccgcggggaaaggctggcgggacgccacacagcacctcgattacgccatttcatttgccactgcaccatctatcggacactagctaggctcttccaggaccggacgcacctccgtccccaaggtgccacctgacagccaacaccgacggggtgatgcatgaatacagtcattattcaaattagctaaaacacctaactcattcgggtcaggatggctaactggttggctccccacatggtgccctacgtctatatcacaccttaaagaagctgaagagaagatgttaaaatgtgtgccttgcacatacaaaaaagaacctgttcgtatatctaatggaaataaaatatggacactgaagttctctcataatatttcaaataagactccacttgtccttctccatggttttggaggaggtcttgggctctgggcactgaattttggagatctttgcaccaacagacctgtctatgcttttgacctattgggttttggacgaagtagtagacccaggtttgacagtgatgcagaagaagtggagaatcagtttgtggaatccattgaagagtggagatgtgccctaggattggacaaaatgatcttgcttgggcacaacctaggtggattcttggctgctgcttactcgctgaagtacccatc

SEQ ID NO: 103303 - DNA, 525 bp, Homo sapiens
  Payload ID: 144
  Gene Symbol: ABHD5
  Gene Name: abhydrolase domain containing 5
  ENST ID: ENST00000413300
  CDS Start-End: 1-468
agggttaatcatctcattttagtggagccttggggtttccctgaacgaccagaccttgctgatcaagacagaccaattccagtttggatcagagccttgggagcagcattgactccctttaaccctttagctggcctaaggattgcaggaccctttggtttaagtctagtgcagcgtttaaggcctgatttcaaacgaaagtattcttcaatgttcgaagacgatactgtgacagaatacatctaccactgtaatgtgcagactccaagtttcagtgatctttggcgcccgatcctgcatagatggcaattctggcaccagcatccagtccttacgaccacattcatatgtgaagacaatagctattcttggggcaggacattatgtatatgcagatcaaccagaagaattcaaccagaaagtaaaggagatctgcgacactgtggactgaacacactgaagctctgatgggaaaacctggtgactgatatagttgttcagcaataattcatagtctgtgatgaa

SEQ ID NO: 103304 - DNA, 464 bp, Homo sapiens
  Payload ID: 144
  Gene Symbol: ABHD5
  Gene Name: abhydrolase domain containing 5
  ENST ID: ENST00000454293
  CDS Start-End: 330-464
gtctgagccggactccggccgcgccgggaggccgccttgaccccgcgcggagggtccgccccgttgttgtataagccaccccgcgggccggcgacggagctggccgcggcggccgcaccggctcgggctctgccaagggacccggcctgccccaatgccgccggcgggcggtgcccggtcgaccctgcacctgactgcgaggcgcgggaaatgaccgggtctgtcagcctcccatcgcggcttccgtctacaggtcaggatggctaactggttggctccccacatggtgccctacgtctatatcacaccttaaagaagctgaagagaagatgttaaaatgtgtgccttgcacatacaaaaaagaacctgttcgtatatctaatggaaataaaatatggacactgaagttctctcataatatttcaaataagactccacttgtccttctccatggttttggagga

SEQ ID NO: 103305 - DNA, 2393 bp, Homo sapiens
  Payload ID: 145
  Gene Symbol: ABHD6
  Gene Name: abhydrolase domain containing 6
  Uniprot ID: Q9BV23
  ENST ID: ENST00000295962
  CDS Start-End: 411-1424
acctctgtaggcgatcctgctctcgccgtggctttcgggtgctaggagacagttgccggcgttgggttgtgcgagacgctaactgtaccctccgggtttaacgctgtgaggcagcgcgcggaggaactggggataagcgccccggagcccccaaacagagcgcggccgctgggggacagcgcgcggcgccgggtcggggcggggcggcttttctgtcggaggacgcgaaccggcacgctgcgcctttaaggagtccagctgggctgggcgccggagctgggagcggcgcgggtaggagcccggcggcaggtcccagcccggggctagagaccgagggccggggtccgggcccggcggcgggacccaggcggttgaggctggtcaggagtcagccagcctgaaagagcaggatggatcttgatgtggttaacatgtttgtgattgcgggcggcacgctggccatcccaatcctggcatttgtggcttcatttcttctgtggccttcagcactgataagaatctattattggtactggcggaggacattgggcatgcaagtccgctatgttcaccatgaagactatcagttctgttattccttccggggcaggcctgggcacaaaccctccatcctcatgctccacggattctctgcccacaaggatatgtggctcagtgtggtcaagttccttccaaagaacctgcacttggtctgcgtggacatgccaggacatgagggcaccacccgctcctccctggatgacctgtccatagatgggcaagttaagaggatacaccagtttgtagaatgcctgaagctgaacaaaaaacctttccacctggtaggcacctccatgggtggccaggtggctggggtgtatgctgcttactacccatcggatgtctccagcctgtgtctcgtgtgtcctgctggcctgcagtactcaactgacaatcaatttgtacaacggctcaaagaactgcagggctctgccgccgtggagaagattcccttgatcccgtctaccccagaagagatgagtgaaatgcttcagctctgctcctatgtccgcttcaaggtgccccagcagatcctgcaaggccttgtcgatgtccgcatccctcataacaacttctaccgaaagttgtttttggaaatcgtcagtgagaagtccagatactctctccatcagaacatggacaagatcaaggttccgacgcagatcatctgggggaaacaagaccaggtgctggatgtgtctggggcagacatgttggccaagtcaattgccaactgccaggtggagcttctggaaaactgtgggcactcagtagtgatggaaagacccaggaagacagccaagctcataatcgactttttagcttctgtgcacaacacagacaacaacaagaagctggactgaggccccgactgcagcctgcattctgcacacagcatctgctcccatcccccaagtctgacgcagccaccactctcagggatcctgccccaaatgcggtcggagcgccagtgaccctgaggaagcccgtcccttatccctggtatccacggttccccagagctttggggaccacgcgaaaacctccaagatatttttcacaaaatagaaactcatatggaacaaaataagaaaccccagccatgaaatctaccatgaagtcttcaagttcatgtcactgagaagcttgtgcaaagcagccaccttggaccataattaaatcaaggacattttctttgagacattccttatagttggagactcaagatatttttgttgcatcaggtgtattcccttgcatgggcagtggcttttataggagcattagtcctcattcgctgaaccctgttgtttaggtctaatttaagttttacatagagacccatgtatgactgcagcccattggctgcaagaccagggaggaaagtggcaagctgtagaaaatgtttacacgcatggaggggcattgctctagccctcagagcgtccggagcagcagggtacatgggtgggaggttcattcagcacccaccagtcaggtatgttctgagtgaacccacagcagtcgcagaatgagcacctggcagggtgggtttcctaggaataatttattatttttaaaaataggcctaataaagcaataatgttctagacatctgtctaagtaatcagactcaggttccacacacaagcaacaactcgtgggcctcttttctatttcaatgtgctactaagaacccttggatgtaacatactagttagttaatgaattctgtgaattctgtgaagagtaatgtgattgaaaataagtctaaacagctgtaaaagtgaccacaatgacatgaaataaatttaataagtctagatcagcaa

SEQ ID NO: 103306 - DNA, 593 bp, Homo sapiens
  Payload ID: 145
  Gene Symbol: ABHD6
  Gene Name: abhydrolase domain containing 6
  ENST ID: ENST00000475982
  CDS Start-End: 96-251
gcccggggctagagaccgagggccggggtccgggcccggcggcgggacccaggcggttgaggctggtcaggagtcagccagcctgaaagagcaggatggatcttgatgtggttaacatgtttgtgattgcgggcggcacgctggccatcccaatcctggcatttgtggcttcatttcttctgtggccttcagcactgataagaatctattattgcatgagcagcgtgaaagatgtagcagccctgagctgagcctttctccttgttggaatcagaaggttaacagtcaaaaagaaagtgactttctcatgatgtgcttcattgccttttcatgccactgtccaattatcaaatgaaattgcccttcccacccccatggtgtacatcccctgatgaagggagcatcgaaatagacctggttcctctctgtgctataggtactggcggaggacattgggcatgcaagtccgctatgttcaccatgaagactatcagttctgttattccttccggggcaggcctgggcacaaaccctccatcctcatgctccacggattctctgcccacaaggatatgtggctcagtgtggtcaag

SEQ ID NO: 103307 - DNA, 768 bp, Homo sapiens
  Payload ID: 145
  Gene Symbol: ABHD6
  Gene Name: abhydrolase domain containing 6
  ENST ID: ENST00000485900
  CDS Start-End: 249-768
ttccctttccccagcctgccccggctcccgtgcccttgcgccccttccgtgtcgaaacacttgaatcaggatgctgtccagccaggtacccgccggcaacttgcggtcccccgcctacagcgacacaggtttcacggctgccttagaaatgcggattgtgtaacgccggctgcagggcagtgcacgtgcagggtttgcgcccctgagcccacagcgaggccaggagtcagccagcctgaaagagcaggatggatcttgatgtggttaacatgtttgtgattgcgggcggcacgctggccatcccaatcctggcatttgtggcttcatttcttctgtggccttcagcactgataagaatctattattggtactggcggaggacattgggcatgcaagtccgctatgttcaccatgaagactatcagttctgttattccttccggggcaggcctgggcacaaaccctccatcctcatgctccacggattctctgcccacaaggatatgtggctcagtgtggtcaagttccttccaaagaacctgcacttggtctgcgtggacatgccaggacatgagggcaccacccgctcctccctggatgacctgtccatagatgggcaagttaagaggatacaccagtttgtagaatgcctgaagctgaacaaaaaacctttccacctggtaggcacctccatgggtggccaggtggctggggtgtatgctgcttactacccatcggatgtctccagcctgtgtctcgtgtgtcctg

SEQ ID NO: 103308 - DNA, 2482 bp, Homo sapiens
  Payload ID: 145
  Gene Symbol: ABHD6
  Gene Name: abhydrolase domain containing 6
  Uniprot ID: Q9BV23
  ENST ID: ENST00000478253
  CDS Start-End: 502-1515
ccgggcgctcgggctccgcccccggtacctctgtaggcgatcctgctctcgccgtggctttcgggtgctaggagacagttgccggcgttgggttgtgcgagacgctaactgtaccctccgggtttaacgctgtgaggcagcgcgcggaggaactggggataagcgccccggagcccccaaacagagcgcggccgctgggggacagcgcgcggcgccgggtcggggcggggcggcttttctgtcggaggacgcgaaccggcacgctgcgcctttaaggagtccagctgggctgggcgccggagctgggagcggcgcgggtaggagcccggcggcaggtcccagcccggggctagagaccgagggccggggtccgggcccggcggcgggacccaggcggttgaggctggtcagaatctcattttcagcttctgccagagccagtagcagttgggaaagaaggctgtgctctttgaagagagtcagccagcctgaaagagcaggatggatcttgatgtggttaacatgtttgtgattgcgggcggcacgctggccatcccaatcctggcatttgtggcttcatttcttctgtggccttcagcactgataagaatctattattggtactggcggaggacattgggcatgcaagtccgctatgttcaccatgaagactatcagttctgttattccttccggggcaggcctgggcacaaaccctccatcctcatgctccacggattctctgcccacaaggatatgtggctcagtgtggtcaagttccttccaaagaacctgcacttggtctgcgtggacatgccaggacatgagggcaccacccgctcctccctggatgacctgtccatagatgggcaagttaagaggatacaccagtttgtagaatgcctgaagctgaacaaaaaacctttccacctggtaggcacctccatgggtggccaggtggctggggtgtatgctgcttactacccatcggatgtctccagcctgtgtctcgtgtgtcctgctggcctgcagtactcaactgacaatcaatttgtacaacggctcaaagaactgcagggctctgccgccgtggagaagattcccttgatcccgtctaccccagaagagatgagtgaaatgcttcagctctgctcctatgtccgcttcaaggtgccccagcagatcctgcaaggccttgtcgatgtccgcatccctcataacaacttctaccgaaagttgtttttggaaatcgtcagtgagaagtccagatactctctccatcagaacatggacaagatcaaggttccgacgcagatcatctgggggaaacaagaccaggtgctggatgtgtctggggcagacatgttggccaagtcaattgccaactgccaggtggagcttctggaaaactgtgggcactcagtagtgatggaaagacccaggaagacagccaagctcataatcgactttttagcttctgtgcacaacacagacaacaacaagaagctggactgaggccccgactgcagcctgcattctgcacacagcatctgctcccatcccccaagtctgacgcagccaccactctcagggatcctgccccaaatgcggtcggagcgccagtgaccctgaggaagcccgtcccttatccctggtatccacggttccccagagctttggggaccacgcgaaaacctccaagatatttttcacaaaatagaaactcatatggaacaaaataagaaaccccagccatgaaatctaccatgaagtcttcaagttcatgtcactgagaagcttgtgcaaagcagccaccttggaccataattaaatcaaggacattttctttgagacattccttatagttggagactcaagatatttttgttgcatcaggtgtattcccttgcatgggcagtggcttttataggagcattagtcctcattcgctgaaccctgttgtttaggtctaatttaagttttacatagagacccatgtatgactgcagcccattggctgcaagaccagggaggaaagtggcaagctgtagaaaatgtttacacgcatggaggggcattgctctagccctcagagcgtccggagcagcagggtacatgggtgggaggttcattcagcacccaccagtcaggtatgttctgagtgaacccacagcagtcgcagaatgagcacctggcagggtgggtttcctaggaataatttattatttttaaaaataggcctaataaagcaataatgttctagacatctgtctaagtaatcagactcaggttccacacacaagcaacaactcgtgggcctcttttctatttcaatgtgctactaagaacccttggatgtaacatactagttagttaatgaattctgtgaattctgtgaagagtaatgtgattgaaaataagtctaaacagctgtaaaagtgaccacaatgacatgaaataaatttaataagtctagatcagc

SEQ ID NO: 103309 - DNA, 921 bp, Homo sapiens
  Payload ID: 145
  Gene Symbol: ABHD6
  Gene Name: abhydrolase domain containing 6
  ENST ID: ENST00000463756
  CDS Start-End: 247-921
agagtcggcgatctgcacttgcctttccactccgctccccgcgcgggcgctgcccccacctcccgctgcctggataggtttgagatgcccgaaacccggcgccccatttcctgggtccagccagcctcttgaagccgggggacagagtgaggacggaatctcattttcagcttctgccagagccagtagcagttgggaaagaaggctgtgctctttgaagagagtcagccagcctgaaagagcaggatggatcttgatgtggttaacatgtttgtgattgcgggcggcacgctggccatcccaatcctggcatttgtggcttcatttcttctgtggccttcagcactgataagaatctattattggtactggcggaggacattgggcatgcaagtccgctatgttcaccatgaagactatcagttctgttattccttccggggcaggcctgggcacaaaccctccatcctcatgctccacggattctctgcccacaaggatatgtggctcagtgtggtcaagttccttccaaagaacctgcacttggtctgcgtggacatgccaggacatgagggcaccacccgctcctccctggatgacctgtccatagatgggcaagttaagaggatacaccagtttgtagaatgcctgaagctgaacaaaaaacctttccacctggtaggcacctccatgggtggccaggtggctggggtgtatgctgcttactacccatcggatgtctccagcctgtgtctcgtgtgtcctgctggcctgcagtactcaactgacaatcaatttgtacaacggctcaaagaactgcagggctctgccgccgtggagaagattcccttgatcccgtctaccccagaagagatgagtgaaatgcttcagctctgctcctatgtccgcttcaaggtgccc

SEQ ID NO: 103310 - DNA, 1367 bp, Homo sapiens
  Payload ID: 145
  Gene Symbol: ABHD6
  Gene Name: abhydrolase domain containing 6
  ENST ID: ENST00000613521
  CDS Start-End: 411-1367
acctctgtaggcgatcctgctctcgccgtggctttcgggtgctaggagacagttgccggcgttgggttgtgcgagacgctaactgtaccctccgggtttaacgctgtgaggcagcgcgcggaggaactggggataagcgccccggagcccccaaacagagcgcggccgctgggggacagcgcgcggcgccgggtcggggcggggcggcttttctgtcggaggacgcgaaccggcacgctgcgcctttaaggagtccagctgggctgggcgccggagctgggagcggcgcgggtaggagcccggcggcaggtcccagcccggggctagagaccgagggccggggtccgggcccggcggcgggacccaggcggttgaggctggtcaggagtcagccagcctgaaagagcaggatggatcttgatgtggttaacatgtttgtgattgcgggcggcacgctggccatcccaatcctggcatttgtggcttcatttcttctgtggccttcagcactgataagaatctattattggtactggcggaggacattgggcatgcaagtccgctatgttcaccatgaagactatcagttctgttattccttccggggcaggcctgggcacaaaccctccatcctcatgctccacggattctctgcccacaaggatatgtggctcagtgtggtcaagttccttccaaagaacctgcacttggtctgcgtggacatgccaggacatgagggcaccacccgctcctccctggatgacctgtccatagatgggcaagttaagaggatacaccagtttgtagaatgcctgaagctgaacaaaaaacctttccacctggtaggcacctccatgggtggccaggtggctggggtgtatgctgcttactacccatcggatgtctccagcctgtgtctcgtgtgtcctgctggcctgcagtactcaactgacaatcaatttgtacaacggctcaaagaactgcagggctctgccgccgtggagaagattcccttgatcccgtctaccccagaagagatgagtgaaatgcttcagctctgctcctatgtccgcttcaaggtgccccagcagatcctgcaaggccttgtcgatgtccgcatccctcataacaacttctaccgaaagttgtttttggaaatcgtcagtgagaagtccagatactctctccatcagaacatggacaagatcaaggttccgacgcagatcatctgggggaaacaagaccaggtgctggatgtgtctggggcagacgttggccaagtcaattgccaactgccaggtggagcttctggaaaactgtgggcactcagtagtgatggaaagccaggaagacagccaagctcataa

SEQ ID NO: 103311 - DNA, 2090 bp, Homo sapiens
  Payload ID: 146
  Gene Symbol: ABHD8
  Gene Name: abhydrolase domain containing 8
  Uniprot ID: Q96I13
  ENST ID: ENST00000247706
  CDS Start-End: 241-1560
agtgcccgcccgtcggcacgtggctccgcctactcgggggaggaacttaaagggccggctgtttcggcggccgcgggatgcccctgcgctgaccgccaggggcaggtgcccgcccgcgtagacgcacccggcctgaccccgcgccaccatgtaaacggcgccagcaggcggacgctggcttctccgcctgggacccctccgccccgacccgggccccgcggccctcgatgaggacacaccatgctgaccggggtgaccgacggtatcttctgttgcctgctgggcacgccccccaacgccgtggggccactggagagcgtcgagtccagcgatggctacacctttgtagaggtcaagcccggccgcgtgctgcgggtgaagcatgcaggacccgccccagccgctgccccacctccaccatcatccgcatcctcggatgcagcccagggggacctctccggcttggtccgctgtcagcgccggatcaccgtgtaccgcaatgggcggttgctggtggaaaacctgggccgagcccctcgagccgacctcctacacgggcagaatggctctggggagccgccggccgccctggaggtggagctggcagatccggcgggcagcgatggccgcttggcccccggcagcgcaggcagcggcagcggcagtggcagtggtgggcggcggcggcgagccaggcgccccaagaggaccatccatattgactgtgagaagcgcatcactagctgcaaaggcgcccaggccgacgtggtgctctttttcatccatggtgtcggcggttccctggccatctggaaggagcagctggacttctttgtgcgcctaggctatgaggtggtggctcctgacctggccggccacggggccagctctgcgccccaggtggccgcagcctacaccttctatgcgctggctgaggacatgcgagcaatcttcaagcgctatgccaagaagcgaaatgtgctcattggccattcctacggtgtctctttctgcacattcctggcacatgagtacccagacctagtgcacaaggtgatcatgatcaatggcgggggccctacggcgctggagcccagcttctgctcaatcttcaacatgcccacctgcgtcctgcactgcttgtcgccctgcctggcctggagcttcctcaaggccggcttcgcccgccaaggagccaaggagaagcagctgttaaaggagggcaacgctttcaacgtgtcatccttcgtactccgggccatgatgagcggccagtactggcccgagggcgacgaggtctaccacgccgagctcaccgtgcccgtcctgcttgtccacggcatgcacgataagtttgtgccggtggaggaagaccagcgcatggccgagatcctgctcctggcattcctgaagctcatcgacgagggcagccacatggtgatgctggaatgccctgagacggtcaacacgctgctccacgaattcctgctctgggagcccgagccctcgcccaaggctctaccggagccactgccggcgcctccagaagacaagaagtagccgctgggccggcggggcatcgcttggtgagcacagccgcagcaggaggaggcccgagcctgcgccaggtctgcagcgcagaccacctgggcgggccgttcgctccggtgggcggggccaggtcagggagacgcccccaggctgcctgggcggggcgtggcatccgagggagcccagcggacattccgctctccgcttccgtcccgcggggcccatcggcgttttggggccgcagccgggaccctcacggaagatgaccttgtacagaagctctccctcaccttccccccaacgccacggccaaggcaggccccccaccccgctgtcttccgtgtcagccgtgcttgatcctgggacccacgagccccacagggaccctcgaggccccatcccgttatccgagacccttcctaccccccattcctcggcgctgggagctatttttgcccaagggggggggatgggggggctggcgccaccgaacctgcacatctcaacttgtaactcaataaacagaagtgacaatcgga

SEQ ID NO: 103312 - DNA, 555 bp, Homo sapiens
  Payload ID: 146
  Gene Symbol: ABHD8
  Gene Name: abhydrolase domain containing 8
  ENST ID: ENST00000593489
  CDS Start-End: 31-555
actgctaccctcatttcacagggacaatccatgcggatcggagataaaagtttttcattcttagaggcgggacacaccatgctgaccggggtgaccgacggtatcttctgttgcctgctgggcacgccccccaacgccgtggggccactggagagcgtcgagtccagcgatggctacacctttgtagaggtcaagcccggccgcgtgctgcgggtgaagcatgcaggacccgccccagccgctgccccacctccaccatcatccgcatcctcggatgcagcccagggggacctctccggcttggtccgctgtcagcgccggatcaccgtgtaccgcaatgggcggttgctggtggaaaacctgggccgagcccctcgagccgacctcctacacgggcagaatggctctggggagccgccggccgccctggaggtggagctggcagatccggcgggcagcgatggccgcttggcccccggcagcgcaggcagcggcagcggcagtggcagtggtgggcggcggcggcgagccaggcgccccaagaggaccatccat

SEQ ID NO: 103313 - DNA, 570 bp, Homo sapiens
  Payload ID: 146
  Gene Symbol: ABHD8
  Gene Name: abhydrolase domain containing 8
  ENST ID: ENST00000594194
  CDS Start-End: 180-570
aaagggccggctgtttcggcggccgcgggatgcccctgcgctgaccgccaggggcaggtgcccgcccgcgtagacgcacccggcctgaccccgcgccaccatgtaaacggcgccagcaggcggacgctggcttctccgcctgggacccctccgccccgacccgggccccgcggccctcgatgaggaacatccccacacaagacgccaccaccttccctgtggacaccctgtggggacacaccatgctgaccggggtgaccgacggtatcttctgttgcctgctgggcacgccccccaacgccgtggggccactggagagcgtcgagtccagcgatggctacacctttgtagaggtcaagcccggccgcgtgctgcgggtgaagcatgcaggacccgccccagccgctgccccacctccaccatcatccgcatcctcggatgcagcccagggggacctctccggcttggtccgctgtcagcgccggatcaccgtgtaccgcaatgggcggttgctggtggaaaacctgggccgagcccctcgagccgacctcctacacgggcagaatggct

SEQ ID NO: 103314 - DNA, 2109 bp, Homo sapiens
  Payload ID: 147
  Gene Symbol: ABI3
  Gene Name: ABI family, member 3
  Uniprot ID: Q9P2A4
  ENST ID: ENST00000225941
  CDS Start-End: 499-1599
tcctatccaccctccactcccctgtcccttggtgactcatccctgagcttcccaaggaagcccccaccctctgccctttcctcccgccttccatgagtggaaaatccacctccgccccctatagcaggccagcccccttcctccccagtctccgaccccatcccccagccgaccagtttcctctccaggaccagggagcaatcacagctgccccgaccttggcttcctctgctgggtgggattgggggctgggcccccaaatgggcccctggcttcccccttcctctgggcaggggacagagagacacaggctcggggagcaggactgacttcctcttgtcccggaatgagcatgcctgccctttgcaagcaggtttgggtctcacgcagaggaaaccaaaagcaataagagggagggaaggcagagcaaccaatcaagggcagggtgagactcaaaacgagcgggctccctggggagccagacagaggctgggggtgatggcggagctacagcagctgcaggagtttgagatccccactggccgggaggctctgaggggcaaccacagtgccctgctgcgggtcgctgactactgcgaggacaactatgtgcaggccacagacaagcggaaggcgctggaggagaccatggccttcactacccaggcactggccagcgtggcctaccaggtgggcaacctggccgggcacactctgcgcatgttggacctgcagggggccgccctgcggcaggtggaagcccgtgtaagcacgctgggccagatggtgaacatgcatatggagaaggtggcccgaagggagatcggcaccttagccactgtccagcggctgccccccggccagaaggtcatcgccccagagaacctaccccctctcacgccctactgcaggagacccctcaactttggctgcctggacgacattggccatgggatcaaggacctcagcacgcagctgtcaagaacaggcaccctgtctcgaaagagcatcaaggcccctgccacacccgcctccgccaccttggggagaccaccccggattcccgagccagtgcacctgccggtggtgcccgacggcagactctccgccgcctcctctgcgttttccctggcctcggccggcagcgccgaaggtgtcggtggggcccccacgcccaaggggcaggcagcacctccagccccacctctccccagctccttggacccacctcctccaccagcagccgtcgaggtgttccagcggcctcccacgctggaggagttgtccccacccccaccggacgaagagctgcccctgccactggacctgcctcctcctccacccctggatggagatgaattggggctgcctccacccccaccaggatttgggcctgatgagcccagctgggtgcctgcctcatacttggagaaagtggtgacactgtacccatacaccagccagaaggacaatgagctctccttctctgagggcactgtcatctgtgtcactcgccgctactccgatggctggtgcgagggcgtcagctcagaggggactggattcttccctgggaactatgtggagcccagctgctgacagcccagggctctctgggcagctgatgtctgcactgagtgggtttcatgagccccaagccaaaaccagctccagtcacagctggactgggtctgcccacctcttgggctgtgagctgtgttctgtccttcctcccatcggagggagaaggggtcctggggagagagaatttatccagaggcctgctgcagatggggaagagctggaaaccaagaagtttgtcaacagaggacccctactccatgcaggacagggtctcctgctgcaagtcccaactttgaataaaacagatgatgtcctgtgactgccccacagagataaggggccaggagggattgaaaggcatcccagttctaaggctgctgctaattacagcccccaacctccaacccaccagctgacctagaagcagcatcttcccatttcctcagtacccacaaagtgcagcccacattggaccccagacacccctctgcagccattgactgcaacttgttcttttgcccattg

SEQ ID NO: 103315 - DNA, 1718 bp, Homo sapiens
  Payload ID: 147
  Gene Symbol: ABI3
  Gene Name: ABI family, member 3
  Uniprot ID: Q9P2A4
  ENST ID: ENST00000419580
  CDS Start-End: 315-1397
ccaggaccagggagcaatcacagctgccccgaccttggcttcctctgctgggtgggattgggggctgggcccccaaatgggcccctggcttcccccttcctctgggcaggggacagagagacacaggctcggggagcaggactgacttcctcttgtcccggaatgagcatgcctgccctttgcaagcaggtttgggtctcacgcagaggaaaccaaaagcaataagagggagggaaggcagagcaaccaatcaagggcagggtgagactcaaaacgagcgggctccctggggagccagacagaggctgggggtgatggcggagctacagcagctgcaggagtttgagatccccactggccgggaggctctgaggggcaaccacagtgccctgctgcgggtcgctgactactgcgaggacaactatgtgcaggccacagacaagcggaaggcgctggaggagaccatggccttcactacccaggcactggccagcgtggcctaccaggtgggcaacctggccgggcacactctgcgcatgttggacctgcagggggccgccctgcggcaggtggaagcccgtatggtgaacatgcatatggagaaggtggcccgaagggagatcggcaccttagccactgtccagcggctgccccccggccagaaggtcatcgccccagagaacctaccccctctcacgccctactgcaggagacccctcaactttggctgcctggacgacattggccatgggatcaaggacctcagcacgcagctgtcaagaacaggcaccctgtctcgaaagagcatcaaggcccctgccacacccgcctccgccaccttggggagaccaccccggattcccgagccagtgcacctgccggtggtgcccgacggcagactctccgccgcctcctctgcgttttccctggcctcggccggcagcgccgaaggtgtcggtggggcccccacgcccaaggggcaggcagcacctccagccccacctctccccagctccttggacccacctcctccaccagcagccgtcgaggtgttccagcggcctcccacgctggaggagttgtccccacccccaccggacgaagagctgcccctgccactggacctgcctcctcctccacccctggatggagatgaattggggctgcctccacccccaccaggatttgggcctgatgagcccagctgggtgcctgcctcatacttggagaaagtggtgacactgtacccatacaccagccagaaggacaatgagctctccttctctgagggcactgtcatctgtgtcactcgccgctactccgatggctggtgcgagggcgtcagctcagaggggactggattcttccctgggaactatgtggagcccagctgctgacagcccagggctctctgggcagctgatgtctgcactgagtgggtttcatgagccccaagccaaaaccagctccagtcacagctggactgggtctgcccacctcttgggctgtgagctgtgttctgtccttcctcccatcggagggagaaggggtcctggggagagagaatttatccagaggcctgctgcagatggggaagagctggaaaccaagaagtttgtcaacagaggacccctactccatgcaggacagggtctcctgctgcaagtcccaactttgaataaaacagatgatgtcctgtgactgccccacagagataa

SEQ ID NO: 103316 - DNA, 866 bp, Homo sapiens
  Payload ID: 147
  Gene Symbol: ABI3
  Gene Name: ABI family, member 3
  ENST ID: ENST00000571035
  CDS Start-End: 1-574
gagaccaccccggattcccgagccagtgcacctgccggtggtgcccgacggcagactctccgccgcctcctctgcgttttccctggcctcggccggcagcgccgaaggtgtcggtggggcccccacgcccaaggggcaggcagcacctccagccccacctctccccagctccttggacccacctcctccaccagcagccgtcgaggtgttccagcggcctcccacgctggaggagttgtccccacccccaccggcctttctgcttttcccccaagacgaagagctgcccctgccactggacctgcctcctcctccacccctggatggagatgaattggggctgcctccacccccaccaggatttgggcctgatgagcccagctgggtgcctgcctcatacttggagaaagtggtgacactgtacccatacaccagccagaaggacaatgagctctccttctctgagggcactgtcatctgtgtcactcgccgctactccgatggctggtgcgagggcgtcagctcagaggggactggattcttccctgggaactatgtggagcccagctgctgacagcccagggctctctgggcagctgatgtctgcactgagtgggtttcatgagccccaagccaaaaccagctccagtcacagctggactgggtctgcccacctcttgggctgtgagctgtgttctgtccttcctcccatcggagggagaaggggtcctggggagagagaatttatccagaggcctgctgcagatggggaagagctggaaaccaagaagtttgtcaacagaggacccctactccatgcaggacagggtctcctgctgcaagtcccaactttgaataaaacagat

SEQ ID NO: 103317 - DNA, 810 bp, Homo sapiens
  Payload ID: 147
  Gene Symbol: ABI3
  Gene Name: ABI family, member 3
  ENST ID: ENST00000573347
  CDS Start-End: 1-481
aacaggcaccctgtctcgaaagagcatcaaggcccctgccacacccgcctccgccaccttggggagaccaccccggattcccgagccagtgcacctgccggtggtgcccgacggcagactctccgccgcctcctctgcgttttccctggcctcggccggcagcgccgaaggtgtcggtggggcccccacgcccaaggggcaggcagcacctccagccccacctctccccagctccttggacccacctcctccaccagcagccgtcgaggtgttccagcggcctcccacgctggaggagttgtccccacccccaccggcctttctgcttttcccccaagacgaagagctgcccctgccactggacctgcctcctcctccacccctggatggagatgaattggggctgcctccacccccaccaggatttgggcctgatgagcccagctgggtgcctgcctcatacttggagaaaggtacctgacttctgggactgaggggcaccggatcccacttcctctgttgccctgatccccattctcctccctctgcaaaggtgtgaatctatcccccgggccccccacacaatttttctgacgaactgacagaactggggagagggcagctggcctggtattaaatattaactaagctggggaggggtcctgaaggcttgcaagaaggcccccaagatggcccctagagtctagtacttgagaccgtgcatccccatggtggtggggggtgagggggagagggcaagaggcattatctcacggcaccctcttctcttgccctgcagtggtgacactg

SEQ ID NO: 103318 - DNA, 4498 bp, Homo sapiens
  Payload ID: 148
  Gene Symbol: ABI3BP
  Gene Name: ABI family, member 3 (NESH) binding protein
  Uniprot ID: Q7Z7G0
  ENST ID: ENST00000284322
  CDS Start-End: 111-3338
gtgagtaagcccacggcacagctaagtgcagccgcccgcctctgtcactgggagacagtccacttaaatgcagctccagggttgcgaggcacccaccagcatcattccccatgcgaggtggcaaatgcaacatgctctccagtttggggtgtctacttctctgtggaagtattacactagccctgggaaatgcacagaaattgccaaaaggtaaaaggccaaacctcaaagtccacatcaataccacaagtgactccatcctcttgaagttcttgcgtccaagtccaaatgtaaagcttgaaggtcttctcctgggatatggcagcaatgtatcaccaaaccagtacttccctcttcccgctgaagggaaattcacagaagctatagttgatgcagagccgaaatatctgatagttgtgcgacctgctccacctccaagtcaaaagaagtcatgttcaggtaaaactcgttctcgcaaacctctgcagctggtggttggcactctgacaccgagctcggtcttcctgtcctggggtttcctcatcaacccacaccatgactggacattgccaagtcactgtcccaatgacagattttatacaattcgctatcgagaaaaggataaagaaaagaagtggatttttcaaatctgtccagccactgaaacaattgtggaaaacctaaagcccaacacagtttatgaatttggagtgaaagacaatgtggaaggtggaatttggagtaagattttcaatcacaagactgttgttggaagtaaaaaagtaaatgggaaaatccaaagtacctatgaccaagaccacacagtgccagcatatgtcccaaggaaactaatcccaataacaatcatcaagcaagtgattcagaatgttactcacaaggattcagctaaatccccagaaaaagctccactgggaggagtgatactagtccaccttattattccaggtcttaatgaaactactgtaaaacttcctgcatccctaatgtttgagatttcagatgcactcaagacacaattagctaagaatgaaaccttggcattacctgccgaatctaaaacaccagaggttgaaaaaatctcagcacgacccacaacagtgactcctgaaacagttccaagaagcactaaacccactacgtctagtgcattagatgtttcagaaacaacactggcttcaagtgaaaagccatggattgtgcctacagctaaaatatctgaagattccaaagttctgcagcctcaaactgcaacttatgatgttttctcaagccctacaacatcagatgagcctgagatatcagattcctacacagcaacaagtgatcgtattctggattctatcccacctaaaacttctagaactcttgaacagccaagggcaacactggctccaagtgaaacaccatttgttcctcaaaaactggaaatctttaccagtccagaaatgcagcctacgacacctgctccccagcaaactacatctatcccttctacacctaaacgacgcccccggcccaaaccgccaagaaccaaacctgaaagaaccacaagtgccggaacaattacacctaaaatttctaaaagccctgaacctacatggacaacaccggctcccggtaaaacacaatttatttctctgaaacctaaaatccctctcagcccagaagtgacacacaccaaacctgctcccaagcagacaccacgtgctcctcctaagccaaaaacatcaccacgcccaagaatcccacaaacacaaccagttcctaaggtgccccagcgtgttactgcaaaaccaaaaacgtcaccaagtccagaagtgtcatacaccacacctgctccaaaagatgtgctccttcctcataaaccataccctgaggtctctcagagcgaacctgctcctctagagacacgaggcatcccttttatacccatgatttccccaagtcctagtcaagaggaactacagaccactctggaagaaacagaccaatccacccaagaacctttcacaactaagattccacgaacaactgaactagcaaagacaactcaggcgccacacagattttatactactgtgaggcccagaacatctgacaagccacacatcagacctggggtcaagcaagcacccaggccatcaggtgctgatagaaatgtatcagtggactctacccaccccactaaaaagccagggactcgccgcccacccttgccacccagacctacacacccacgaagaaaacctttaccaccaaataatgtcactggaaagccaggaagtgcaggaatcatttcatcaggcccaataactacaccacccctgaggtcaacacccaggcctactggaactcccttggagagaatagagacagatataaagcaaccaacagttcctgcctctggagaagaactggaaaatataactgactttagctcaagcccaacaagagaaactgatcctcttgggaagccaagattcaaaggacctcatgtgcgatacatccaaaagcctgacaacagtccctgctccattactgactctgtcaaacggttccccaaagaggaggccacagaggggaatgccaccagcccaccacagaacccacccaccaacctcactgtggtcaccgtggaagggtgcccctcatttgtcatcttggactgggaaaagccactaaatgacactgtcactgaatatgaagttatatccagagaaaatgggtcattcagtgggaagaacaagtccattcaaatgacaaatcagacattttccacagtagaaaatctgaaaccaaacacgagttatgaattccaggtgaaacccaaaaacccgcttggtgaaggcccggtcagcaacacagtggcattcagtactgaatcagcggacccaagagtgagtgagccagtttctgcaggaagagatgccatctggactgaaagaccctttaattcagactcttactcagagtgtaagggcaaacaatatgtcaaaaggacatggtataaaaaatttgtaggagtgcagctgtgcaactctctcagatacaagatttacttgagcgactccctcacaggaaaattttataacataggtgatcagaggggccatggagaagatcactgccagtttgtggattcatttttagatggacgcactgggcagcaactcacttctgaccagttaccaatcaaagaaggttatttcagagcagttcgccaggaacctgtccaatttggagaaataggtggtcacacccaaatcaattatgttcagtggtatgaatgtgggactacaattcctggaaaatggtagatgctgcacaaagttaccttctgtttcatcattgcaaacaaaaatcattgaaaatactatgccgcattcatttaaagctattttgtttactatgtataaaagtctacaatctaattaatagcaatactagatgtttattattagaaaagattgctgagagtatttatcaggttttacaaagtcattttaagaaagcaagatactgatgttaacagaataacatttttggggaagctggctccctattcatggtattttaagagatcatttgtatattatttatcacactgttgtaatgatgttttgagatacttttataacaaaattaacatcaaaaaggtatatactttttaaaaaaaatttacttttattgatgtgtactcttcctattgatgagttaattccataaatctctacttagtttaacttattggatcaaattatcttcagcatgtatatctggggaaaaaaggtccgaattttcacatttatatttaaacttcaattttttatatttaaacttcaattttttagcaacagctgaatagctttgcggaggagtttaatagttacacattcatgctaatatacatttcctttaaacatccacaaattcttaaaaagattgaatcagtaaatttcatttcagctaaaaatggagtctaatatattgtttcaaaagatacatttttacccaccataaatgttacaatatctgaatatgctttgtcaaactatccctttatgcaatcgtcttcatattgtttttatgattctaatcaagctgtatgtagagactgaatgtgaagtcaagtctgagcacaaaaagataatgcacgatgagattgcctaccattttataggatatttactatgtatttatacgttaagacctctatgaatgaatgtatcagagaatgtctttgtaactgtttaattcaatctgtaataaaaatctaactaactaactcatttatttctattaaaaaggtattgtcctttaggcggggaatgggaatccttgctgcactgttgcagtcattctgaaaggacctttccctgtacttacctttcaacatgcttcaatcttatcaacgctacattttgtatttttcaaacaagtataaattctgcaataaagagatgtagtttttttttaa

SEQ ID NO: 103319 - DNA, 251 bp, Homo sapiens
  Payload ID: 148
  Gene Symbol: ABI3BP
  Gene Name: ABI family, member 3 (NESH) binding protein
  ENST ID: ENST00000459682
  CDS Start-End: 1-251
ttttgagaaacctaggggcacattggcttcaagtgaaaagccatggattgtgcctacagctaaaatatctgaagattccaaagttctgcagcctcaaactgcaacaagtgatcgtattctggattctatcccacctaaaacttctagaactcttgaacagccaagggcaacactggctccaagtgaaacaccatttgttcctcaaaaactggaaatctttaccagtccagaaatgcagcctacgacacctg

SEQ ID NO: 103320 - DNA, 561 bp, Homo sapiens
  Payload ID: 148
  Gene Symbol: ABI3BP
  Gene Name: ABI family, member 3 (NESH) binding protein
  ENST ID: ENST00000478235
  CDS Start-End: 1-561
ctaaaaccacgccccatccagaagtacctcaaactaaactggctcccaaagtgcctcaacgaactcatcgtccacatcccaaacctaaaaccacactgagtcccgaagagcttcagactgaactggttcctgctacaatctttgaaccagtttctcctataaaagaggctccagggacaacattcgttcctgttacagacctcgagcctgttacttttagaactgagatccctgcaacaaccttagctaccaaaacatcaaaaagaacccgccctccacgtcccagacctaaaactacaccgagccctcaggcacctgagaccaaacctgctcccaagcagacaccacgtgctcctcctaagccaaaaacatcaccacgcccaagaatcccacaaacacaaccagttcctaaggtgccccagcgtgttactgcaaaaccaaaaacgtcaccaagtccagaagtgtcatacaccacacctgctcctctagagacacgaggcatcccttttatacccatgatttccccaagtcctagtcaagaggaactacagaccactctgg

SEQ ID NO: 103321 - DNA, 922 bp, Homo sapiens
  Payload ID: 148
  Gene Symbol: ABI3BP
  Gene Name: ABI family, member 3 (NESH) binding protein
  ENST ID: ENST00000471901
  CDS Start-End: 1-922
atcccaaacctaaaaccacgccccatccagaagtacctcaaactaaactggctaccaaaacatcaaaaagaacccgccctccacgtcccagacctaaaactacaccgagccctcaggcacctgagaccaaacctgttcctgctacagtcctagaacctgtcactcttagacctgaggcctcaacaacattagcttccaaaacatcacaacggacacgtcgtccacgtctcagaacaaaaaccacaccacgtcctgaagcacctgaatccaaaccagttcctactgcggagctcaaacctgttacactcagaactgagacttgggtgacaacacaagctcccaagcagacaccacgtgctcctcctaagccaaaaacatcaccacgcccaagaatcccacaaacacaaccagttcctaaggtgccccagcgtgttactgcaaaaccaaaaacgtcaccaagtccagaagtgtcatacaccacacctgctccaaaagatgtgctccttcctcataaaccataccctgaggtctctcagagcgaacctgctcctctagagacacgaggcatcccttttatacccatgatttccccaagtcctagtcaagaggaactacagaccactctggaagaaacagaccaatccacccaagaacctttcacaactaagattccacgaacaactgaactagcaaagacaactcaggcgccacacagattttatactactgtgaggcccagaacatctgacaagccacacatcagacctgttctgaataggacaactacaagacctactaggcccaaacccagtgggatgcccagtgggaatggagtgggaacaggggtcaagcaagcacccaggccatcaggtgctgatagaaatgtatcagtggactctacccaccccactaaaaagccagg

SEQ ID NO: 103322 - DNA, 560 bp, Homo sapiens
  Payload ID: 148
  Gene Symbol: ABI3BP
  Gene Name: ABI family, member 3 (NESH) binding protein
  ENST ID: ENST00000466947
  CDS Start-End: 1-560
atttatttctctgaaacctaaaatccctctcagcccagaagtgacacacaccaaacctgctccaaaaacatcgcaacgaacaagaacacgtcgtccacgtcccaaacataaaaccacgccacgcccagagacactgcagaccaaactagactttggacctattactcctgggacatcttcagctccaacaacaacaacaaaaagaacccgtcgtccacatcccaaacctaaaaccacgccccatccagaagtacctcaaactaaactggctcccaagcagacaccacgtgctcctcctaagccaaaaacatcaccacgcccaagaatcccacaaacacaaccagttcctaaggtgccccagcgtgttactgcaaaaccaaaaacgtcaccaagtccagaagtgtcatacaccacacctgctccaaaagatgtgctccttcctcataaaccataccctgaggtctctcagagcgaacctgctcctctagagacacgaggcatcccttttatacccatgatttccccaagtcctagtcaagaggaactacagaccactctgg

SEQ ID NO: 103323 - DNA, 560 bp, Homo sapiens
  Payload ID: 148
  Gene Symbol: ABI3BP
  Gene Name: ABI family, member 3 (NESH) binding protein
  ENST ID: ENST00000483129
  CDS Start-End: 1-560
aaatgggaaaatccaaagtacctatgaccaagaccacacagtgccagcatatgtcccaaggaaactaatcccaataacaatcatcaagcaagtgattcagaatgttactcacaaggattcagctaaatccccagaaaaagctccactgggaggagtgatactagtccaccttattattccaggtcttaatgaaactactgtaaaacttcctgcatccctaatgtttgagatttcagatgcactcaagacacaattagctaagaatgaaaccttggcattacctgccgaatctaaaacaccagaggttgaaaaaatctcagcacgacccacaacagtgactcctgaaacagttccaagaagcactaaacccactacgtctagtgcattagatgtttcagaaacaacactggttctcagcaaaaggaccccggaaacattgcaaactattctaatacctcagtttgaattgccactgagcactctagcttcaagtgaaaagccatggattgtgcctacagctaaaatatctgaagattccaaagttctgcagcctcaaactg

SEQ ID NO: 103324 - DNA, 475 bp, Homo sapiens
  Payload ID: 148
  Gene Symbol: ABI3BP
  Gene Name: ABI family, member 3 (NESH) binding protein
  ENST ID: ENST00000482765
  CDS Start-End: 1-475
gtttctgatgttctggaatcggttacacttagtactgagtcaccaaaggagaccatagcaccagccaaaacagactatgtatatcccactgccaaagcaccactctggccagaggagccaaagactgaagttgtggaatctattacatatgtatctgaaccacctgagaccacactagaaacgtcgcctctgccttctcaatctataaccctacccagcccagatgagcctcagactgaacctgctcccaagcagacaccacgtgctcctcctaagccaaaaacatcaccacgcccaagaatcccacaaacacaaccagttcctaaggtgccccagcgtgttactgcaaaaccaaaaacgtcaccaagtccagaagtgtcatacaccacacctgctcctctagagacacgaggcatcccttttatacccatgatttccccaagtcctagtcaagaggaactacagaccactctgg

SEQ ID NO: 103325 - DNA, 3650 bp, Homo sapiens
  Payload ID: 148
  Gene Symbol: ABI3BP
  Gene Name: ABI family, member 3 (NESH) binding protein
  ENST ID: ENST00000495591
  CDS Start-End: 1-3395
ttatttctctgaaacctaaaatccctctcagcccagaagtgacacacaccaaacctgccccagaacctcagactctactgccatcacagtcaacaataggacctgaaacaccaggaaccaaaccttcaacaacattagctctggaacctgccacgatacaaccggagcccttggtgcccacaactgcctcaaaaccatctgagagacctaaaaccacacacagaccagatgcacctcaaattcagcctggttcaaaaccaccaaaacaattacttcctaaaccccaaaccacagcagaaccagacatgccaccaactaaatccgtctctgagcctgttccatttgaaactgaagctccctcaatgaccatagttcccaccacagacattgagcctgtaactgtgagaactgaggctacagtgacaacattagctccaaaaacatcgcaacgaacaagaacacgtcgtccacgtcccaaacataaaaccacgccacgcccagagacactgcagaccaaactagactttggacctattactcctgggacatcttcagctccaacaacaacaacaaaaagaacccgtcgtccacatcccaaacctaaaaccacgccccatccagaagtacctcaaactaaactggttcctgccacaatcctcgaaccagttcttagaactgaggcttcagggacaacagcagttcctgctacaatctttgaaccagtttctcctataaaagaggctccagggacaacattcgttcctgttacagacctcgagcctgttacttttagaactgagatccctgcaacaaccttagctaccaaaacatcaaaaagaacccgccctccacgtcccagacctaaaactacaccgagccctcaggcacctgagaccaaacctgttcctgctacagtcctagaacctgtcactcttagacctgaggcctcaacaacattagcttccaaaacatcacaacggacacgtcgtccacgtctcagaacaaaaaccacaccacgtcctgaagcacctgaatccaaaccagttcctactgcggagctcaaacctgttacactcagaactgagacttgggtgacaacacaagctcctaaaacatcacaacgaactcgtcgtccacgtcccaaaactaaaaccacaccaagtcctgaggttcctcaaaccaaactggttccttctacagatcttgaacctggtactctcagaactgaagctccaaaaaccatggttgttactacagtccttgaacctgacacttttagaaccaagtttccagaaacaacgttagctcctaaaacacaacggacacgtcgtccccgtcccagacccaaaactacatcaagtcctgaagtacctcagaacaaatcggtttctgttacaggctttgaacctgttgttcatagtactgatgctccaggaacaacatttgctctgactgaactgcaaactcttattttgaaaccagtgacatcaccaagcctagaaatgacagaaagtcaacctgtttctgatgttctggaatcggttacacttagtactgagtcaccaaaggagaccatagcaccagccaaaacagactatgtatatcccactgccaaagcaccactctggccagaggagccaaagactgaagttgtggaatctattacatatgtatctgaaccacctgagaccacactagaaacgtcgcctctgccttctcaatctataaccctacccagcccagatgagcctcagactgaacctgctcccaagcagacaccacgtgctcctcctaagccaaaaacatcaccacgcccaagaatcccacaaacacaaccagttcctaaggtgccccagcgtgttactgcaaaaccaaaaacgtcaccaagtccagaagtgtcatacaccacacctgctccaaaagatgtgctccttcctcataaaccataccctgaggtctctcagagcgaacctgctcctctagagacacgaggcatcccttttatacccatgatttccccaagtcctagtcaagaggaactacagaccactctggaagaaacagaccaatccacccaagaacctttcacaactaagattccacgaacaactgaactagcaaagacaactcaggcgccacacagattttatactactgtgaggcccagaacatctgacaagccacacatcagacctggggtcaagcaagcacccaggccatcaggtgctgatagaaatgtatcagtggactctacccaccccactaaaaagccagggactcgccgcccacccttgccacccagacctacacacccacgaagaaaacctttaccaccaaataatgtcactggaaagccaggaagtgcaggaatcatttcatcaggcccaataactacaccacccctgaggtcaacacccaggcctactggaactcccttggagagaatagagacagatataaagcaaccaacagttcctgcctctggagaagaactggaaaatataactgactttagctcaagcccaacaagagaaactgatcctcttgggaagccaagattcaaaggacctcatgtgcgatacatccaaaagcctgacaacagtccctgctccattactgactctgtcaaacggttccccaaagaggaggccacagaggggaatgccaccagcccaccacagaacccacccaccaacctcactgtggtcaccgtggaagggtgcccctcatttgtcatcttggactgggaaaagccactaaatgacactgtcactgaatatgaagttatatccagagaaaatgggtcattcagtgggaagaacaagtccattcaaatgacaaatcagacattttccacagtagaaaatctgaaaccaaacacgagttatgaattccaggtgaaacccaaaaacccgcttggtgaaggcccggtcagcaacacagtggcattcagtactgaatcagcggacccaagagtgagtgagccagtttctgcaggaagagatgccatctggactgaaagaccctttaattcagactcttactcagagtgtaagggcaaacaatatgtcaaaaggacatggtataaaaaatttgtaggagtgcagctgtgcaactctctcagatacaagatttacttgagcgactccctcacaggaaaattttataacataggtgatcagaggggccatggagaagatcactgccagtttgtggattcatttttagatggacgcactgggcagcaactcacttctgaccagttaccaatcaaagaaggttatttcagagcagttcgccaggaacctgtccaatttggagaaataggtggtcacacccaaatcaattatgttcagtggtatgaatgtgggactacaattcctggaaaatggtagatgctgcacaaagttaccttctgtttcatcattgcaaacaaaaatcattgaaaatactatgccgcattcatttaaagctattttgtttactatgtataaaagtctacaatctaattaatagcaatactagatgtttattattagaaaagattgctgagagtatttatcaggttttacaaagtcattttaagaaagcaagatactgatgttaacagaataacatttttggggaagctggctccctattcatggtat

SEQ ID NO: 103326 - DNA, 700 bp, Homo sapiens
  Payload ID: 148
  Gene Symbol: ABI3BP
  Gene Name: ABI family, member 3 (NESH) binding protein
  ENST ID: ENST00000486770
  CDS Start-End: 1-700
cagcgtgttactgcaaaaccaaaaacgtcaccaagtccagaagtgtcatacaccacacctgctccaaaagatgtgctccttcctcataaaccataccctgaggtctctcagagcgaacctgctcctctagagacacgaggcatcccttttatacccatgatttccccaagtcctagtcaagaggaactacagaccactctggcgccacacagattttatactactgtgaggcccagaacatctgacaagccacacatcagacctggggtcaagcaagcacccaggccatcaggtgctgatagaaatgtatcagtggactctacccaccccactaaaaagccagggactcgccgcccacccttgccacccagacctacacacccacgaagaaaacctttaccaccaaataatgtcactggaaagccaggaagtgcaggaatcatttcatcaggcccaataactacaccacccctgaggtcaacacccaggcctactggaactcccttggagagaatagagacagatataaagcaaccaacagttcctgcctctggagaagaactggaaaatataactgactttagctcaagcccaacaagagaaactgatcctcttgggaagccaagattcaaaggacctcatgtgcgatacatccaaaagcctgacaacagtccctgctccattactgactctgtcaaac

SEQ ID NO: 103327 - DNA, 6783 bp, Homo sapiens
  Payload ID: 148
  Gene Symbol: ABI3BP
  Gene Name: ABI family, member 3 (NESH) binding protein
  ENST ID: ENST00000471714
  CDS Start-End: 111-5444
gtgagtaagcccacggcacagctaagtgcagccgcccgcctctgtcactgggagacagtccacttaaatgcagctccagggttgcgaggcacccaccagcatcattccccatgcgaggtggcaaatgcaacatgctctccagtttggggtgtctacttctctgtggaagtattacactagccctgggaaatgcacagaaattgccaaaaggtaaaaggccaaacctcaaagtccacatcaataccacaagtgactccatcctcttgaagttcttgcgtccaagtccaaatgtaaagcttgaaggtcttctcctgggatatggcagcaatgtatcaccaaaccagtacttccctcttcccgctgaagggaaattcacagaagctatagttgatgcagagccgaaatatctgatagttgtgcgacctgctccacctccaagtcaaaagaagtcatgttcaggtaaaactcgttctcgcaaacctctgcagctggtggttggcactctgacaccgagctcggtcttcctgtcctggggtttcctcatcaacccacaccatgactggacattgccaagtcactgtcccaatgacagattttatacaattcgctatcgagaaaaggataaagaaaagaagtggatttttcaaatctgtccagccactgaaacaattgtggaaaacctaaagcccaacacagtttatgaatttggagtgaaagacaatgtggaaggtggaatttggagtaagattttcaatcacaagactgttgttggaagtaaaaaagtaaatgggaaaatccaaagtacctatgaccaagaccacacagtgccagcatatgtcccaaggaaactaatcccaataacaatcatcaagcaagtgattcagaatgttactcacaaggattcagctaaatccccagaaaaagctccactgggaggagtgatactagtccaccttattattccaggtcttaatgaaactactgtaaaacttcctgcatccctaatgtttgagatttcagatgcactcaagacacaattagctaagaatgaaaccttggcattacctgccgaatctaaaacaccagaggttgaaaaaatctcagcacgacccacaacagtgactcctgaaacagttccaagaagcactaaacccactacgtctagtgcattagatgtttcagaaacaacactggttctcagcaaaaggaccccggaaacattgcaaactattctaatacctcagtttgaattgccactgagcactctagctccaaaaagccttccagaatttcctgaggcaaaaacacccttcccttttgagaaacctaggggcacattggcttcaagtgaaaagccatggattgtgcctacagctaaaatatctgaagattccaaagttctgcagcctcaaactgcaacttatgatgttttctcaagccctacaacatcagatgagcctgagatatcagattcctacacagcaacaagtgatcgtattctggattctatcccacctaaaacttctagaactcttgaacagccaagggcaacactggctccaagtgaaacaccatttgttcctcaaaaactggaaatctttaccagtccagaaatgcagcctacgacacctgctccccagcaaactacatctatcccttctacacctaaacgacgcccccggcccaaaccgccaagaaccaaacctgaaagaaccacaagtgccggaacaattacacctaaaatttctaaaagccctgaacctacatggacaacaccggctcccggtaaaacacaatttatttctctgaaacctaaaatccctctcagcccagaagtgacacacaccaaacctgccccagaacctcagactctactgccatcacagtcaacaataggacctgaaacaccaggaaccaaaccttcaacaacattagcaccacgaaagaccaaaagaccaggtcgtcgcccccgcccccgtccccgccctaaaaccacacctagtccagaagtgcccaagtccaaacccgctctggaacctgccacgatacaaccggagcccttggtgcccacaactgcctcaaaaccatctgagagacctaaaaccacacacagaccagatgcacctcaaattcagcctggttcaaaaccaccaaaacaattacttcctaaaccccaaaccacagcagaaccagacatgccaccaactaaatccgtctctgagcctgttccatttgaaactgaagctccctcaatgaccatagttcccaccacagacattgagcctgtaactgtgagaactgaggctacagtgacaacattagctccaaaaacatcgcaacgaacaagaacacgtcgtccacgtcccaaacataaaaccacgccacgcccagagacactgcagaccaaactagactttggacctattactcctgggacatcttcagctccaacaacaacaacaaaaagaacccgtcgtccacatcccaaacctaaaaccacgccccatccagaagtacctcaaactaaactggttcctgccacaatcctcgaaccagttcttagaactgaggcttcagggacaacagcagctcccaaagtgcctcaacgaactcatcgtccacatcccaaacctaaaaccacactgagtcccgaagagcttcagactgaactggttcctgctacaatctttgaaccagtttctcctataaaagaggctccagggacaacattcgttcctgttacagacctcgagcctgttacttttagaactgagatccctgcaacaaccttagctaccaaaacatcaaaaagaacccgccctccacgtcccagacctaaaactacaccgagccctcaggcacctgagaccaaacctgttcctgctacagtcctagaacctgtcactcttagacctgaggcctcaacaacattagcttccaaaacatcacaacggacacgtcgtccacgtctcagaacaaaaaccacaccacgtcctgaagcacctgaatccaaaccagttcctactgcggagctcaaacctgttacactcagaactgagacttgggtgacaacacaagctcctaaaacatcacaacgaactcgtcgtccacgtcccaaaactaaaaccacaccaagtcctgaggttcctcaaaccaaactggttccttctacagatcttgaacctggtactctcagaactgaagctccaaaaaccatggttgttactacagtccttgaacctgacacttttagaaccaagtttccagaaacaacgttagctcctaaaacacaacggacacgtcgtccccgtcccagacccaaaactacatcaagtcctgaagtacctcagaacaaatcggtttctgttacaggctttgaacctgttgttcatagtactgatgctccaggaacaacatttgctctgactgaactgcaaactcttattttgaaaccagtgacatcaccaagcctagaaatgacagaaagtcaacctgtttctgatgttctggaatcggttacacttagtactgagtcaccaaaggagaccatagcaccagccaaaacagactatgtatatcccactgccaaagcaccactctggccagaggagccaaagactgaagttgtggaatctattacatatgtatctgaaccacctgagaccacactagaaacgtcgcctctgccttctcaatctataaccctacccagcccagatgagcctcagactgaacctgctcccaagcagacaccacgtgctcctcctaagccaaaaacatcaccacgcccaagaatcccacaaacacaaccagttcctaaggtgccccagcgtgttactgcaaaaccaaaaacgtcaccaagtccagaagtgtcatacaccacacctgctccaaaagatgtgctccttcctcataaaccataccctgaggtctctcagagcgaacctgctcctctagagacacgaggcatcccttttatacccatgatttccccaagtcctagtcaagaggaactacagaccactctggaagaaacagaccaatccacccaagaacctttcacaactaagattccacgaacaactgaactagcaaagacaactcaggcgccacacagattttatactactgtgaggcccagaacatctgacaagccacacatcagacctgttctgaataggacaactacaagacctactaggcccaaacccagtgggatgcccagtgggaatggagtgggaacaggggtcaagcaagcacccaggccatcaggtgctgatagaaatgtatcagtggactctacccaccccactaaaaagccagggactcgccgcccacccttgccacccagacctacacacccacgaagaaaacctttaccaccaaataatgtcactggaaagccaggaagtgcaggaatcatttcatcaggcccaataactacaccacccctgaggtcaacacccaggcctactggaactcccttggagagaatagagacagatataaagcaaccaacagttcctgcctctggagaagaactggaaaatataactgactttagctcaagcccaacaagagaaactgatcctcttgggaagccaagattcaaaggacctcatgtgcgatacatccaaaagcctgacaacagtccctgctccattactgactctgtcaaacggttccccaaagaggaggccacagaggggaatgccaccagcccaccacagaacccacccaccaacctcactgtggtcaccgtggaagggtgcccctcatttgtcatcttggactgggaaaagccactaaatgacactgtcactgaatatgaagttatatccagagaaaatgggtcattcagtgggaagaacaagtccattcaaatgacaaatcagacattttccacagtagaaaatctgaaaccaaacacgagttatgaattccaggtgaaacccaaaaacccgcttggtgaaggcccggtcagcaacacagtggcattcagtactgaatcagcggacccaagagtgagtgagccagtttctgcaggaagagatgccatctggactgaaagaccctttaattcagactcttactcagagtgtaagggcaaacaatatgtcaaaaggacatggtataaaaaatttgtaggagtgcagctgtgcaactctctcagatacaagatttacttgagcgactccctcacaggaaaattttataacataggtgatcagaggggccatggagaagatcactgccagtttgtggattcatttttagatggacgcactgggcagcaactcacttctgaccagttaccaatcaaagaaggttatttcagagcagttcgccaggaacctgtccaatttggagaaataggtggtcacacccaaatcaattatgttcagtggtatgaatgtgggactacaattcctggaaaatggtagatgctgcacaaagttaccttctgtttcatcattgcaaacaaaaatcattgaaaatactatgccgcattcatttaaagctattttgtttactatgtataaaagtctacaatctaattaatagcaatactagatgtttattattagaaaagattgctgagagtatttatcaggttttacaaagtcattttaagaaagcaagatactgatgttaacagaataacatttttggggaagctggctccctattcatggtattttaagagatcatttgtatattatttatcacactgttgtaatgatgttttgagatacttttataacaaaattaacatcaaaaaggtatatactttttaaaaaaaatttacttttattgatgtgtactcttcctattgatgagttaattccataaatctctacttagtttaacttattggatcaaattatcttcagcatgtatatctggggaaaaaaggtccgaattttcacatttatatttaaacttcaattttttatatttaaacttcaattttttagcaacagctgaatagctttgcggaggagtttaatagttacacattcatgctaatatacatttcctttaaacatccacaaattcttaaaaagattgaatcagtaaatttcatttcagctaaaaatggagtctaatatattgtttcaaaagatacatttttacccaccataaatgttacaatatctgaatatgctttgtcaaactatccctttatgcaatcgtcttcatattgtttttatgattctaatcaagctgtatgtagagactgaatgtgaagtcaagtctgagcacaaaaagataatgcacgatgagattgcctaccattttataggatatttactatgtatttatacgttaagacctctatgaatgaatgtatcagagaatgtctttgtaactgtttaattcaatctgtaataaaaatctaactaactaactcatttatttctattaaaaaggtattgtcctttaggcggggaatgggaatccttgctgcactgttgcagtcattctgaaaggacctttccctgtacttacctttcaacatgcttcaatcttatcaacgctacattttgtatttttcaaacaagtataaattctgcaataaagagatgtagtttttttttaagattgagtttttgtttgttatttctgaatggttcatcagtatgttaactataccttttatcgagaaggaaaatcactaagttttattcaggctctaccaacccccattatatctactgtttgtttatgtcctaaattaacctttcatcctatgaagtaataaagttcattttaaaccaa

SEQ ID NO: 103328 - DNA, 566 bp, Homo sapiens
  Payload ID: 148
  Gene Symbol: ABI3BP
  Gene Name: ABI family, member 3 (NESH) binding protein
  ENST ID: ENST00000497395
  CDS Start-End: 1-566
tactgcaaaaccaaaaacgtcaccaagtccagaagtgtcatacaccacacctgctcctctagagacacgaggcatcccttttatacccatgatttccccaagtcctagtcaagaggaactacagaccactctggaagaaacagaccaatccacccaagaacctttcacaactaagattccacgaacaactgaactagcaaagacaactcaggcgccacacagattttatactactgtgaggcccagaacatctgacaagccacacatcagacctgttctgaataggacaactacaagacctactaggcccaaacccagtgggatgcccagtgggaatggagtgggaacaggggtcaagcaagcacccaggccatcaggtgctgatagaaatgtatcagtggactctacccaccccactaaaaagccagggactcgccgcccacccttgccacccagacctacacacccacgaagaaaacctttaccaccaaataatgtcactggaaagccaggaagtgcaggaatcatttcatcaggcccaataactacaccacccctgaggtcaa

SEQ ID NO: 103329 - DNA, 453 bp, Homo sapiens
  Payload ID: 148
  Gene Symbol: ABI3BP
  Gene Name: ABI family, member 3 (NESH) binding protein
  ENST ID: ENST00000527943
  CDS Start-End: 1-453
ttgtggaatctattacatatgtatctgaaccacctgagaccacactagaaacgtcgcctctgccttctcaatctataaccctacccagcccagatgagcctcagactgaacctgctcccaagcagacaccacgtgctcctcctaagccaaaaacatcaccacgcccaagaatcccacaaacacaaccagttcctaaggtgccccagcgtgttactgcaaaaccaaaaacgtcaccaagtccagaagtgtcatacaccacacctgctccaaaagatgtgctccttcctcataaaccataccctgaggtctctcagagcgaacctgttctgcagcctgttacctttagatttgagccaccaaagacaacaatagctcctctagagacacgaggcatcccttttatacccatgatttccccaagtcctagtcaagaggaactacagaccactctgg

SEQ ID NO: 103330 - DNA, 375 bp, Homo sapiens
  Payload ID: 148
  Gene Symbol: ABI3BP
  Gene Name: ABI family, member 3 (NESH) binding protein
  ENST ID: ENST00000528305
  CDS Start-End: 1-375
ctaagaatgaaaccttggcattacctgccgaatctaaaacaccagaggttgaaaaaatctcagcacgacccacaacagtgactcctgaaacagttccaagaagcactaaacccactacgtctagtgcattagatgtttcagaaacaacactggctccaaaaagccttccagaatttcctgaggcaaaaacacccttcccttttgagaaacctaggggcacattggcttcaagtgaaaagccatggattgtgcctacagctaaaatatctgaagattccaaagttctgcagcctcaaactgctctgactgaactgcaaactcttattttgaaaccagtgacatcaccaagcctagaaatgacagaaagtcaacctg

SEQ ID NO: 103331 - DNA, 563 bp, Homo sapiens
  Payload ID: 148
  Gene Symbol: ABI3BP
  Gene Name: ABI family, member 3 (NESH) binding protein
  ENST ID: ENST00000533795
  CDS Start-End: 1-563
ccacgaaagaccaaaagaccaggtcgtcgcccccgcccccgtccccgccctaaaaccacacctagtccagaagtgcccaagtccaaacccgctctggaacctgccacgatacaaccggagcccttggtgcccacaactgcctcaaaaccatctgagagacctaaaaccacacacagaccagatgcacctcaaattcagcctgtctctgagcctgttccatttgaaactgaagctccctcaatgaccatagttcccaccacagacattgagcctgtaactgtgagaactgaggctacagtgacaacattagctccaaaaacatcgcaacgaacaagaacacgtcgtccacgtcccaaacataaaaccacgccacgcccagagacactgcagaccaaactagactttggacctattactcctgggacatcttcagctccaacaacaacaacaaaaagaacccgtcgtccacatcccaaacctaaaaccacgccccatccagaagtacctcaaactaaactggctcccaagcagacaccacgtgctcctcctaagccaaaaacatc

SEQ ID NO: 103332 - DNA, 3714 bp, Homo sapiens
  Payload ID: 148
  Gene Symbol: ABI3BP
  Gene Name: ABI family, member 3 (NESH) binding protein
  ENST ID: ENST00000495063
  CDS Start-End: 49-3066
cttaaatgcagctccagggttgcgaggcacccaccagcatcattccccatgcgaggtggcaaatgcaacatgctctccagtttggggtgtctacttctctgtggaagtattacactagccctgggaaatgcacagaaattgccaaaaggtaaaaggccaaacctcaaagtccacatcaataccacaagtgactccatcctcttgaagttcttgcgtccaagtccaaatgtaaagcttgaaggtcttctcctgggatatggcagcaatgtatcaccaaaccagtacttccctcttcccgctgaagggaaattcacagaagctatagttgatgcagagccgaaatatctgatagttgtgcgacctgctccacctccaagtcaaaagaagtcatgttcaggtaaaactcgttctcgcaaacctctgcagctggtggttggcactctgacaccgagctcggtcttcctgtcctggggtttcctcatcaacccacaccatgactggacattgccaagtcactgtcccaatgacagattttatacaattcgctatcgagaaaaggataaagaaaagaagtggatttttcaaatctgtccagccactgaaacaattgtggaaaacctaaagcccaacacagtttatgaatttggagtgaaagacaatgtggaaggtggaatttggagtaagattttcaatcacaagactgttgttggaagtaaaaaagtaaatgggaaaatccaaagtacctatgaccaagaccacacagtgccagcatatgtcccaaggaaactaatcccaataacaatcatcaagcaagtgattcagaatgttactcacaaggattcagctaaatccccagaaaaagctccactgggaggagtgatactagtccaccttattattccaggtcttaatgaaactactgtaaaacttcctgcatccctaatgtttgagatttcagatgcactcaagacacaattagctaagaatgaaaccttggcattacctgccgaatctaaaacaccagaggttgaaaaaatctcagcacgacccacaacagtgactcctgaaacagttccaagaagcactaaacccactacgtctagtgcattagatgtttcagaaacaacactggttctcagcaaaaggaccccggaaacattgcaaactattctaatacctcagtttgaattgccactgagcactctagctccaaaaagccttccagaatttcctgaggcaaaaacacccttcccttttgagaaacctaggggcacattggcttcaagtgaaaagccatggattgtgcctacagctaaaatatctgaagattccaaagttctgcagcctcaaactgcaacttatgatgttttctcaagccctacaacatcagatgagcctgagatatcagattcctacacagcaacaagtgatcgtattctggattctatcccacctaaaacttctagaactcttgaacagccaagggcaacactggctccaagtgaaacaccatttgttcctcaaaaactggaaatctttaccagtccagaaatgcagcctacgacacctgctccccagcaaactacatctatcccttctacacctaaacgacgcccccggcccaaaccgccaagaaccaaacctgaaagaaccacaagtgccggaacaattacacctaaaatttctaaaagccctgaacctacatggacaacaccggctcccggtaaaacacaatttatttctctgaaacctaaaatccctctcagcccagaagtgacacacaccaaacctgccccagaacctcagactctactgccatcacagtcaacaataggacctgaaacaccaggaaccaaaccttcaacaacattagcaccacgaaagaccaaaagaccaggtcgtcgcccccgcccccgtccccgccctaaaaccacacctagtccagaagtgcccaagtccaaacccgctctggaacctgccacgatacaaccggagcccttggtgcccacaactgcctcaaaaccatctgagagacctaaaaccacacacagaccagatgcacctcaaattcagcctggttcaaaaccaccaaaacaattacttcctaaaccccaaaccacagcagaaccagacatgccaccaactaaatccgtctctgagcctgttccatttgaaactgaagctccctcaatgaccatagttcccaccacagacattgagcctgtaactgtgagaactgaggctacagtgacaacattagctccaaaaacatcgcaacgaacaagaacacgtcgtccacgtcccaaacataaaaccacgccacgcccagagacactgcagaccaaactagactttggacctattactcctgggacatcttcagctccaacaacaacaacaaaaagaacccgtcgtccacatcccaaacctaaaaccacgccccatccagaagtacctcaaactaaactggctaccaaaacatcaaaaagaacccgccctccacgtcccagacctaaaactacaccgagccctcaggcacctgagaccaaacctgttcctgctacagtcctagaacctgtcactcttagacctgaggcctcaacaacattagcttccaaaacatcacaacggacacgtcgtccacgtctcagaacaaaaaccacaccacgtcctgaagcacctgaatccaaaccagttcctactgcggagctcaaacctgttacactcagaactgagacttgggtgacaacacaagctcctaaaacatcacaacgaactcgtcgtccacgtcccaaaactaaaaccacaccaagtcctgaggttcctcaaaccaaactggttccttctacagatcttgaacctggtactctcagaactgaagctccaaaaaccatggttgttactacagtccttgaacctgacacttttagaaccaagtttccagaaacaacgttagctcctaaaacacaacggacacgtcgtccccgtcccagacccaaaactacatcaagtcctgaagtacctcagaacaaatcgggtaaatgtatgaatccttggcttaagtagccaaggaacctgaaccctggcaggctgtcccaataaagtcctaaagaaatgcctatgacgggaagtaacagtcatcatgttttctaagaatcaaattatttaacatgggtagcaactgcttctcgtacagagctatccaggagaacatggcttggagccacttgtgtgcctgatctcctaaatgacttggtttggatgacgttcttggtccctctttaaagatgtgtttacagcgagattagcatactcatgggtatttattgctatatctgcattgaaacatgtgatccatttgttatgattacataaacaggcatttattttcaacttccaagaaaagcaacaagttactttcatatatatttctctctgtattttcgtatctgttgcctaaacaaatttccaaagccaaatatccatactagttagaaaaccaaatacctaggaaaacctcatgtggataatatcaagatatgtaacagagttcaaaggttgtaactaccttctttgatgaattgttctagctagtgtggccaaatcttccaaaagcaactatatgctgcctatcaattcaaaagttttaaaaaattgtgtatcatttgaaactcatgttttaaaataaaaattgaggattttttttaaaaagtc

SEQ ID NO: 103333 - DNA, 553 bp, Homo sapiens
  Payload ID: 148
  Gene Symbol: ABI3BP
  Gene Name: ABI family, member 3 (NESH) binding protein
  ENST ID: ENST00000530236
  CDS Start-End: 17-199
accagcatcattccccatgcgaggtggcaaatgcaacatgctctccagtttggggtgtctacttctctgtggaagtattacactagccctgggaaatgcacagaaattgccaaaagcaaataaaaggactgaactagtgatacagcatggatggatgagtctcataaaaatgatgctgaatgaaagaagccaggtgtgaagagaacatgtcatgtaaaaggccaaacctcaaagtccacatcaataccacaagtgactccatcctcttgaagttcttgcgtccaagtccaaatgtaaagcttgaaggtcttctcctgggatatggcagcaatgtatcaccaaaccagtacttccctcttcccgctgaagggaaattcacagaagctatagttgatgcagagccgaaatatctgatagttgtgcgacctgctccacctccaagtcaaaagaagtcatgttcaggtaaaactcgttctcgcaaacctctgcagctggtggttggcactctgacaccgagctcggtcttcctgtcctggggtttcctcatcaaccc

SEQ ID NO: 103334 - DNA, 261 bp, Homo sapiens
  Payload ID: 148
  Gene Symbol: ABI3BP
  Gene Name: ABI family, member 3 (NESH) binding protein
  ENST ID: ENST00000534256
  CDS Start-End: 1-261
ctcagactctactgccatcacagtcaacaataggacctgaaacaccaggaaccaaaccttcaacaacattagcaccacgaaagaccaaaagaccaggtcgtcgcccccgcccccgtccccgccctaaaaccacacctagtccagaagtgcccaagtccaaacccgctctggaacctgccacgatacaaccggagcccttggtgcccacaactgtctctgagcctgttccatttgaaactgaagctccctcaatgaccatag

SEQ ID NO: 103335 - DNA, 573 bp, Homo sapiens
  Payload ID: 148
  Gene Symbol: ABI3BP
  Gene Name: ABI family, member 3 (NESH) binding protein
  ENST ID: ENST00000527258
  CDS Start-End: 1-573
tgcattgttgttctgtggtacggctggctgcacttttatgcagagccgaaatatctgatagttgtgcgacctgctccacctccaagtcaaaagaagtcatgttcaggtaaaactcgttctcgcaaacctctgcagctggtggttggcactctgacaccgagctcggtcttcctgtcctggggtttcctcatcaacccacaccatgactggacattgccaagtcactgtcccaatgacagattttatacaattcgctatcgagaaaaggataaagaaaagaagtggatttttcaaatctgtccagccactgaaacaattgtggaaaacctaaagcccaacacagtttatgaatttggagtgaaagacaatgtggaaggtggaatttggagtaagattttcaatcacaagactgttgttggaagtaaaaaagtaaatgggaaaatccaaagtacctatgaccaagaccacacagtgccagcatatgtcccaaggaaactaatcccaataacaatcatcaagcaagtgattcagaatgttactcacaaggattcagctaaatccccagaaaaagct

SEQ ID NO: 103336 - DNA, 561 bp, Homo sapiens
  Payload ID: 148
  Gene Symbol: ABI3BP
  Gene Name: ABI family, member 3 (NESH) binding protein
  ENST ID: ENST00000528490
  CDS Start-End: 1-561
aaagaaccacaagtgccggaacaattacacctaaaatttctaaaagccctgaacctacatggacaacaccggctcccggtaaaacacaatttatttctctgaaacctaaaatccctctcagcccagaagtgacacacaccaaacctgttcccaccacagacattgagcctgtaactgtgagaactgaggctacagtgacaacattagctccaaaaacatcgcaacgaacaagaacacgtcgtccacgtcccaaacataaaaccacgccacgcccagagacactgcagaccaaactagactttggacctattactcctgggacatcttcagctccaacaacaacaacaaaaagaacccgtcgtccacatcccaaacctaaaaccacgccccatccagaagtacctcaaactaaactggctcccaaagtgcctcaacgaactcatcgtccacatcccaaacctaaaaccacactgagtcccgaagagcttcagactgaactggttcctgctacaatctttgaaccagtttctcctataaaagaggctccagggacaacattcg

SEQ ID NO: 103337 - DNA, 571 bp, Homo sapiens
  Payload ID: 148
  Gene Symbol: ABI3BP
  Gene Name: ABI family, member 3 (NESH) binding protein
  ENST ID: ENST00000530539
  CDS Start-End: 88-571
aagtgcagccgcccgcctctgtcactgggagacagtccacttaaatgcagctccagggttgcgaggcacccaccagcatcattccccatgcgaggtggcaaatgcaacatgctctccagtttggggtgtctacttctctgtggaagtattacactagccctgggaaatgcacagaaattgccaaaagatgcagagccgaaatatctgatagttgtgcgacctgctccacctccaagtcaaaagaagtcatgttcaggtaaaactcgttctcgcaaacctctgcagctggtggttggcactctgacaccgagctcggtcttcctgtcctggggtttcctcatcaacccacaccatgactggacattgccaagtcactgtcccaatgacagattttatacaattcgctatcgagaaaaggataaagaaaagaagtggatttttcaaatctgtccagccactgaaacaattgtggaaaacctaaagcccaacacagtttatgaatttggagtgaaagacaatgtggaaggtggaatttggagtaagattttcaatcacaagactgttgttggaa

SEQ ID NO: 103338 - DNA, 910 bp, Homo sapiens
  Payload ID: 148
  Gene Symbol: ABI3BP
  Gene Name: ABI family, member 3 (NESH) binding protein
  ENST ID: ENST00000533855
  CDS Start-End: 1-910
aaacaccagaggttgaaaaaatctcagcacgacccacaacagtgactcctgaaacagttccaagaagcactaaacccactacgtctagtgcattagatgtttcagaaacaacactggcttcaagtgaaaagccatggattgtgcctacagctaaaatatctgaagattccaaagttctgcagcctcaaactgcaacttatgatgttttctcaagccctacaacatcagatgagcctgagatatcagattcctacacagcaacaagtgatcgtattctggattctatcccacctaaaacttctagaactcttgaacagccaagggcaacactggctccaagtgaaacaccatttgttcctcaaaaactggaaatctttaccagtccagaaatgcagcctacgacacctgctccccagcaaactacatctatcccttctacacctaaacgacgcccccggcccaaaccgccaagaaccaaacctgaaagaaccacaagtgccggaacaattacacctaaaatttctaaaagccctgaacctacatggacaacaccggctcccggtaaaacacaatttatttctctgaaacctaaaatccctctcagcccagaagtgacacacaccaaacctgccccagaacctcagactctactgccatcacagtcaacaataggacctgaaacaccaggaaccaaaccttcaacaacattagcaccacgaaagaccaaaagaccaggtcgtcgcccccgcccccgtccccgccctaaaaccacacctagtccagaagtgcccaagtccaaacccgctctggaacctgccacgatacaaccggagcccttggtgcccacaactgcctcaaaaccatctgagagacctaaaaccacacacagaccagatgcacctcaaattca

SEQ ID NO: 103339 - DNA, 450 bp, Homo sapiens
  Payload ID: 148
  Gene Symbol: ABI3BP
  Gene Name: ABI family, member 3 (NESH) binding protein
  ENST ID: ENST00000534413
  CDS Start-End: 1-450
gacctgaaacaccaggaaccaaaccttcaacaacattagcaccacgaaagaccaaaagaccaggtcgtcgcccccgcccccgtccccgccctaaaaccacacctagtccagaagtgcccaagtccaaacccgctctggaacctgccacgatacaaccggagcccttggtgcccacaactgttcccaccacagacattgagcctgtaactgtgagaactgaggctacagtgacaacattagctccaaaaacatcgcaacgaacaagaacacgtcgtccacgtcccaaacataaaaccacgccacgcccagagacactgcagaccaaactagactttggacctattactcctgggacatcttcagctccaacaacaacaacaaaaagaacccgtcgtccacatcccaaacctaaaaccacgccccatccagaagtacctcaaactaaactgg

SEQ ID NO: 103340 - DNA, 5766 bp, Homo sapiens
  Payload ID: 149
  Gene Symbol: ABL1
  Gene Name: ABL proto-oncogene 1, non-receptor tyrosine kinase
  Uniprot ID: P00519
  ENST ID: ENST00000318560
  CDS Start-End: 382-3774
ggccttccccctgcgaggatcgccattggcccgggttggctttggaaagcggcggtggctttgggccgggctcggcctcgggaacgccaggggcccctgggtgcggacgggcgcggccaggagggggttaaggcgcaggcggcggcggggcgggggcgggcctggcgggcgccctctccgggccctttgttaacaggcgcgtcccggccaggcggagacgcggccgcggccatgggcgggcgcgggcgcgcggggcggcggtgagggcggctggcggggccgggggcgccgggggggcgcgcgggccgagccgggcctgagccgggcccgcggaccgagctgggagaggggttccggcccccgacgtgctggcgcgggaaaatgttggagatctgcctgaagctggtgggctgcaaatccaagaaggggctgtcctcgtcctccagctgttatctggaagaagcccttcagcggccagtagcatctgactttgagcctcagggtctgagtgaagccgctcgttggaactccaaggaaaaccttctcgctggacccagtgaaaatgaccccaaccttttcgttgcactgtatgattttgtggccagtggagataacactctaagcataactaaaggtgaaaagctccgggtcttaggctataatcacaatggggaatggtgtgaagcccaaaccaaaaatggccaaggctgggtcccaagcaactacatcacgccagtcaacagtctggagaaacactcctggtaccatgggcctgtgtcccgcaatgccgctgagtatctgctgagcagcgggatcaatggcagcttcttggtgcgtgagagtgagagcagtcctggccagaggtccatctcgctgagatacgaagggagggtgtaccattacaggatcaacactgcttctgatggcaagctctacgtctcctccgagagccgcttcaacaccctggccgagttggttcatcatcattcaacggtggccgacgggctcatcaccacgctccattatccagccccaaagcgcaacaagcccactgtctatggtgtgtcccccaactacgacaagtgggagatggaacgcacggacatcaccatgaagcacaagctgggcgggggccagtacggggaggtgtacgagggcgtgtggaagaaatacagcctgacggtggccgtgaagaccttgaaggaggacaccatggaggtggaagagttcttgaaagaagctgcagtcatgaaagagatcaaacaccctaacctggtgcagctccttggggtctgcacccgggagcccccgttctatatcatcactgagttcatgacctacgggaacctcctggactacctgagggagtgcaaccggcaggaggtgaacgccgtggtgctgctgtacatggccactcagatctcgtcagccatggagtacctggagaagaaaaacttcatccacagagatcttgctgcccgaaactgcctggtaggggagaaccacttggtgaaggtagctgattttggcctgagcaggttgatgacaggggacacctacacagcccatgctggagccaagttccccatcaaatggactgcacccgagagcctggcctacaacaagttctccatcaagtccgacgtctgggcatttggagtattgctttgggaaattgctacctatggcatgtccccttacccgggaattgacctgtcccaggtgtatgagctgctagagaaggactaccgcatggagcgcccagaaggctgcccagagaaggtctatgaactcatgcgagcatgttggcagtggaatccctctgaccggccctcctttgctgaaatccaccaagcctttgaaacaatgttccaggaatccagtatctcagacgaagtggaaaaggagctggggaaacaaggcgtccgtggggctgtgagtaccttgctgcaggccccagagctgcccaccaagacgaggacctccaggagagctgcagagcacagagacaccactgacgtgcctgagatgcctcactccaagggccagggagagagcgatcctctggaccatgagcctgccgtgtctccattgctccctcgaaaagagcgaggtcccccggagggcggcctgaatgaagatgagcgccttctccccaaagacaaaaagaccaacttgttcagcgccttgatcaagaagaagaagaagacagccccaacccctcccaaacgcagcagctccttccgggagatggacggccagccggagcgcagaggggccggcgaggaagagggccgagacatcagcaacggggcactggctttcacccccttggacacagctgacccagccaagtccccaaagcccagcaatggggctggggtccccaatggagccctccgggagtccgggggctcaggcttccggtctccccacctgtggaagaagtccagcacgctgaccagcagccgcctagccaccggcgaggaggagggcggtggcagctccagcaagcgcttcctgcgctcttgctccgcctcctgcgttccccatggggccaaggacacggagtggaggtcagtcacgctgcctcgggacttgcagtccacgggaagacagtttgactcgtccacatttggagggcacaaaagtgagaagccggctctgcctcggaagagggcaggggagaacaggtctgaccaggtgacccgaggcacagtaacgcctccccccaggctggtgaaaaagaatgaggaagctgctgatgaggtcttcaaagacatcatggagtccagcccgggctccagcccgcccaacctgactccaaaacccctccggcggcaggtcaccgtggcccctgcctcgggcctcccccacaaggaagaagctggaaagggcagtgccttagggacccctgctgcagctgagccagtgacccccaccagcaaagcaggctcaggtgcaccagggggcaccagcaagggccccgccgaggagtccagagtgaggaggcacaagcactcctctgagtcgccagggagggacaaggggaaattgtccaggctcaaacctgccccgccgcccccaccagcagcctctgcagggaaggctggaggaaagccctcgcagagcccgagccaggaggcggccggggaggcagtcctgggcgcaaagacaaaagccacgagtctggttgatgctgtgaacagtgacgctgccaagcccagccagccgggagagggcctcaaaaagcccgtgctcccggccactccaaagccacagtccgccaagccgtcggggacccccatcagcccagcccccgttccctccacgttgccatcagcatcctcggccctggcaggggaccagccgtcttccaccgccttcatccctctcatatcaacccgagtgtctcttcggaaaacccgccagcctccagagcggatcgccagcggcgccatcaccaagggcgtggtcctggacagcaccgaggcgctgtgcctcgccatctctaggaactccgagcagatggccagccacagcgcagtgctggaggccggcaaaaacctctacacgttctgcgtgagctatgtggattccatccagcaaatgaggaacaagtttgccttccgagaggccatcaacaaactggagaataatctccgggagcttcagatctgcccggcgacagcaggcagtggtccagcggccactcaggacttcagcaagctcctcagttcggtgaaggaaatcagtgacatagtgcagaggtagcagcagtcaggggtcaggtgtcaggcccgtcggagctgcctgcagcacatgcgggctcgcccatacccgtgacagtggctgacaagggactagtgagtcagcaccttggcccaggagctctgcgccaggcagagctgagggccctgtggagtccagctctactacctacgtttgcaccgcctgccctcccgcaccttcctcctccccgctccgtctctgtcctcgaattttatctgtggagttcctgctccgtggactgcagtcggcatgccaggacccgccagccccgctcccacctagtgccccagactgagctctccaggccaggtgggaacggctgatgtggactgtctttttcatttttttctctctggagcccctcctcccccggctgggcctccttcttccacttctccaagaatggaagcctgaactgaggccttgtgtgtcaggccctctgcctgcactccctggccttgcccgtcgtgtgctgaagacatgtttcaagaaccgcatttcgggaagggcatgcacgggcatgcacacggctggtcactctgccctctgctgctgcccggggtggggtgcactcgccatttcctcacgtgcaggacagctcttgatttgggtggaaaacagggtgctaaagccaaccagcctttgggtcctgggcaggtgggagctgaaaaggatcgaggcatggggcatgtcctttccatctgtccacatccccagagcccagctcttgctctcttgtgacgtgcactgtgaatcctggcaagaaagcttgagtctcaagggtggcaggtcactgtcactgccgacatccctcccccagcagaatggaggcaggggacaagggaggcagtggctagtggggtgaacagctggtgccaaatagccccagactgggcccaggcaggtctgcaagggcccagagtgaaccgtcctttcacacatctgggtgccctgaaagggcccttcccctcccccactcctctaagacaaagtagattcttacaaggccctttcctttggaacaagacagccttcacttttctgagttcttgaagcatttcaaagccctgcctctgtgtagccgccctgagagagaatagagctgccactgggcacctgcgcacaggtgggaggaaagggcctggccagtcctggtcctggctgcactcttgaactgggcgaatgtcttatttaattaccgtgagtgacatagcctcatgttctgtgggggtcatcagggagggttaggaaaaccacaaacggagcccctgaaagcctcacgtatttcacagagcacgcctgccatcttctccccgaggctgccccaggccggagcccagatacgggggctgtgactctgggcagggacccggggtctcctggaccttgacagagcagctaactccgagagcagtgggcaggtggccgcccctgaggcttcacgccgggagaagccaccttcccaccccttcataccgcctcgtgccagcagcctcgcacaggccctagctttacgctcatcacctaaacttgtactttatttttctgatagaaatggtttcctctggatcgttttatgcggttcttacagcacatcacctctttgcccccgacggctgtgacgcagccggagggaggcactagtcaccgacagcggccttgaagacagagcaaagcgcccacccaggtcccccgactgcctgtctccatgaggtactggtcccttccttttgttaacgtgatgtgccactatattttacacgtatctcttggtatgcatcttttatagacgctcttttctaagtggcgtgtgcatagcgtcctgccctgccccctcgggggcctgtggtggctccccctctgcttctcggggtccagtgcattttgtttctgtatatgattctctgtggttttttttgaatccaaatctgtcctctgtagtattttttaaataaatcagtgtttacattagaa

SEQ ID NO: 103341 - DNA, 3824 bp, Homo sapiens
  Payload ID: 149
  Gene Symbol: ABL1
  Gene Name: ABL proto-oncogene 1, non-receptor tyrosine kinase
  Uniprot ID: P00519
  ENST ID: ENST00000372348
  CDS Start-End: 375-3824
tgtgagaattgaaatgactagcattattgacccttttcagcatcccctgtgaatatttctgtttaggtttttcttcttgaaaagaaattgttattcagcccgtttaaaacaaatcaagaaacttttgggtaacattgcaattacatgaaattgataaccgcgaaaataattggaactcctgcttgcaagtgtcaacctaaaaaaagtgcttccttttgttatggaagatgtctttctgtgattgacttcaattgctgacttgtggagatgcagcgaatgtgaaatcccacgtatatgccatttccctctacgctcgctgaccgttctggaagatcttgaaccctcttctggaaaggggtacctattattactttatggggcagcagcctggaaaagtacttggggaccaaagaaggccaagcttgcctgccctgcattttatcaaaggagcagggaagaaggaatcatcgaggcatgggggtccacactgcaatgtttttgtggaacatgaagcccttcagcggccagtagcatctgactttgagcctcagggtctgagtgaagccgctcgttggaactccaaggaaaaccttctcgctggacccagtgaaaatgaccccaaccttttcgttgcactgtatgattttgtggccagtggagataacactctaagcataactaaaggtgaaaagctccgggtcttaggctataatcacaatggggaatggtgtgaagcccaaaccaaaaatggccaaggctgggtcccaagcaactacatcacgccagtcaacagtctggagaaacactcctggtaccatgggcctgtgtcccgcaatgccgctgagtatctgctgagcagcgggatcaatggcagcttcttggtgcgtgagagtgagagcagtcctggccagaggtccatctcgctgagatacgaagggagggtgtaccattacaggatcaacactgcttctgatggcaagctctacgtctcctccgagagccgcttcaacaccctggccgagttggttcatcatcattcaacggtggccgacgggctcatcaccacgctccattatccagccccaaagcgcaacaagcccactgtctatggtgtgtcccccaactacgacaagtgggagatggaacgcacggacatcaccatgaagcacaagctgggcgggggccagtacggggaggtgtacgagggcgtgtggaagaaatacagcctgacggtggccgtgaagaccttgaaggaggacaccatggaggtggaagagttcttgaaagaagctgcagtcatgaaagagatcaaacaccctaacctggtgcagctccttggggtctgcacccgggagcccccgttctatatcatcactgagttcatgacctacgggaacctcctggactacctgagggagtgcaaccggcaggaggtgaacgccgtggtgctgctgtacatggccactcagatctcgtcagccatggagtacctggagaagaaaaacttcatccacagagatcttgctgcccgaaactgcctggtaggggagaaccacttggtgaaggtagctgattttggcctgagcaggttgatgacaggggacacctacacagcccatgctggagccaagttccccatcaaatggactgcacccgagagcctggcctacaacaagttctccatcaagtccgacgtctgggcatttggagtattgctttgggaaattgctacctatggcatgtccccttacccgggaattgacctgtcccaggtgtatgagctgctagagaaggactaccgcatggagcgcccagaaggctgcccagagaaggtctatgaactcatgcgagcatgttggcagtggaatccctctgaccggccctcctttgctgaaatccaccaagcctttgaaacaatgttccaggaatccagtatctcagacgaagtggaaaaggagctggggaaacaaggcgtccgtggggctgtgagtaccttgctgcaggccccagagctgcccaccaagacgaggacctccaggagagctgcagagcacagagacaccactgacgtgcctgagatgcctcactccaagggccagggagagagcgatcctctggaccatgagcctgccgtgtctccattgctccctcgaaaagagcgaggtcccccggagggcggcctgaatgaagatgagcgccttctccccaaagacaaaaagaccaacttgttcagcgccttgatcaagaagaagaagaagacagccccaacccctcccaaacgcagcagctccttccgggagatggacggccagccggagcgcagaggggccggcgaggaagagggccgagacatcagcaacggggcactggctttcacccccttggacacagctgacccagccaagtccccaaagcccagcaatggggctggggtccccaatggagccctccgggagtccgggggctcaggcttccggtctccccacctgtggaagaagtccagcacgctgaccagcagccgcctagccaccggcgaggaggagggcggtggcagctccagcaagcgcttcctgcgctcttgctccgcctcctgcgttccccatggggccaaggacacggagtggaggtcagtcacgctgcctcgggacttgcagtccacgggaagacagtttgactcgtccacatttggagggcacaaaagtgagaagccggctctgcctcggaagagggcaggggagaacaggtctgaccaggtgacccgaggcacagtaacgcctccccccaggctggtgaaaaagaatgaggaagctgctgatgaggtcttcaaagacatcatggagtccagcccgggctccagcccgcccaacctgactccaaaacccctccggcggcaggtcaccgtggcccctgcctcgggcctcccccacaaggaagaagctggaaagggcagtgccttagggacccctgctgcagctgagccagtgacccccaccagcaaagcaggctcaggtgcaccagggggcaccagcaagggccccgccgaggagtccagagtgaggaggcacaagcactcctctgagtcgccagggagggacaaggggaaattgtccaggctcaaacctgccccgccgcccccaccagcagcctctgcagggaaggctggaggaaagccctcgcagagcccgagccaggaggcggccggggaggcagtcctgggcgcaaagacaaaagccacgagtctggttgatgctgtgaacagtgacgctgccaagcccagccagccgggagagggcctcaaaaagcccgtgctcccggccactccaaagccacagtccgccaagccgtcggggacccccatcagcccagcccccgttccctccacgttgccatcagcatcctcggccctggcaggggaccagccgtcttccaccgccttcatccctctcatatcaacccgagtgtctcttcggaaaacccgccagcctccagagcggatcgccagcggcgccatcaccaagggcgtggtcctggacagcaccgaggcgctgtgcctcgccatctctaggaactccgagcagatggccagccacagcgcagtgctggaggccggcaaaaacctctacacgttctgcgtgagctatgtggattccatccagcaaatgaggaacaagtttgccttccgagaggccatcaacaaactggagaataatctccgggagcttcagatctgcccggcgacagcaggcagtggtccagcggccactcaggacttcagcaagctcctcagttcggtgaaggaaatcagtgacatagtgcagaggtag

SEQ ID NO: 103342 - DNA, 532 bp, Homo sapiens
  Payload ID: 149
  Gene Symbol: ABL1
  Gene Name: ABL proto-oncogene 1, non-receptor tyrosine kinase
  ENST ID: ENST00000393293
  CDS Start-End: 341-532
tttcagcatcccctgtgaatatttctgtttaggtttttcttcttgaaaagaaattgttattcagcccgtttaaaacaaatcaagaaacttttgggtaacattgcaattacatgaaattgataaccgcgaaaataattggaactcctgcttgcaagtgtcaacctaaaaaaagtgcttccttttgttatggaagatgtctttctgtgattgacttcaattgctgacttgtggagatgcagcgaatgtgaaatcccacgtatatgccatttccctctacgctcgctgaccgttctggaagatcttgaaccctcttctggaaaggggtacctattattactttatggggcagcagcctggaaaagtacttggggaccaaagaaggccaagcttgcctgccctgcattttatcaaaggagcagggaagaaggaatcatcgaggcatgggggtccacactgcaatgtttttgtggaacatgcccttcagcggccagtagcatctgactttgagcctcagggtctgagtgaagccgct

SEQ ID NO: 103343 - DNA, 6910 bp, Homo sapiens
  Payload ID: 150
  Gene Symbol: ABL2
  Gene Name: ABL proto-oncogene 2, non-receptor tyrosine kinase
  Uniprot ID: P42684
  ENST ID: ENST00000344730
  CDS Start-End: 46-3240
ctctttacacagaacagtttaacttttgtgcttctgggcagaggtatggtccttgggacagttctccttccacctaatagttatggcagagatcaggacacttcactttgctgcctgtgcactgaggcctcagaatctgctctacccgacttaacagatcactttgccagctgtgtggaggatggatttgagggagacaagactggaggcagtagtccagaagctttgcatcgtccctatggttgtgatgttgaaccccaggcactaaatgaggctatcaggtggagctccaaggagaacttgctcggagccactgagagtgaccctaatctcttcgttgcactttatgattttgtagcaagtggtgataacacactcagcatcactaaaggtgaaaagctacgagtccttggttacaaccagaatggtgagtggagtgaagttcgctctaagaatgggcagggctgggtgccaagcaactacatcaccccagtgaacagcctggaaaaacactcctggtaccatggacctgtgtcacgcagtgcagctgagtatctgctcagcagtctaatcaatggcagcttcctggtgcgagaaagtgagagtagccctgggcagctgtccatctcgctcaggtacgagggacgtgtgtatcactacaggatcaataccactgcagatggcaaggtgtatgtgactgctgagagccgcttcagcaccttggcagagcttgtacaccatcactccacagtggctgatgggctggtgacaacattacactacccagcacccaagtgtaataagcctacagtctatggtgtgtcccccatccacgacaaatgggaaatggagcgaacagatattaccatgaagcacaaacttgggggcggtcagtatggagaggtttacgttggcgtctggaagaaatacagccttacagttgctgtgaaaacattgaaggaagataccatggaggtagaagaattcctgaaagaagctgcagtaatgaaggaaatcaagcatcctaatctggtacaacttttaggtgtgtgtactttggagccaccattttacattgtgactgaatacatgccatacgggaatttgctggattacctccgagaatgcaaccgagaagaggtgactgcagttgtgctgctctacatggccactcagatttcttctgcaatggagtacttagagaagaagaatttcatccatagagatcttgcagctcgtaactgcctagtgggagaaaaccatgtggtaaaagtggctgactttggcttaagtagattgatgactggagacacttatactgctcatgctggagccaaatttcctattaagtggacagcaccagagagtcttgcctacaataccttctcaattaaatctgacgtctgggcttttggggtattgttgtgggaaattgctacctatggaatgtcaccatatccaggtattgacctgtctcaggtctatgacctactagaaaaaggatatcgaatggaacagcctgagggatgcccccctaaggtttatgaacttatgagagcatgctggaagtggagccctgccgataggccctcttttgctgaaacacaccaagcttttgaaaccatgttccatgactccagcatttctgaagaggtagctgaggagcttgggagagccgcctcctcgtcatctgttgttccatacctgccccggctacctatacttccttccaagactcggacactgaagaaacaggtggagaacaaggagaacattgaaggggcacaagatgccacagaaaattctgcttccagtttagcaccagggttcatcagaggtgcacaggcctctagtggatccccagcactgcctcgaaagcaaagagacaagtcacccagcagcctcttggaagatgccaaagagacatgcttcaccagggataggaaggggggcttcttcagctccttcatgaagaagagaaatgctcctacaccccccaaacgcagcagctccttccgagaaatggagaatcagccccataagaaatacgaactcacggggcttccagagcaggataggatggcaatgacccttcccaggaactgccagaggtccaaactccagctggaaaggacagtgtccacctcttctcagccagaagagaatgtggacagggccaatgacatgcttccaaaaaaatcagaggaaagtgctgctccaagcagggagagaccaaaagccaagttattgcccagaggagccacagctcttcctctcagaacaccctctggggatctagccattacagagaaggaccctccaggggtgggagtggctggagtggcagctgcccccaagggtaaagagaagaatggtggggcacgacttgggatggctggagttccagaggatggagagcagccgggctggccttctccagccaaggctgcccccgtcctcccaaccactcacaaccacaaagtgccagtccttatctcacccactctgaaacacactccagctgacgtgcagctcattggcacagactctcaggggaataaattcaagctcttatctgagcatcaggtcacatcctctggagacaaggaccgaccccgacgggtaaaaccaaagtgtgccccacccccaccaccagtgatgagactactgcagcatccgtccatctgctcagaccctacagaagagccaactgccctaactgcaggacagtccacatcagaaacacaggaaggaggaaagaaggcagctctgggcgcagtgcccatcagtgggaaagctgggaggccagtgatgcctccacctcaagtgcctctgcccacatcttccatctcgccagccaaaatggccaatggcacagcaggtactaaagtggctctgagaaaaaccaaacaggccgctgagaaaatctcagcagacaaaatcagcaaagaggccctgctggaatgtgctgacctactgtccagtgcactcacggaacctgtgcccaacagccagctggtagacactggacaccagctgcttgactactgctcaggctatgtggactgcatccctcaaactcgcaacaaatttgccttccgagaggctgtgagcaaactggaactcagcctgcaggagctacaggtttcttcagcagctgctggtgtgcccgggacaaaccctgtccttaataacttattgtcatgtgtacaggaaatcagtgatgtggtgcagaggtagccactgttagcctggtgggaaaatgcacacatttctgaggggagagggaaaaggacttgttttcctgtgttcttgttttcagaaaatgaaagactcatacttgagtgtgtttatgtgaagtacctcagatccctgagttctcacgtttacagtttcatctcaaaaataagaagcaaaccacataagtataggagaggtaaattaagtgggggcaaggcagtagtggacagggttggaaactgcactggaaaatagggaacatgtgtatgtcataaggaaggcaatgcagcccatccctacctggaatgctgggaagtgctaggcagggctgctctcagcaagactgcagcagctgcacccagacctggggctctggtaggtactaatggtgattatgctccaatttacctaatgaatttggtgggacagcagaaaagaaagctgggaatgtaccaagagaaatttttgttcagggctgttggaagtagctgttagccttgcttccacaaggccattgctgctgtaataagaactgcaaatcagagtgctacaacataaaactgggaaatatggccctatctgaatgcctctgtcctattttccgctggtgtatcagttagtgcaggaagtaaagaatgctggaaagttgaatcagaaattgaaaaccttctaaaatcttacacagattagcagaagtcacttctcccagtctggtatattatttcataatggaccaggatcggcttcctgcctgttggtggctatctgtaaaccataagtacaggggtctccctagtggttcttctctgtcttttgctgggcaggctgtcttcctttattcctggtagcattcagagcattaaccagtgttgattttgaaaatagtagtccctacaggttctcacaaaggaatgaatcctgttctgatacagttcccctgcatactgacatactggccaaggacttgagcagctgtgtatttttctttatcaactaaaataccagggagatggtcttttcttgaaacccagtggcctgtatgtgactgagaggaaaagctggcttggtcctaatggctgtttctctgtacctttcccttcccttaccaccttaagcccaatccaggtagagaatagggagaggcattctcctctctatggatttgaagtgaatcacccccacattattctcacatgcttttcttctctcacatattcctccctactcccccacccaatcattgtgcttatttgtacagatcttattgggaatattctttatttattttgtcatttcacttctattttaagaatgcataattgaaggagtagtcattttcagggagcaccaggtagaccctgggaacctaatgacttaatccttaaatatgttttgcccttgaaaaataggccttttccttccttccttagttataattgtggaagctaattaggatggcatggaagtgaatctaatgagttaggtattattaatgttcttggtatcgggtctaattccagttactgcttcattctctttttaaagctttatgaatacttcccccatcctccccaaggagagctcaatacacacatatttttattttattctctcaaaggaatattagcttaggaagataggaattcaacattgagcactgagttttcttctggctctgtcattgatacactgtcaaaccacagcctcatctcttaatctatttaattaaggtaacagtacatgttctcaagggtgttgcaagtaagtgtgcagctatcccttggagagcctctctggaaagctcttttagtgcagtgttgttatgctgaattgttttccattatcttatttgctgagtagaaaatattaatgaaattaagaattgttgagattatatgaattgggctagaatactaaggggaaaactatgttttgaatagagtttggcatttttgaccaagaacaaaattgagttttcattggaaagaaaggaaaccttgattcttaccattgctgctccaaaggaggcccaggttaagaggattagaggagacacgcggtgctgggcattcctggcaggtgttgggtgatccccgcagtatgtcacctgcagttgcagcacaggcagctagtgattgggttcatctcctcctagtggttggaagagaactcagatgtaaaaaccagcggtccttctcccaccttctttcctgccattcttgctcatcatacatgtccgtaaacttgaagaactcgttttagcagctagccttttaaggtcgaggatgggaaagctaaaactgtagaatattattatgctgctttttaggtttatccctgttgttgtgggatgcaagttaagggattgtaattgtttttcagggtttttttgttttttgttttttaagcaagggctctattttcccttgagagttctggaactaagccttggagaaacactactgagtgtatttaggctccctggttttcttgcccaacaacaatctgaagggtagggggtgggggctgtgtcttactcaggggcagcacctagctgtcttgcctacagtgggtgcacgatatataaatggaattgatttttgtcaacactgtcaagagtggcattgactattggagcataccccgtccacatgatgcttgaactatgtaacttcaggggttgagggctcaaggttcaggttaaagaggcactgtcaacttactatacaagcataatttaggtttttcctttttctacttgaaaaggaccagcttaaacacaaacccttatgtaaattaaaaggtttgaatccaaagcagagagaactgcttctggaaaagtgtagtttaattttaactattctaaaagcaatgagcaaaggcccttgtccaaggcgttgacagttttctaaagtggttatgctgtatatctggatgcatgcctttgggctgccactgcttgattcctttcatgtacagataatattacttcagtttagatttcccactttaaaatgcagtgatttgtgttgaatacatcttgattgtgctttacctaaagtattttcttaaaaggctttgtgtaaaatttaaatgtatatattttcctgtagacttccatcatgattttcagagattagccttaaaaaatttggccctaagaaattcattcagtgtttttctagatgacctctgtacatagaggtcattatagtggagaccctttaccagcagcattttaagatttaaattagatagaaagtttcttaggattcaactgaaaattggctagtaaaatatgtcccaggtaataaagcatgctgactttgctaaggcactgcccatttttatttaactaaagtcatggagattttgagtttaaaggatgcagtatagatagtggtttagtgtttaggctctaatgccagtctaaaaggcaagtcatttaaccttgggagcctcagtttcctcactgtaaaacagggataataatagtaactacctcagggttgttgtaaggattaaatgagatgatatttgtaagatacttagctcaagtgcctggcacacaatgagcacactctataaatgttctactactactattattaacacctagtctagggatgcacagcagaatcccctagggttaaaaaacaaaacaaaacaa

SEQ ID NO: 103344 - DNA, 3486 bp, Homo sapiens
  Payload ID: 150
  Gene Symbol: ABL2
  Gene Name: ABL proto-oncogene 2, non-receptor tyrosine kinase
  Uniprot ID: P42684
  ENST ID: ENST00000367623
  CDS Start-End: 1-3486
atggggcagcaggtgggccgcgtcggggaagctccggggctccagcagcctcagccccgcgggatccggggcagcagtgcagccaggccctccggccgcaggcgggacccggcggggcgcaccacagagaccggcttcaatatcttcacccagcatgaagctttgcatcgtccctatggttgtgatgttgaaccccaggcactaaatgaggctatcaggtggagctccaaggagaacttgctcggagccactgagagtgaccctaatctcttcgttgcactttatgattttgtagcaagtggtgataacacactcagcatcactaaaggtgaaaagctacgagtccttggttacaaccagaatggtgagtggagtgaagttcgctctaagaatgggcagggctgggtgccaagcaactacatcaccccagtgaacagcctggaaaaacactcctggtaccatggacctgtgtcacgcagtgcagctgagtatctgctcagcagtctaatcaatggcagcttcctggtgcgagaaagtgagagtagccctgggcagctgtccatctcgctcaggtacgagggacgtgtgtatcactacaggatcaataccactgcagatggcaaggtgtatgtgactgctgagagccgcttcagcaccttggcagagcttgtacaccatcactccacagtggctgatgggctggtgacaacattacactacccagcacccaagtgtaataagcctacagtctatggtgtgtcccccatccacgacaaatgggaaatggagcgaacagatattaccatgaagcacaaacttgggggcggtcagtatggagaggtttacgttggcgtctggaagaaatacagccttacagttgctgtgaaaacattgaaggaagataccatggaggtagaagaattcctgaaagaagctgcagtaatgaaggaaatcaagcatcctaatctggtacaacttttaggtgtgtgtactttggagccaccattttacattgtgactgaatacatgccatacgggaatttgctggattacctccgagaatgcaaccgagaagaggtgactgcagttgtgctgctctacatggccactcagatttcttctgcaatggagtacttagagaagaagaatttcatccatagagatcttgcagctcgtaactgcctagtgggagaaaaccatgtggtaaaagtggctgactttggcttaagtagattgatgactggagacacttatactgctcatgctggagccaaatttcctattaagtggacagcaccagagagtcttgcctacaataccttctcaattaaatctgacgtctgggcttttggggtattgttgtgggaaattgctacctatggaatgtcaccatatccaggtattgacctgtctcaggtctatgacctactagaaaaaggatatcgaatggaacagcctgagggatgcccccctaaggtttatgaacttatgagagcatgctggaagtggagccctgccgataggccctcttttgctgaaacacaccaagcttttgaaaccatgttccatgactccagcatttctgaagaggtagctgaggagcttgggagagccgcctcctcgtcatctgttgttccatacctgccccggctacctatacttccttccaagactcggacactgaagaaacaggtggagaacaaggagaacattgaaggggcacaagatgccacagaaaattctgcttccagtttagcaccagggttcatcagaggtgcacaggcctctagtggatccccagcactgcctcgaaagcaaagagacaagtcacccagcagcctcttggaagatgccaaagagacatgcttcaccagggataggaaggggggcttcttcagctccttcatgaagaagagaaatgctcctacaccccccaaacgcagcagctccttccgagaaatggagaatcagccccataagaaatacgaactcacgggtaacttctcatctgttgcttctctacagcatgctgatgggttctctttcactcctgcccagcaagaggcgaatctggtgccacccaagtgctatggggggagctttgcacagaggaacctctgtaatgacgacggtggtgggggtgggggcagtggcactgctgggggtgggtggtctggcatcacaggcttctttacaccacgcttaatcaaaaagacactgggcttacgagcaggtaaacccacagccagtgatgacacttccaagccttttccaaggtcaaactctacatcttccatgtcctcagggcttccagagcaggataggatggcaatgacccttcccaggaactgccagaggtccaaactccagctggaaaggacagtgtccacctcttctcagccagaagagaatgtggacagggccaatgacatgcttccaaaaaaatcagaggaaagtgctgctccaagcagggagagaccaaaagccaagttattgcccagaggagccacagctcttcctctcagaacaccctctggggatctagccattacagagaaggaccctccaggggtgggagtggctggagtggcagctgcccccaagggtaaagagaagaatggtggggcacgacttgggatggctggagttccagaggatggagagcagccgggctggccttctccagccaaggctgcccccgtcctcccaaccactcacaaccacaaagtgccagtccttatctcacccactctgaaacacactccagctgacgtgcagctcattggcacagactctcaggggaataaattcaagctcttatctgagcatcaggtcacatcctctggagacaaggaccgaccccgacgggtaaaaccaaagtgtgccccacccccaccaccagtgatgagactactgcagcatccgtccatctgctcagaccctacagaagagccaactgccctaactgcaggacagtccacatcagaaacacaggaaggaggaaagaaggcagctctgggcgcagtgcccatcagtgggaaagctgggaggccagtgatgcctccacctcaagtgcctctgcccacatcttccatctcgccagccaaaatggccaatggcacagcaggtactaaagtggctctgagaaaaaccaaacaggccgctgagaaaatctcagcagacaaaatcagcaaagaggccctgctggaatgtgctgacctactgtccagtgcactcacggaacctgtgcccaacagccagctggtagacactggacaccagctgcttgactactgctcaggctatgtggactgcatccctcaaactcgcaacaaatttgccttccgagaggctgtgagcaaactggaactcagcctgcaggagctacaggtttcttcagcagctgctggtgtgcccgggacaaaccctgtccttaataacttattgtcatgtgtacaggaaatcagtgatgtggtgcagaggtag

SEQ ID NO: 103345 - DNA, 2140 bp, Homo sapiens
  Payload ID: 150
  Gene Symbol: ABL2
  Gene Name: ABL proto-oncogene 2, non-receptor tyrosine kinase
  Uniprot ID: P42684
  ENST ID: ENST00000392043
  CDS Start-End: 288-1916
gctcggtggtttaaagatggcggcggcggtggcggcggcggcggcggcggcgttgggggcgcggagccgcgacaggaggagggaaaagcagaatctgtgagtcgcctggaggcagcgcggcggctgccgtgaggaggccgggtgcggagccgccggtggcccagccactcagggccagggcctgggctgggagggagagaccggagcagcgccaggagcccgaggccggagccgaggaggaatgtgaccaggggtcggcgggggcgcgggagtacgcgagagcagggatggggcagcaggtgggccgcgtcggggaagctccggggctccagcagcctcagccccgcgggatccggggcagcagtgcagccaggccctccggccgcaggcgggacccggcggggcgcaccacagagaccggcttcaatatcttcacccagcatgaagctttgcatcgtccctatggttgtgatgttgaaccccaggcactaaatgaggctatcaggtggagctccaaggagaacttgctcggagccactgagagtgaccctaatctcttcgttgcactttatgattttgtagcaagtggtgataacacactcagcatcactaaaggtgaaaagctacgagtccttggttacaaccagaatggtgagtggagtgaagttcgctctaagaatgggcagggctgggtgccaagcaactacatcaccccagtgaacagcctggaaaaacactcctggtaccatggacctgtgtcacgcagtgcagctgagtatctgctcagcagtctaatcaatggcagcttcctggtgcgagaaagtgagagtagccctgggcagctgtccatctcgctcaggtacgagggacgtgtgtatcactacaggatcaataccactgcagatggcaaggtgtatgtgactgctgagagccgcttcagcaccttggcagagcttgtacaccatcactccacagtggctgatgggctggtgacaacattacactacccagcacccaagtgtaataagcctacagtctatggtgtgtcccccatccacgacaaatgggaaatggagcgaacagatattaccatgaagcacaaacttgggggcggtcagtatggagaggtttacgttggcgtctggaagaaatacagccttacagttgctgtgaaaacattgaaggaagataccatggaggtagaagaattcctgaaagaagctgcagtaatgaaggaaatcaagcatcctaatctggtacaacttttaggtgtgtgtactttggagccaccattttacattgtgactgaatacatgccatacgggaatttgctggattacctccgagaatgcaaccgagaagaggtgactgcagttgtgctgctctacatggccactcagatttcttctgcaatggagtacttagagaagaagaatttcatccatagagatcttgcagctcgtaactgcctagtgggagaaaaccatgtggtaaaagtggctgactttggcttaagtagattgatgactggagacacttatactgctcatgctggagccaaatttcctattaagtggacagcaccagagagtcttgcctacaataccttctcaattaaatctgacgtctgggcttttggggtattgttgtgggaaattgctacctatggaatgtcaccatatccaggtattgacctgtctcaggtctatgacctactagaaaaaggatatcgaatggaacagcctgagggatgcccccctaaggtttatgaacttatgagagcatgctggaagtggagccctgccgataggccctcttttgctgaaacacaccaagcttttgaaaccatgttccatgactccagcatttctgaagttctcctacattgtgccaatcagacgtgcataacattgtgaaccaaaagacacagagcaggatgatgctagcaacgtattcatagtaactccaaactggaaacaacctaaacatccatcaagaggagaacaggtggattgtggtatattcacacgttggcatgctacacagcaatgagaacccctgccacatgcagcagcgtggacgaatctacacacatgatactgggcgaaagaagccagacaaaagagtacatactttatga

SEQ ID NO: 103346 - DNA, 3177 bp, Homo sapiens
  Payload ID: 150
  Gene Symbol: ABL2
  Gene Name: ABL proto-oncogene 2, non-receptor tyrosine kinase
  Uniprot ID: P42684
  ENST ID: ENST00000507173
  CDS Start-End: 1-3177
atggggcagcaggtgggccgcgtcggggaagctccggggctccagcagcctcagccccgcgggatccggggcagcagtgcagccaggccctccggccgcaggcgggacccggcggggcgcaccacagagaccggcttcaatatcttcacccagcatgaagctttgcatcgtccctatggttgtgatgttgaaccccaggcactaaatgaggctatcaggtggagctccaaggagaacttgctcggagccactgagagtgaccctaatctcttcgttgcactttatgattttgtagcaagtggtgataacacactcagcatcactaaaggtgaaaagctacgagtccttggttacaaccagaatggtgagtggagtgaagttcgctctaagaatgggcagggctgggtgccaagcaactacatcaccccagtgaacagcctggaaaaacactcctggtaccatggacctgtgtcacgcagtgcagctgagtatctgctcagcagtctaatcaatggcagcttcctggtgcgagaaagtgagagtagccctgggcagctgtccatctcgctcaggtacgagggacgtgtgtatcactacaggatcaataccactgcagatggcaaggtgtatgtgactgctgagagccgcttcagcaccttggcagagcttgtacaccatcactccacagtggctgatgggctggtgacaacattacactacccagcacccaagtgtaataagcctacagtctatggtgtgtcccccatccacgacaaatgggaaatggagcgaacagatattaccatgaagcacaaacttgggggcggtcagtatggagaggtttacgttggcgtctggaagaaatacagccttacagttgctgtgaaaacattgaaggaagataccatggaggtagaagaattcctgaaagaagctgcagtaatgaaggaaatcaagcatcctaatctggtacaacttttaggtgtgtgtactttggagccaccattttacattgtgactgaatacatgccatacgggaatttgctggattacctccgagaatgcaaccgagaagaggtgactgcagttgtgctgctctacatggccactcagatttcttctgcaatggagtacttagagaagaagaatttcatccatagagatcttgcagctcgtaactgcctagtgggagaaaaccatgtggtaaaagtggctgactttggcttaagtagattgatgactggagacacttatactgctcatgctggagccaaatttcctattaagtggacagcaccagagagtcttgcctacaataccttctcaattaaatctgacgtctgggcttttggggtattgttgtgggaaattgctacctatggaatgtcaccatatccaggtattgacctgtctcaggtctatgacctactagaaaaaggatatcgaatggaacagcctgagggatgcccccctaaggtttatgaacttatgagagcatgctggaagtggagccctgccgataggccctcttttgctgaaacacaccaagcttttgaaaccatgttccatgactccagcatttctgaagaggtagctgaggagcttgggagagccgcctcctcgtcatctgttgttccatacctgccccggctacctatacttccttccaagactcggacactgaagaaacaggtggagaacaaggagaacattgaaggggcacaagatgccacagaaaattctgcttccagtttagcaccagggttcatcagaggtgcacaggcctctagtggatccccagcactgcctcgaaagcaaagagacaagtcacccagcagcctcttggaagatgccaaagagacatgcttcaccagggataggaaggggggcttcttcagctccttcatgaagaagagaaatgctcctacaccccccaaacgcagcagctccttccgagaaatggagaatcagccccataagaaatacgaactcacggggcttccagagcaggataggatggcaatgacccttcccaggaactgccagaggtccaaactccagctggaaaggacagtgtccacctcttctcagccagaagagaatgtggacagggccaatgacatgcttccaaaaaaatcagaggaaagtgctgctccaagcagggagagaccaaaagccaagttattgcccagaggagccacagctcttcctctcagaacaccctctggggatctagccattacagagaaggaccctccaggggtgggagtggctggagtggcagctgcccccaagggtaaagagaagaatggtggggcacgacttgggatggctggagttccagaggatggagagcagccgggctggccttctccagccaaggctgcccccgtcctcccaaccactcacaaccacaaagtgccagtccttatctcacccactctgaaacacactccagctgacgtgcagctcattggcacagactctcaggggaataaattcaagctcttatctgagcatcaggtcacatcctctggagacaaggaccgaccccgacgggtaaaaccaaagtgtgccccacccccaccaccagtgatgagactactgcagcatccgtccatctgctcagaccctacagaagagccaactgccctaactgcaggacagtccacatcagaaacacaggaaggaggaaagaaggcagctctgggcgcagtgcccatcagtgggaaagctgggaggccagtgatgcctccacctcaagtgcctctgcccacatcttccatctcgccagccaaaatggccaatggcacagcaggtactaaagtggctctgagaaaaaccaaacaggccgctgagaaaatctcagcagacaaaatcagcaaagaggccctgctggaatgtgctgacctactgtccagtgcactcacggaacctgtgcccaacagccagctggtagacactggacaccagctgcttgactactgctcaggctatgtggactgcatccctcaaactcgcaacaaatttgccttccgagaggctgtgagcaaactggaactcagcctgcaggagctacaggtttcttcagcagctgctggtgtgcccgggacaaaccctgtccttaataacttattgtcatgtgtacaggaaatcagtgatgtggtgcagaggtag

SEQ ID NO: 103347 - DNA, 3635 bp, Homo sapiens
  Payload ID: 150
  Gene Symbol: ABL2
  Gene Name: ABL proto-oncogene 2, non-receptor tyrosine kinase
  Uniprot ID: P42684
  ENST ID: ENST00000512653
  CDS Start-End: 13-3516
ctgggcagaggtatggtccttgggacagttctccttccacctaatagttatggcagagatcaggacacttcactttgctgcctgtgcactgaggcctcagaatctgctctacccgacttaacagatcactttgccagctgtgtggaggatggatttgagggagacaagactggaggcagtagtccagaagctttgcatcgtccctatggttgtgatgttgaaccccaggcactaaatgaggctatcaggtggagctccaaggagaacttgctcggagccactgagagtgaccctaatctcttcgttgcactttatgattttgtagcaagtggtgataacacactcagcatcactaaaggtgaaaagctacgagtccttggttacaaccagaatggtgagtggagtgaagttcgctctaagaatgggcagggctgggtgccaagcaactacatcaccccagtgaacagcctggaaaaacactcctggtaccatggacctgtgtcacgcagtgcagctgagtatctgctcagcagtctaatcaatggcagcttcctggtgcgagaaagtgagagtagccctgggcagctgtccatctcgctcaggtacgagggacgtgtgtatcactacaggatcaataccactgcagatggcaaggtgtatgtgactgctgagagccgcttcagcaccttggcagagcttgtacaccatcactccacagtggctgatgggctggtgacaacattacactacccagcacccaagtgtaataagcctacagtctatggtgtgtcccccatccacgacaaatgggaaatggagcgaacagatattaccatgaagcacaaacttgggggcggtcagtatggagaggtttacgttggcgtctggaagaaatacagccttacagttgctgtgaaaacattgaaggaagataccatggaggtagaagaattcctgaaagaagctgcagtaatgaaggaaatcaagcatcctaatctggtacaacttttaggtgtgtgtactttggagccaccattttacattgtgactgaatacatgccatacgggaatttgctggattacctccgagaatgcaaccgagaagaggtgactgcagttgtgctgctctacatggccactcagatttcttctgcaatggagtacttagagaagaagaatttcatccatagagatcttgcagctcgtaactgcctagtgggagaaaaccatgtggtaaaagtggctgactttggcttaagtagattgatgactggagacacttatactgctcatgctggagccaaatttcctattaagtggacagcaccagagagtcttgcctacaataccttctcaattaaatctgacgtctgggcttttggggtattgttgtgggaaattgctacctatggaatgtcaccatatccaggtattgacctgtctcaggtctatgacctactagaaaaaggatatcgaatggaacagcctgagggatgcccccctaaggtttatgaacttatgagagcatgctggaagtggagccctgccgataggccctcttttgctgaaacacaccaagcttttgaaaccatgttccatgactccagcatttctgaagaggtagctgaggagcttgggagagccgcctcctcgtcatctgttgttccatacctgccccggctacctatacttccttccaagactcggacactgaagaaacaggtggagaacaaggagaacattgaaggggcacaagatgccacagaaaattctgcttccagtttagcaccagggttcatcagaggtgcacaggcctctagtggatccccagcactgcctcgaaagcaaagagacaagtcacccagcagcctcttggaagatgccaaagagacatgcttcaccagggataggaaggggggcttcttcagctccttcatgaagaagagaaatgctcctacaccccccaaacgcagcagctccttccgagaaatggagaatcagccccataagaaatacgaactcacgggtaacttctcatctgttgcttctctacagcatgctgatgggttctctttcactcctgcccagcaagaggcgaatctggtgccacccaagtgctatggggggagctttgcacagaggaacctctgtaatgacgacggtggtgggggtgggggcagtggcactgctgggggtgggtggtctggcatcacaggcttctttacaccacgcttaatcaaaaagacactgggcttacgagcaggtaaacccacagccagtgatgacacttccaagccttttccaaggtcaaactctacatcttccatgtcctcagggcttccagagcaggataggatggcaatgacccttcccaggaactgccagaggtccaaactccagctggaaaggacagtgtccacctcttctcagccagaagagaatgtggacagggccaatgacatgcttccaaaaaaatcagaggaaagtgctgctccaagcagggagagaccaaaagccaagttattgcccagaggagccacagctcttcctctcagaacaccctctggggatctagccattacagagaaggaccctccaggggtgggagtggctggagtggcagctgcccccaagggtaaagagaagaatggtggggcacgacttgggatggctggagttccagaggatggagagcagccgggctggccttctccagccaaggctgcccccgtcctcccaaccactcacaaccacaaagtgccagtccttatctcacccactctgaaacacactccagctgacgtgcagctcattggcacagactctcaggggaataaattcaagctcttatctgagcatcaggtcacatcctctggagacaaggaccgaccccgacgggtaaaaccaaagtgtgccccacccccaccaccagtgatgagactactgcagcatccgtccatctgctcagaccctacagaagagccaactgccctaactgcaggacagtccacatcagaaacacaggaaggaggaaagaaggcagctctgggcgcagtgcccatcagtgggaaagctgggaggccagtgatgcctccacctcaagtgcctctgcccacatcttccatctcgccagccaaaatggccaatggcacagcaggtactaaagtggctctgagaaaaaccaaacaggccgctgagaaaatctcagcagacaaaatcagcaaagaggccctgctggaatgtgctgacctactgtccagtgcactcacggaacctgtgcccaacagccagctggtagacactggacaccagctgcttgactactgctcaggctatgtggactgcatccctcaaactcgcaacaaatttgccttccgagaggctgtgagcaaactggaactcagcctgcaggagctacaggtttcttcagcagctgctggtgtgcccgggacaaaccctgtccttaataacttattgtcatgtgtacaggaaatcagtgatgtggtgcagaggtagccactgttagcctggtgggaaaatgcacacatttctgaggggagagggaaaaggacttgttttcctgtgttcttgttttcagaaaatgaaagactcatacttgagtgtgtttatgtgaa

SEQ ID NO: 103348 - DNA, 3240 bp, Homo sapiens
  Payload ID: 150
  Gene Symbol: ABL2
  Gene Name: ABL proto-oncogene 2, non-receptor tyrosine kinase
  Uniprot ID: P42684
  ENST ID: ENST00000511413
  CDS Start-End: 1-3240
atggggcagcaggtgggccgcgtcggggaagctccggggctccagcagcctcagccccgcgggatccggggcagcagtgcagccaggccctccggccgcaggcgggacccggcggggcgcaccacagagaccggcttcaatatcttcacccagcatgatcactttgccagctgtgtggaggatggatttgagggagacaagactggaggcagtagtccagaagctttgcatcgtccctatggttgtgatgttgaaccccaggcactaaatgaggctatcaggtggagctccaaggagaacttgctcggagccactgagagtgaccctaatctcttcgttgcactttatgattttgtagcaagtggtgataacacactcagcatcactaaaggtgaaaagctacgagtccttggttacaaccagaatggtgagtggagtgaagttcgctctaagaatgggcagggctgggtgccaagcaactacatcaccccagtgaacagcctggaaaaacactcctggtaccatggacctgtgtcacgcagtgcagctgagtatctgctcagcagtctaatcaatggcagcttcctggtgcgagaaagtgagagtagccctgggcagctgtccatctcgctcaggtacgagggacgtgtgtatcactacaggatcaataccactgcagatggcaaggtgtatgtgactgctgagagccgcttcagcaccttggcagagcttgtacaccatcactccacagtggctgatgggctggtgacaacattacactacccagcacccaagtgtaataagcctacagtctatggtgtgtcccccatccacgacaaatgggaaatggagcgaacagatattaccatgaagcacaaacttgggggcggtcagtatggagaggtttacgttggcgtctggaagaaatacagccttacagttgctgtgaaaacattgaaggaagataccatggaggtagaagaattcctgaaagaagctgcagtaatgaaggaaatcaagcatcctaatctggtacaacttttaggtgtgtgtactttggagccaccattttacattgtgactgaatacatgccatacgggaatttgctggattacctccgagaatgcaaccgagaagaggtgactgcagttgtgctgctctacatggccactcagatttcttctgcaatggagtacttagagaagaagaatttcatccatagagatcttgcagctcgtaactgcctagtgggagaaaaccatgtggtaaaagtggctgactttggcttaagtagattgatgactggagacacttatactgctcatgctggagccaaatttcctattaagtggacagcaccagagagtcttgcctacaataccttctcaattaaatctgacgtctgggcttttggggtattgttgtgggaaattgctacctatggaatgtcaccatatccaggtattgacctgtctcaggtctatgacctactagaaaaaggatatcgaatggaacagcctgagggatgcccccctaaggtttatgaacttatgagagcatgctggaagtggagccctgccgataggccctcttttgctgaaacacaccaagcttttgaaaccatgttccatgactccagcatttctgaagaggtagctgaggagcttgggagagccgcctcctcgtcatctgttgttccatacctgccccggctacctatacttccttccaagactcggacactgaagaaacaggtggagaacaaggagaacattgaaggggcacaagatgccacagaaaattctgcttccagtttagcaccagggttcatcagaggtgcacaggcctctagtggatccccagcactgcctcgaaagcaaagagacaagtcacccagcagcctcttggaagatgccaaagagacatgcttcaccagggataggaaggggggcttcttcagctccttcatgaagaagagaaatgctcctacaccccccaaacgcagcagctccttccgagaaatggagaatcagccccataagaaatacgaactcacggggcttccagagcaggataggatggcaatgacccttcccaggaactgccagaggtccaaactccagctggaaaggacagtgtccacctcttctcagccagaagagaatgtggacagggccaatgacatgcttccaaaaaaatcagaggaaagtgctgctccaagcagggagagaccaaaagccaagttattgcccagaggagccacagctcttcctctcagaacaccctctggggatctagccattacagagaaggaccctccaggggtgggagtggctggagtggcagctgcccccaagggtaaagagaagaatggtggggcacgacttgggatggctggagttccagaggatggagagcagccgggctggccttctccagccaaggctgcccccgtcctcccaaccactcacaaccacaaagtgccagtccttatctcacccactctgaaacacactccagctgacgtgcagctcattggcacagactctcaggggaataaattcaagctcttatctgagcatcaggtcacatcctctggagacaaggaccgaccccgacgggtaaaaccaaagtgtgccccacccccaccaccagtgatgagactactgcagcatccgtccatctgctcagaccctacagaagagccaactgccctaactgcaggacagtccacatcagaaacacaggaaggaggaaagaaggcagctctgggcgcagtgcccatcagtgggaaagctgggaggccagtgatgcctccacctcaagtgcctctgcccacatcttccatctcgccagccaaaatggccaatggcacagcaggtactaaagtggctctgagaaaaaccaaacaggccgctgagaaaatctcagcagacaaaatcagcaaagaggccctgctggaatgtgctgacctactgtccagtgcactcacggaacctgtgcccaacagccagctggtagacactggacaccagctgcttgactactgctcaggctatgtggactgcatccctcaaactcgcaacaaatttgccttccgagaggctgtgagcaaactggaactcagcctgcaggagctacaggtttcttcagcagctgctggtgtgcccgggacaaaccctgtccttaataacttattgtcatgtgtacaggaaatcagtgatgtggtgcagaggtag

SEQ ID NO: 103349 - DNA, 3132 bp, Homo sapiens
  Payload ID: 150
  Gene Symbol: ABL2
  Gene Name: ABL proto-oncogene 2, non-receptor tyrosine kinase
  Uniprot ID: P42684
  ENST ID: ENST00000504405
  CDS Start-End: 1-3132
atggtccttgggacagttctccttccacctaatagttatggcagagatcaggacacttcactttgctgcctgtgcactgaggcctcagaatctgctctacccgacttaacagaagctttgcatcgtccctatggttgtgatgttgaaccccaggcactaaatgaggctatcaggtggagctccaaggagaacttgctcggagccactgagagtgaccctaatctcttcgttgcactttatgattttgtagcaagtggtgataacacactcagcatcactaaaggtgaaaagctacgagtccttggttacaaccagaatggtgagtggagtgaagttcgctctaagaatgggcagggctgggtgccaagcaactacatcaccccagtgaacagcctggaaaaacactcctggtaccatggacctgtgtcacgcagtgcagctgagtatctgctcagcagtctaatcaatggcagcttcctggtgcgagaaagtgagagtagccctgggcagctgtccatctcgctcaggtacgagggacgtgtgtatcactacaggatcaataccactgcagatggcaaggtgtatgtgactgctgagagccgcttcagcaccttggcagagcttgtacaccatcactccacagtggctgatgggctggtgacaacattacactacccagcacccaagtgtaataagcctacagtctatggtgtgtcccccatccacgacaaatgggaaatggagcgaacagatattaccatgaagcacaaacttgggggcggtcagtatggagaggtttacgttggcgtctggaagaaatacagccttacagttgctgtgaaaacattgaaggaagataccatggaggtagaagaattcctgaaagaagctgcagtaatgaaggaaatcaagcatcctaatctggtacaacttttaggtgtgtgtactttggagccaccattttacattgtgactgaatacatgccatacgggaatttgctggattacctccgagaatgcaaccgagaagaggtgactgcagttgtgctgctctacatggccactcagatttcttctgcaatggagtacttagagaagaagaatttcatccatagagatcttgcagctcgtaactgcctagtgggagaaaaccatgtggtaaaagtggctgactttggcttaagtagattgatgactggagacacttatactgctcatgctggagccaaatttcctattaagtggacagcaccagagagtcttgcctacaataccttctcaattaaatctgacgtctgggcttttggggtattgttgtgggaaattgctacctatggaatgtcaccatatccaggtattgacctgtctcaggtctatgacctactagaaaaaggatatcgaatggaacagcctgagggatgcccccctaaggtttatgaacttatgagagcatgctggaagtggagccctgccgataggccctcttttgctgaaacacaccaagcttttgaaaccatgttccatgactccagcatttctgaagaggtagctgaggagcttgggagagccgcctcctcgtcatctgttgttccatacctgccccggctacctatacttccttccaagactcggacactgaagaaacaggtggagaacaaggagaacattgaaggggcacaagatgccacagaaaattctgcttccagtttagcaccagggttcatcagaggtgcacaggcctctagtggatccccagcactgcctcgaaagcaaagagacaagtcacccagcagcctcttggaagatgccaaagagacatgcttcaccagggataggaaggggggcttcttcagctccttcatgaagaagagaaatgctcctacaccccccaaacgcagcagctccttccgagaaatggagaatcagccccataagaaatacgaactcacggggcttccagagcaggataggatggcaatgacccttcccaggaactgccagaggtccaaactccagctggaaaggacagtgtccacctcttctcagccagaagagaatgtggacagggccaatgacatgcttccaaaaaaatcagaggaaagtgctgctccaagcagggagagaccaaaagccaagttattgcccagaggagccacagctcttcctctcagaacaccctctggggatctagccattacagagaaggaccctccaggggtgggagtggctggagtggcagctgcccccaagggtaaagagaagaatggtggggcacgacttgggatggctggagttccagaggatggagagcagccgggctggccttctccagccaaggctgcccccgtcctcccaaccactcacaaccacaaagtgccagtccttatctcacccactctgaaacacactccagctgacgtgcagctcattggcacagactctcaggggaataaattcaagctcttatctgagcatcaggtcacatcctctggagacaaggaccgaccccgacgggtaaaaccaaagtgtgccccacccccaccaccagtgatgagactactgcagcatccgtccatctgctcagaccctacagaagagccaactgccctaactgcaggacagtccacatcagaaacacaggaaggaggaaagaaggcagctctgggcgcagtgcccatcagtgggaaagctgggaggccagtgatgcctccacctcaagtgcctctgcccacatcttccatctcgccagccaaaatggccaatggcacagcaggtactaaagtggctctgagaaaaaccaaacaggccgctgagaaaatctcagcagacaaaatcagcaaagaggccctgctggaatgtgctgacctactgtccagtgcactcacggaacctgtgcccaacagccagctggtagacactggacaccagctgcttgactactgctcaggctatgtggactgcatccctcaaactcgcaacaaatttgccttccgagaggctgtgagcaaactggaactcagcctgcaggagctacaggtttcttcagcagctgctggtgtgcccgggacaaaccctgtccttaataacttattgtcatgtgtacaggaaatcagtgatgtggtgcagaggtag

SEQ ID NO: 103350 - DNA, 12144 bp, Homo sapiens
  Payload ID: 150
  Gene Symbol: ABL2
  Gene Name: ABL proto-oncogene 2, non-receptor tyrosine kinase
  Uniprot ID: P42684
  ENST ID: ENST00000502732
  CDS Start-End: 205-3753
aaaagcagaatctgtgagtcgcctggaggcagcgcggcggctgccgtgaggaggccgggtgcggagccgccggtggcccagccactcagggccagggcctgggctgggagggagagaccggagcagcgccaggagcccgaggccggagccgaggaggaatgtgaccaggggtcggcgggggcgcgggagtacgcgagagcagggatggggcagcaggtgggccgcgtcggggaagctccggggctccagcagcctcagccccgcgggatccggggcagcagtgcagccaggccctccggccgcaggcgggacccggcggggcgcaccacagagaccggcttcaatatcttcacccagcatgatcactttgccagctgtgtggaggatggatttgagggagacaagactggaggcagtagtccagaagctttgcatcgtccctatggttgtgatgttgaaccccaggcactaaatgaggctatcaggtggagctccaaggagaacttgctcggagccactgagagtgaccctaatctcttcgttgcactttatgattttgtagcaagtggtgataacacactcagcatcactaaaggtgaaaagctacgagtccttggttacaaccagaatggtgagtggagtgaagttcgctctaagaatgggcagggctgggtgccaagcaactacatcaccccagtgaacagcctggaaaaacactcctggtaccatggacctgtgtcacgcagtgcagctgagtatctgctcagcagtctaatcaatggcagcttcctggtgcgagaaagtgagagtagccctgggcagctgtccatctcgctcaggtacgagggacgtgtgtatcactacaggatcaataccactgcagatggcaaggtgtatgtgactgctgagagccgcttcagcaccttggcagagcttgtacaccatcactccacagtggctgatgggctggtgacaacattacactacccagcacccaagtgtaataagcctacagtctatggtgtgtcccccatccacgacaaatgggaaatggagcgaacagatattaccatgaagcacaaacttgggggcggtcagtatggagaggtttacgttggcgtctggaagaaatacagccttacagttgctgtgaaaacattgaaggaagataccatggaggtagaagaattcctgaaagaagctgcagtaatgaaggaaatcaagcatcctaatctggtacaacttttaggtgtgtgtactttggagccaccattttacattgtgactgaatacatgccatacgggaatttgctggattacctccgagaatgcaaccgagaagaggtgactgcagttgtgctgctctacatggccactcagatttcttctgcaatggagtacttagagaagaagaatttcatccatagagatcttgcagctcgtaactgcctagtgggagaaaaccatgtggtaaaagtggctgactttggcttaagtagattgatgactggagacacttatactgctcatgctggagccaaatttcctattaagtggacagcaccagagagtcttgcctacaataccttctcaattaaatctgacgtctgggcttttggggtattgttgtgggaaattgctacctatggaatgtcaccatatccaggtattgacctgtctcaggtctatgacctactagaaaaaggatatcgaatggaacagcctgagggatgcccccctaaggtttatgaacttatgagagcatgctggaagtggagccctgccgataggccctcttttgctgaaacacaccaagcttttgaaaccatgttccatgactccagcatttctgaagaggtagctgaggagcttgggagagccgcctcctcgtcatctgttgttccatacctgccccggctacctatacttccttccaagactcggacactgaagaaacaggtggagaacaaggagaacattgaaggggcacaagatgccacagaaaattctgcttccagtttagcaccagggttcatcagaggtgcacaggcctctagtggatccccagcactgcctcgaaagcaaagagacaagtcacccagcagcctcttggaagatgccaaagagacatgcttcaccagggataggaaggggggcttcttcagctccttcatgaagaagagaaatgctcctacaccccccaaacgcagcagctccttccgagaaatggagaatcagccccataagaaatacgaactcacgggtaacttctcatctgttgcttctctacagcatgctgatgggttctctttcactcctgcccagcaagaggcgaatctggtgccacccaagtgctatggggggagctttgcacagaggaacctctgtaatgacgacggtggtgggggtgggggcagtggcactgctgggggtgggtggtctggcatcacaggcttctttacaccacgcttaatcaaaaagacactgggcttacgagcaggtaaacccacagccagtgatgacacttccaagccttttccaaggtcaaactctacatcttccatgtcctcagggcttccagagcaggataggatggcaatgacccttcccaggaactgccagaggtccaaactccagctggaaaggacagtgtccacctcttctcagccagaagagaatgtggacagggccaatgacatgcttccaaaaaaatcagaggaaagtgctgctccaagcagggagagaccaaaagccaagttattgcccagaggagccacagctcttcctctcagaacaccctctggggatctagccattacagagaaggaccctccaggggtgggagtggctggagtggcagctgcccccaagggtaaagagaagaatggtggggcacgacttgggatggctggagttccagaggatggagagcagccgggctggccttctccagccaaggctgcccccgtcctcccaaccactcacaaccacaaagtgccagtccttatctcacccactctgaaacacactccagctgacgtgcagctcattggcacagactctcaggggaataaattcaagctcttatctgagcatcaggtcacatcctctggagacaaggaccgaccccgacgggtaaaaccaaagtgtgccccacccccaccaccagtgatgagactactgcagcatccgtccatctgctcagaccctacagaagagccaactgccctaactgcaggacagtccacatcagaaacacaggaaggaggaaagaaggcagctctgggcgcagtgcccatcagtgggaaagctgggaggccagtgatgcctccacctcaagtgcctctgcccacatcttccatctcgccagccaaaatggccaatggcacagcaggtactaaagtggctctgagaaaaaccaaacaggccgctgagaaaatctcagcagacaaaatcagcaaagaggccctgctggaatgtgctgacctactgtccagtgcactcacggaacctgtgcccaacagccagctggtagacactggacaccagctgcttgactactgctcaggctatgtggactgcatccctcaaactcgcaacaaatttgccttccgagaggctgtgagcaaactggaactcagcctgcaggagctacaggtttcttcagcagctgctggtgtgcccgggacaaaccctgtccttaataacttattgtcatgtgtacaggaaatcagtgatgtggtgcagaggtagccactgttagcctggtgggaaaatgcacacatttctgaggggagagggaaaaggacttgttttcctgtgttcttgttttcagaaaatgaaagactcatacttgagtgtgtttatgtgaagtacctcagatccctgagttctcacgtttacagtttcatctcaaaaataagaagcaaaccacataagtataggagaggtaaattaagtgggggcaaggcagtagtggacagggttggaaactgcactggaaaatagggaacatgtgtatgtcataaggaaggcaatgcagcccatccctacctggaatgctgggaagtgctaggcagggctgctctcagcaagactgcagcagctgcacccagacctggggctctggtaggtactaatggtgattatgctccaatttacctaatgaatttggtgggacagcagaaaagaaagctgggaatgtaccaagagaaatttttgttcagggctgttggaagtagctgttagccttgcttccacaaggccattgctgctgtaataagaactgcaaatcagagtgctacaacataaaactgggaaatatggccctatctgaatgcctctgtcctattttccgctggtgtatcagttagtgcaggaagtaaagaatgctggaaagttgaatcagaaattgaaaaccttctaaaatcttacacagattagcagaagtcacttctcccagtctggtatattatttcataatggaccaggatcggcttcctgcctgttggtggctatctgtaaaccataagtacaggggtctccctagtggttcttctctgtcttttgctgggcaggctgtcttcctttattcctggtagcattcagagcattaaccagtgttgattttgaaaatagtagtccctacaggttctcacaaaggaatgaatcctgttctgatacagttcccctgcatactgacatactggccaaggacttgagcagctgtgtatttttctttatcaactaaaataccagggagatggtcttttcttgaaacccagtggcctgtatgtgactgagaggaaaagctggcttggtcctaatggctgtttctctgtacctttcccttcccttaccaccttaagcccaatccaggtagagaatagggagaggcattctcctctctatggatttgaagtgaatcacccccacattattctcacatgcttttcttctctcacatattcctccctactcccccacccaatcattgtgcttatttgtacagatcttattgggaatattctttatttattttgtcatttcacttctattttaagaatgcataattgaaggagtagtcattttcagggagcaccaggtagaccctgggaacctaatgacttaatccttaaatatgttttgcccttgaaaaataggccttttccttccttccttagttataattgtggaagctaattaggatggcatggaagtgaatctaatgagttaggtattattaatgttcttggtatcgggtctaattccagttactgcttcattctctttttaaagctttatgaatacttcccccatcctccccaaggagagctcaatacacacatatttttattttattctctcaaaggaatattagcttaggaagataggaattcaacattgagcactgagttttcttctggctctgtcattgatacactgtcaaaccacagcctcatctcttaatctatttaattaaggtaacagtacatgttctcaagggtgttgcaagtaagtgtgcagctatcccttggagagcctctctggaaagctcttttagtgcagtgttgttatgctgaattgttttccattatcttatttgctgagtagaaaatattaatgaaattaagaattgttgagattatatgaattgggctagaatactaaggggaaaactatgttttgaatagagtttggcatttttgaccaagaacaaaattgagttttcattggaaagaaaggaaaccttgattcttaccattgctgctccaaaggaggcccaggttaagaggattagaggagacacgcggtgctgggcattcctggcaggtgttgggtgatccccgcagtatgtcacctgcagttgcagcacaggcagctagtgattgggttcatctcctcctagtggttggaagagaactcagatgtaaaaaccagcggtccttctcccaccttctttcctgccattcttgctcatcatacatgtccgtaaacttgaagaactcgttttagcagctagccttttaaggtcgaggatgggaaagctaaaactgtagaatattattatgctgctttttaggtttatccctgttgttgtgggatgcaagttaagggattgtaattgtttttcagggtttttttgttttttgttttttaagcaagggctctattttcccttgagagttctggaactaagccttggagaaacactactgagtgtatttaggctccctggttttcttgcccaacaacaatctgaagggtagggggtgggggctgtgtcttactcaggggcagcacctagctgtcttgcctacagtgggtgcacgatatataaatggaattgatttttgtcaacactgtcaagagtggcattgactattggagcataccccgtccacatgatgcttgaactatgtaacttcaggggttgagggctcaaggttcaggttaaagaggcactgtcaacttactatacaagcataatttaggtttttcctttttctacttgaaaaggaccagcttaaacacaaacccttatgtaaattaaaaggtttgaatccaaagcagagagaactgcttctggaaaagtgtagtttaattttaactattctaaaagcaatgagcaaaggcccttgtccaaggcgttgacagttttctaaagtggttatgctgtatatctggatgcatgcctttgggctgccactgcttgattcctttcatgtacagataatattacttcagtttagatttcccactttaaaatgcagtgatttgtgttgaatacatcttgattgtgctttacctaaagtattttcttaaaaggctttgtgtaaaatttaaatgtatatattttcctgtagacttccatcatgattttcagagattagccttaaaaaatttggccctaagaaattcattcagtgtttttctagatgacctctgtacatagaggtcattatagtggagaccctttaccagcagcattttaagatttaaattagatagaaagtttcttaggattcaactgaaaattggctagtaaaatatgtcccaggtaataaagcatgctgactttgctaaggcactgcccatttttatttaactaaagtcatggagattttgagtttaaaggatgcagtatagatagtggtttagtgtttaggctctaatgccagtctaaaaggcaagtcatttaaccttgggagcctcagtttcctcactgtaaaacagggataataatagtaactacctcagggttgttgtaaggattaaatgagatgatatttgtaagatacttagctcaagtgcctggcacacaatgagcacactctataaatgttctactactactattattaacacctagtctagggatgcacagcagaatcccctagggttaaaaaacaaaacaaaacaaacaaaaaaaactgacggaatagccccactccagatcagaattcccagtgggctggggtctcggccagtgtattctccagtaatctcgccaggtgtttgaaacacccagtgctatctgaaaactatcagtaccccaaccctttggtttatagattaagaaactagcagaagatggttaaattacttgcctattgtctcagaacggttaattagtggcggagccaaggctagaattcaagtctcttgactttatggttgtggggtctttccaccatacctgctgccatgtgagacactgcaaaaaagtggctcagaccgacaatcagcctgtgtggtgctgcacactttctaaagcacatgctcctgacactttgaccttaaggggcttgaatgtggagtaatgggaacacaagccaagcaagcactcagtagaattcagtcatttaaaaaattcaatggggtcattcttttggacagacctcagcaacacagcaatgtgcactttgtagtaaagaaataccaacttgagtttttaaaaaacctagttagtcctacattcccttttctttaaaaaaactttattgttcacattattttaatgactatgagataatgtatatgacagcactttgagaaaatatcaactgtaatataactataaggttgtagtattgtctgtttaaaagataagacagttgattcaatgtggatggaccctgtggggtacctgaaaatgtagatacgtaagaatcacctctgtcatttatcacatttagaaatatgaaactgcttaacaggtatgagcaggtatagcaagtgtttgctaaagttgtagttcagagctgaattacttcaggaaactagggaccaactttttggtttaattccgatctttaaaaagtaagaatgtgtactcactccagaacacagaagctcttccaaggaccttgactcaagaaggatgaggtcctcttactcttctccatttatccactatatgcttggccatttatcctaaatgtggtgggaacagacttgttatctgttgatgttgacagtgtcttttttaacctatgtcctgcatagttttgttaggtttacagggggaggtggatggccataaaaccagtgcactttgggaattacttttctaggatttcctaccagttataaatgacattgacatttgtcatcttttttttctttttctaaaaagaatagctgaatttaattcacctattataaaatactcaaaagtaaattgccttggtggccacttctgaattatagctacatttcattatgaccccttctgctcccttccattttgctactgatgtcattcttgttatcaggctgtgcccctaccaggagttcatattgggttgacagggttatctatatttttgttcttgatttttgagtttcatcatcttgcattaaattgttccacctggatttggggttcatctctgtgccctaaggatctgctatgaccaatcctctttttgtaggtgggtctctggcttaagtattgataggcttcagcggtttgtgtctctgtcttagcttgtatcaagccagtagtagctcacttcctttgtaaattcctgcttcagtctgggatccgtaggagtatgtgagaacttctgaaacgtctccaactcttaacagtcaagatatctatatcatttggatagagttctggttttccaactactagacttaaagaaattctggccgggtgcggtggctcacgcctgtaatcccagcactttggggggctgaggcgggtggatcacgaggtcaggagattgagaccatcctggctaacacggtgaaaccccacctctactaaaaatacaaaaacttagctgggcgtggtggcgggcgcctgtagtcccagctactggggaggctgaggcaggagaatggcgtgaacccaggaggcggagcttgcagtgagcccagatcgcgccactgcactccagcctgggtgacagtgagactccgtctcaaaaaaaaaaaaaaaaaaaaaaaaaaaaaaaaaaagaaattctaatgcaaagcttgctttttttttcttttttccagcaagccagtagtaatagttattgttacttgctctgttcagcacaactgtagttcacttgaacttcactgtcattccctacgctcctctcttactgagaagcatgggtgggattcagggctgtgggacaagctacagcctactctggagcactcacccccatgactcagtccagcctgtctcttgggaagtttattgcaatgtgcagacggatgaatttctgcttttcatgccacctctctgaggtatgtattctatcttgagtatgtacaagatgataccttttggctgggcacagtggctcgtgcctgtaatcccagcactttgggagaccaagatgggcggatcacttgaggtcaggagtttgagaccagcctggccaacatggtgaaaccccgtctctactaaaaatataaaaattagccgggcgtagtacatgcctgtaatcccagctactcccgaggctgaggcagaattgcttgaacccaggaggcggaggttgcagtgagctgagatcgcgccgctgcactccagcctaagtgacagagtgagacacgttaagaagaaaaaaaaaaaaaaggataccttcatttctgactcaatatcctagatccaaaggacaggaaattagggaaggcttcaccctgtgggatcaagataagaagatcccatacttcttcccaggtaaggaggcctgtggcaggtcatgattcaaagctgacttggaatggcagaaactgctgagaggccacccttggagatttgtgccttcaaagatgggtttcatgagtctcagagaggaaaagacttgtcagctgggttgattttgcatgattattgaactagagctggtagacacgagcttctcagatggcagtggccagatcctccatctgtgagaatccgccacttgaagtggtttcctgagagtgttcacttggcagttgctgcgtttctcaagcccacctggcgaggtctcgccggacccttccctccaagtgcacttacttcttcatccccatgtacatctctaactttgaaattgtttacctctcctacaaaaatcttaccttttgacctgagcagagtagcaaagccctgttcactctgagggagcagctggcgtgttgaaggggaaaggccaggcacagcactgtcctcagaccacaccatatttggagcagaattgtgatacatgtcatctgtgtctattctggaaggttctttgttcatcactgtactcgcatcagcaaattttcagggtcctacctgtcactccaggctactgagctgaaccctcagaagctgaggtctccgagcatgctaagtaaccttttagaaaagctggaggcaaactgtcgaatgctagcaggctttatgaaaggaaacataaggagtttgtgtagtcagaacttgcttaaatttgcttcggaattaggcaccataaactttagttggagaatgggacttaaattttcacatatatgtatacttaattttcagcaattatgacacaataaaaagaatatgcaaatttattgttgtttcagaaggttttgcaggactgggaacgctttagtgtcatcaacagtaaacctcagatactgttctgcacagttcagaagtaccataccaggtattgtgagtggcaagaacgccaggggacagagatgcttctggtagatgagggccagagaaaccagctctcctccattttgacagcaatttctcactgtggccatttggcctccattatgttttgagaggaatttcttgagatcttgagaaatcaccatgattaggccaattgtcaatcagtattcagaaactagaaaggaacaatgagatacttgtttatggttctttagggcatatgtttgaaaaccctctcatctcagatctgtatagctggtgtgtgtttgtgtccataaatacacgtgcattgctgtcgtgcccattaagaaagggggagtaagtaaaagaggaatcgctcagatctttccttggatgaacagcagtggcgtggttggtgtgttgactgtgaacaggctgacttagctgttgatgtatactcagaacctccatctcctcccagaccctgcacttttccttctctgcagtctgattctctaatgactgtcactggacaaaccccagttttatgctcgcttagtaaaaataagtttaaacatttcatggtggttgacagaactttgtccccaaacatgcggattcaattctttaaaactcgttgaacgtttataccaaaggtcccgccccgcaggtgtgtatgtggtgcacagagggtgaggtttggagcatcgggcactgtgtgcattgctaaggggacatagtgagacaatgtgggatttaactaaaaacacatcaattgtgtgtcacattaccagtgttgtcaggtatttgttcttaattgttattgtaatatattttcagttgtttttctaatttaattctctccgtctgttgtctgactgtgaactgctaacagtgttaaacttgatgtaaataaatgaggcccttgaaagggactgctttctctgtcttctcacaaggtttgccaagttgtgttctgttttaaataaaggttgcaatattttattggcaaagta

SEQ ID NO: 103351 - DNA, 3689 bp, Homo sapiens
  Payload ID: 151
  Gene Symbol: ABI1
  Gene Name: abl-interactor 1
  Uniprot ID: Q8IZP0
  ENST ID: ENST00000346832
  CDS Start-End: 225-1715
gagaaataaacgctcgcgagagaacgaggttcaggcggctgcacgaagggggtggaggggggctggagagagtgaggaggaaggggaggaggtgccgtcccacaataccaggcgggagggcgggtaggcggtttgtatccgggctgtgaggtgctcggagcctcggcggaccttgctgcctctgtctctttaacgcgagaggaagcgatgcagaggggtggaaaatggcagagctgcagatgttactagaggaggagatcccgtctggcaagagggcgctgatcgagagttaccagaacctgactcgggtggcagactactgtgaaaacaactacatacagagacatggttttgctgtgttgctgtgtctgctctcaaactcctggcctcaggctacagacaagagaaaagctttagaggagaccaaagcctatacaacccaatctctagctagtgttgcttatcaaataaatgcattggccaacaatgtactccagttgctggatatccaagcctctcagcttcggagaatggagtcttccatcaatcatatctcacagactgtggatattcataaggagaaagtggcacgaagagagattggtattttgacaacaaataagaatacatcaagaactcacaaaataatagcacctgcgaatatggagcgccctgtaaggtatattcggaaacctatcgattacacagttctggatgatgtgggccatggtgtcaagtggctaaaagccaagcatggaaataaccagcctgcaagaactggcacactgtcgagaacaaatcctcctactcagaaaccgccaagtcctcccatgtcaggccggggaacactgggacggaatactccttataaaaccctggaacctgttaaacccccaacagttcctaatgactatatgaccagtcctgctaggcttggaagtcagcatagtccaggcaggacagcatctttaaatcagagaccaaggacacacagtggaagtagtggaggaagtggaagtcgagaaaacagtggtagcagtagtattggcattcccattgctgtgcctacaccttcgccacccactattggaccagaaaacatttctgtccctcctccttctggagctccaccagcaccacctctggcaccacttctcccagtgagcactgtgatagcagccccgggctcagctcctggttcccagtatggcacaatgaccaggcagatatctcgacacaactctactacttcttcgacatcttctggtggatacagacgaactccctctgtgactgctcaattttctgctcagcctcatgttaatggaggtccactttattctcaaaattcaattgctgatagtccaactccaccgccaccacctccaccagatgacattcccatgtttgatgactctccacctcccccaccaccaccaccagtggattatgaagatgaggaggctgcagtagttcagtataatgatccatatgcagatggggatcctgcttgggcccccaagaattatattgagaaagttgttgcaatatatgattatacaaaagacaaggatgatgagctgtcatttatggagggtgcaatcatttatgttataaagaagaatgatgatggctggtatgaaggagtctgcaatcgagtgactggtctgttccctgggaactatgttgaatcaatcatgcactatactgattaatttttttttttcttttgaagtagattcttattactcagtcatactgtgggactattatggttaacagaactgtcttaatatgttttaaaatgtgcccatattttcagaacatgctgttttattggtaaattgaatgtctacctgtaagcataaatctttgaggcagtttatgtattgctgaatagcaatttatacaagaagctgtccataactgattatgcttatgtacttacttacacatttttaactttatgaccagcctaaatattctgggggaagtggggtataatatttaacgaatcatgattcagattgtaccattacatgtttcagtgcagcatggttactaacgctatgtcagactaatattaaaatcagaaaatttaaatgctggtgctggtcagactttttttgttagattctctcatttaaaaaaaatactgtttgtttaaagcatgcataaaaatttatgtattgaaatatacttaaaaattcaagatgcttcccatttgtgtaatatttacctggaggactcgtacttaggtgtcttaacgtgaattgagtctccaaggtctccatgtgaaacaagcaaaaagagaattatctgtaatgttgtaatttgtacctaagttttttaatgagtgaaatttgcattataaactttttccattcataaatacataagtgaaccaaaggtttttgtcctttccttcactgatttgctttaaaaaaaataaaagataatgatttattgcagaattatgattctattttctcaatatgttaacttggaaaaaaattttagccttatcttaatctgtcccaacagcaatgtgacggatttttgcagattcaaaatctgcaatggttatttacaagtcaatctactgaattccttttttaaataatcttttgaaactaagaaaatgtgtcaaattgtgtgcattcattctgtaggtaaaattcttaaggattgccatgtcagtccttcagttgtacagtgaactgttgtacactggttcaatgaaaggaagttaaaagtaccttttacatattgtaaaagtggatacagttgatttgtgagtaggcactctttaatccattacctggcactagcaacattagaattttaaaataaaataattgggaaagaaggtgggtcatgtattaatcagtgaacagagatttacctaaccaacagacttggattgtcttttgacataatcaaaatgcaacacatgcactttgtgtgtctcctcttaattgaagggagggctgagggatgttttctcttcttgtcttgtgtataattctctattgcttaggatattaaagtagagcactcaagtgtgggtttctgtgttattgaggatttgtttggaattcaaattacagttatgtactggatgctacagacttataacagcatagtgaatggtaagactagtgcaaaacagttatttctgaaaattaaagaccattattgctaccaaatcaatgtgactatttcatatgcattttgcctttgttaattttaaacaaacaaagtatcattagtgatcagctagctaccttctactttccatttttcaagtggattgttctcttaatttgtatataacctgttgtctaaattttatgtacagtcttttataataaaccattctcctatatgaaattttggatactgttaaaatataactcatgtggacttcaatgcagacttcacatttttctgacctttactcctacggtaaatcaagacaaaccatttgaattttaacattggttatttatttgtgtaatggccttacatgtggatattaacagtgtaaacaataccacatataaccatcaagataccttgattataatttataggactagaatgacagattcaggtggtttattaattacatttaaaaagttttctgaaaaaacttttgcaataaaaaaaaataaattgcccatcaa

SEQ ID NO: 103352 - DNA, 3492 bp, Homo sapiens
  Payload ID: 151
  Gene Symbol: ABI1
  Gene Name: abl-interactor 1
  Uniprot ID: Q8IZP0
  ENST ID: ENST00000359188
  CDS Start-End: 73-1515
gctcggagcctcggcggaccttgctgcctctgtctctttaacgcgagaggaagcgatgcagaggggtggaaaatggcagagctgcagatgttactagaggaggagatcccgtctggcaagagggcgctgatcgagagttaccagaacctgactcgggtggcagactactgtgaaaacaactacatacaggctacagacaagagaaaagctttagaggagaccaaagcctatacaacccaatctctagctagtgttgcttatcaaataaatgcattggccaacaatgtactccagttgctggatatccaagcctctcagcttcggagaatggagtcttccatcaatcatatctcacagactgtggatattcataaggagaaagtggcacgaagagagattggtattttgacaacaaataagaatacatcaagaactcacaaaataatagcacctgcgaatatggagcgccctgtaaggtatattcggaaacctatcgattacacagttctggatgatgtgggccatggtgtcaagtggctaaaagccaagcatggaaataaccagcctgcaagaactggcacactgtcgagaacaaatcctcctactcagaaaccgccaagtcctcccatgtcaggccggggaacactgggacggaatactccttataaaaccctggaacctgttaaacccccaacagttcctaatgactatatgaccagtcctgctaggcttggaagtcagcatagtccaggcaggacagcatctttaaatcagagaccaaggacacacagtggaagtagtggaggaagtggaagtcgagaaaacagtggtagcagtagtattggcattcccattgctgtgcctacaccttcgccacccactattggaccagccccgggctcagctcctggttcccagtatggcacaatgaccaggcagatatctcgacacaactctactacttcttcgacatcttctggtggatacagacgaactccctctgtgactgctcaattttctgctcagcctcatgttaatggaggtccactttattctcaaaattcaatttctattgctccaccccctccccctatgcctcagttgactccacagatacctctcacaggcttcgtggccagggtgcaggaaaacattgctgatagtccaactccaccgccaccacctccaccagatgacattcccatgtttgatgactctccacctcccccaccaccaccaccagtggattatgaagatgaggaggctgcagtagttcagtataatgatccatatgcagatggggatcctgcttgggcccccaagaattatattgagaaagttgttgcaatatatgattatacaaaagacaaggatgatgagctgtcatttatggagggtgcaatcatttatgttataaagaagaatgatgatggctggtatgaaggagtctgcaatcgagtgactggtctgttccctgggaactatgttgaatcaatcatgcactatactgattaatttttttttttcttttgaagtagattcttattactcagtcatactgtgggactattatggttaacagaactgtcttaatatgttttaaaatgtgcccatattttcagaacatgctgttttattggtaaattgaatgtctacctgtaagcataaatctttgaggcagtttatgtattgctgaatagcaatttatacaagaagctgtccataactgattatgcttatgtacttacttacacatttttaactttatgaccagcctaaatattctgggggaagtggggtataatatttaacgaatcatgattcagattgtaccattacatgtttcagtgcagcatggttactaacgctatgtcagactaatattaaaatcagaaaatttaaatgctggtgctggtcagactttttttgttagattctctcatttaaaaaaaatactgtttgtttaaagcatgcataaaaatttatgtattgaaatatacttaaaaattcaagatgcttcccatttgtgtaatatttacctggaggactcgtacttaggtgtcttaacgtgaattgagtctccaaggtctccatgtgaaacaagcaaaaagagaattatctgtaatgttgtaatttgtacctaagttttttaatgagtgaaatttgcattataaactttttccattcataaatacataagtgaaccaaaggtttttgtcctttccttcactgatttgctttaaaaaaaataaaagataatgatttattgcagaattatgattctattttctcaatatgttaacttggaaaaaaattttagccttatcttaatctgtcccaacagcaatgtgacggatttttgcagattcaaaatctgcaatggttatttacaagtcaatctactgaattccttttttaaataatcttttgaaactaagaaaatgtgtcaaattgtgtgcattcattctgtaggtaaaattcttaaggattgccatgtcagtccttcagttgtacagtgaactgttgtacactggttcaatgaaaggaagttaaaagtaccttttacatattgtaaaagtggatacagttgatttgtgagtaggcactctttaatccattacctggcactagcaacattagaattttaaaataaaataattgggaaagaaggtgggtcatgtattaatcagtgaacagagatttacctaaccaacagacttggattgtcttttgacataatcaaaatgcaacacatgcactttgtgtgtctcctcttaattgaagggagggctgagggatgttttctcttcttgtcttgtgtataattctctattgcttaggatattaaagtagagcactcaagtgtgggtttctgtgttattgaggatttgtttggaattcaaattacagttatgtactggatgctacagacttataacagcatagtgaatggtaagactagtgcaaaacagttatttctgaaaattaaagaccattattgctaccaaatcaatgtgactatttcatatgcattttgcctttgttaattttaaacaaacaaagtatcattagtgatcagctagctaccttctactttccatttttcaagtggattgttctcttaatttgtatataacctgttgtctaaattttatgtacagtcttttataataaaccattctcctatatgaaattttggatactgttaaaatataactcatgtggacttcaatgcagacttcacatttttctgacctttactcctacggtaaatcaagacaaaccatttgaattttaacattggttatttatttgtgtaatggccttacatgtggatattaacagtgtaaacaataccacatataaccatcaagataccttgattataatttataggactagaatgacagattcaggtggtttattaattacatttaaaaagttttctgaaaaaacttttgcaataaaaaaaaataaattgcccatcaataa

SEQ ID NO: 103353 - DNA, 3467 bp, Homo sapiens
  Payload ID: 151
  Gene Symbol: ABI1
  Gene Name: abl-interactor 1
  Uniprot ID: Q8IZP0
  ENST ID: ENST00000376137
  CDS Start-End: 225-1493
gagaaataaacgctcgcgagagaacgaggttcaggcggctgcacgaagggggtggaggggggctggagagagtgaggaggaaggggaggaggtgccgtcccacaataccaggcgggagggcgggtaggcggtttgtatccgggctgtgaggtgctcggagcctcggcggaccttgctgcctctgtctctttaacgcgagaggaagcgatgcagaggggtggaaaatggcagagctgcagatgttactagaggaggagatcccgtctggcaagagggcgctgatcgagagttaccagaacctgactcgggtggcagactactgtgaaaacaactacatacaggctacagacaagagaaaagctttagaggagaccaaagcctatacaacccaatctctagctagtgttgcttatcaaataaatgcattggccaacaatgtactccagttgctggatatccaagcctctcagcttcggagaatggagtcttccatcaatcatatctcacagactgtggatattcataaggagaaagtggcacgaagagagattggtattttgacaacaaataagaatacatcaagaactcacaaaataatagcacctgcgaatatggagcgccctgtaaggtatattcggaaacctatcgattacacagttctggatgatgtgggccatggtgtcaagtggctaaaagccaagcatggaaataaccagcctgcaagaactggcacactgtcgagaacaaatcctcctactcagaaaccgccaagtcctcccatgtcaggccggggaacactgggacggaatactccttataaaaccctggaacctgttaaacccccaacagttcctaatgactatatgaccagtcctgctaggcttggaagtcagcatagtccaggcaggacagcatctttaaatcagagaccaaggacacacagtggaagtagtggaggaagtggaagtcgagaaaacagtggtagcagtagtattggcattcccattgctgtgcctacaccttcgccacccactattggaccagtttctattgctccaccccctccccctatgcctcagttgactccacagatacctctcacaggcttcgtggccagggtgcaggaaaacattgctgatagtccaactccaccgccaccacctccaccagatgacattcccatgtttgatgactctccacctcccccaccaccaccaccagtggattatgaagatgaggaggctgcagtagttcagtataatgatccatatgcagatggggatcctgcttgggcccccaagaattatattgagaaagttgttgcaatatatgattatacaaaagacaaggatgatgagctgtcatttatggagggtgcaatcatttatgttataaagaagaatgatgatggctggtatgaaggagtctgcaatcgagtgactggtctgttccctgggaactatgttgaatcaatcatgcactatactgattaatttttttttttcttttgaagtagattcttattactcagtcatactgtgggactattatggttaacagaactgtcttaatatgttttaaaatgtgcccatattttcagaacatgctgttttattggtaaattgaatgtctacctgtaagcataaatctttgaggcagtttatgtattgctgaatagcaatttatacaagaagctgtccataactgattatgcttatgtacttacttacacatttttaactttatgaccagcctaaatattctgggggaagtggggtataatatttaacgaatcatgattcagattgtaccattacatgtttcagtgcagcatggttactaacgctatgtcagactaatattaaaatcagaaaatttaaatgctggtgctggtcagactttttttgttagattctctcatttaaaaaaaatactgtttgtttaaagcatgcataaaaatttatgtattgaaatatacttaaaaattcaagatgcttcccatttgtgtaatatttacctggaggactcgtacttaggtgtcttaacgtgaattgagtctccaaggtctccatgtgaaacaagcaaaaagagaattatctgtaatgttgtaatttgtacctaagttttttaatgagtgaaatttgcattataaactttttccattcataaatacataagtgaaccaaaggtttttgtcctttccttcactgatttgctttaaaaaaaataaaagataatgatttattgcagaattatgattctattttctcaatatgttaacttggaaaaaaattttagccttatcttaatctgtcccaacagcaatgtgacggatttttgcagattcaaaatctgcaatggttatttacaagtcaatctactgaattccttttttaaataatcttttgaaactaagaaaatgtgtcaaattgtgtgcattcattctgtaggtaaaattcttaaggattgccatgtcagtccttcagttgtacagtgaactgttgtacactggttcaatgaaaggaagttaaaagtaccttttacatattgtaaaagtggatacagttgatttgtgagtaggcactctttaatccattacctggcactagcaacattagaattttaaaataaaataattgggaaagaaggtgggtcatgtattaatcagtgaacagagatttacctaaccaacagacttggattgtcttttgacataatcaaaatgcaacacatgcactttgtgtgtctcctcttaattgaagggagggctgagggatgttttctcttcttgtcttgtgtataattctctattgcttaggatattaaagtagagcactcaagtgtgggtttctgtgttattgaggatttgtttggaattcaaattacagttatgtactggatgctacagacttataacagcatagtgaatggtaagactagtgcaaaacagttatttctgaaaattaaagaccattattgctaccaaatcaatgtgactatttcatatgcattttgcctttgttaattttaaacaaacaaagtatcattagtgatcagctagctaccttctactttccatttttcaagtggattgttctcttaatttgtatataacctgttgtctaaattttatgtacagtcttttataataaaccattctcctatatgaaattttggatactgttaaaatataactcatgtggacttcaatgcagacttcacatttttctgacctttactcctacggtaaatcaagacaaaccatttgaattttaacattggttatttatttgtgtaatggccttacatgtggatattaacagtgtaaacaataccacatataaccatcaagataccttgattataatttataggactagaatgacagattcaggtggtttattaattacatttaaaaagttttctgaaaaaacttttgcaataaaaaaaaataaattgcccatcaa

SEQ ID NO: 103354 - DNA, 3503 bp, Homo sapiens
  Payload ID: 151
  Gene Symbol: ABI1
  Gene Name: abl-interactor 1
  Uniprot ID: Q8IZP0
  ENST ID: ENST00000376138
  CDS Start-End: 168-1526
gggggctggagagagtgaggaggaaggggaggaggtgccgtcccacaataccaggcgggagggcgggtaggcggtttgtatccgggctgtgaggtgctcggagcctcggcggaccttgctgcctctgtctctttaacgcgagaggaagcgatgcagaggggtggaaaatggcagagctgcagatgttactagaggaggagatcccgtctggcaagagggcgctgatcgagagttaccagaacctgactcgggtggcagactactgtgaaaacaactacatacaggctacagacaagagaaaagctttagaggagaccaaagcctatacaacccaatctctagctagtgttgcttatcaaataaatgcattggccaacaatgtactccagttgctggatatccaagcctctcagcttcggagaatggagtcttccatcaatcatatctcacagactgtggatattcataaggagaaagtggcacgaagagagattggtattttgacaacaaataagaatacatcaagaactcacaaaataatagcacctgcgaatatggagcgccctgtaaggtatattcggaaacctatcgattacacagttctggatgatgtgggccatggtgtcaagtggctaaaagccaagcatggaaataaccagcctgcaagaactggcacactgtcgagaacaaatcctcctactcagaaaccgccaagtcctcccatgtcaggccggggaacactgggacggaatactccttataaaaccctggaacctgttaaacccccaacagttcctaatgactatatgaccagtcctgctaggcttggaagtcagcatagtccaggcaggacagcatctttaaatcagagaccaaggacacacagtggaagtagtggaggaagtggaagtcgagaaaacagtggtagcagtagtattggcattcccattgctgtgcctacaccttcgccacccactattggaccagcagccccgggctcagctcctggttcccagtatggcacaatgaccaggcagatatctcgacacaactctactacttcttcgacatcttctggtggatacagacgaactccctctgtgactgctcaattttctgctcagcctcatgttaatggaggtccactttattctcaaaattcaattgctgatagtccaactccaccgccaccacctccaccagatgacattcccatgtttgatgactctccacctcccccaccaccaccaccagtggattatgaagatgaggaggctgcagtagttcagtataatgatccatatgcagatggggatcctgcttgggcccccaagaattatattgagaaagttgttgcaatatatgattatacaaaagacaaggatgatgagctgtcatttatggagggtgcaatcatttatgttataaagaagaatgatgatggctggtatgaaggagtctgcaatcgagtgactggtctgttccctgggaactatgttgaatcaatcatgcactatactgattaatttttttttttcttttgaagtagattcttattactcagtcatactgtgggactattatggttaacagaactgtcttaatatgttttaaaatgtgcccatattttcagaacatgctgttttattggtaaattgaatgtctacctgtaagcataaatctttgaggcagtttatgtattgctgaatagcaatttatacaagaagctgtccataactgattatgcttatgtacttacttacacatttttaactttatgaccagcctaaatattctgggggaagtggggtataatatttaacgaatcatgattcagattgtaccattacatgtttcagtgcagcatggttactaacgctatgtcagactaatattaaaatcagaaaatttaaatgctggtgctggtcagactttttttgttagattctctcatttaaaaaaaatactgtttgtttaaagcatgcataaaaatttatgtattgaaatatacttaaaaattcaagatgcttcccatttgtgtaatatttacctggaggactcgtacttaggtgtcttaacgtgaattgagtctccaaggtctccatgtgaaacaagcaaaaagagaattatctgtaatgttgtaatttgtacctaagttttttaatgagtgaaatttgcattataaactttttccattcataaatacataagtgaaccaaaggtttttgtcctttccttcactgatttgctttaaaaaaaataaaagataatgatttattgcagaattatgattctattttctcaatatgttaacttggaaaaaaattttagccttatcttaatctgtcccaacagcaatgtgacggatttttgcagattcaaaatctgcaatggttatttacaagtcaatctactgaattccttttttaaataatcttttgaaactaagaaaatgtgtcaaattgtgtgcattcattctgtaggtaaaattcttaaggattgccatgtcagtccttcagttgtacagtgaactgttgtacactggttcaatgaaaggaagttaaaagtaccttttacatattgtaaaagtggatacagttgatttgtgagtaggcactctttaatccattacctggcactagcaacattagaattttaaaataaaataattgggaaagaaggtgggtcatgtattaatcagtgaacagagatttacctaaccaacagacttggattgtcttttgacataatcaaaatgcaacacatgcactttgtgtgtctcctcttaattgaagggagggctgagggatgttttctcttcttgtcttgtgtataattctctattgcttaggatattaaagtagagcactcaagtgtgggtttctgtgttattgaggatttgtttggaattcaaattacagttatgtactggatgctacagacttataacagcatagtgaatggtaagactagtgcaaaacagttatttctgaaaattaaagaccattattgctaccaaatcaatgtgactatttcatatgcattttgcctttgttaattttaaacaaacaaagtatcattagtgatcagctagctaccttctactttccatttttcaagtggattgttctcttaatttgtatataacctgttgtctaaattttatgtacagtcttttataataaaccattctcctatatgaaattttggatactgttaaaatataactcatgtggacttcaatgcagacttcacatttttctgacctttactcctacggtaaatcaagacaaaccatttgaattttaacattggttatttatttgtgtaatggccttacatgtggatattaacagtgtaaacaataccacatataaccatcaagataccttgattataatttataggactagaatgacagattcaggtggtttattaattacatttaaaaagttttctgaaaaaacttttgcaataaaaaaaaataaattgcccatcaataa

SEQ ID NO: 103355 - DNA, 3516 bp, Homo sapiens
  Payload ID: 151
  Gene Symbol: ABI1
  Gene Name: abl-interactor 1
  Uniprot ID: Q8IZP0
  ENST ID: ENST00000376139
  CDS Start-End: 109-1539
agggcgggtaggcggtttgtatccgggctgtgaggtgctcggagcctcggcggaccttgctgcctctgtctctttaacgcgagaggaagcgatgcagaggggtggaaaatggcagagctgcagatgttactagaggaggagatcccgtctggcaagagggcgctgatcgagagttaccagaacctgactcgggtggcagactactgtgaaaacaactacatacaggctacagacaagagaaaagctttagaggagaccaaagcctatacaacccaatctctagctagtgttgcttatcaaataaatgcattggccaacaatgtactccagttgctggatatccaagcctctcagcttcggagaatggagtcttccatcaatcatatctcacagactgtggatattcataaggagaaagtggcacgaagagagattggtattttgacaacaaataagaatacatcaagaactcacaaaataatagcacctgcgaatatggagcgccctgtaaggtatattcggaaacctatcgattacacagttctggatgatgtgggccatggtgtcaagcatggaaataaccagcctgcaagaactggcacactgtcgagaacaaatcctcctactcagaaaccgccaagtcctcccatgtcaggccggggaacactgggacggaatactccttataaaaccctggaacctgttaaacccccaacagttcctaatgactatatgaccagtcctgctaggcttggaagtcagcatagtccaggcaggacagcatctttaaatcagagaccaaggacacacagtggaagtagtggaggaagtggaagtcgagaaaacagtggtagcagtagtattggcattcccattgctgtgcctacaccttcgccacccactattggaccagcagccccgggctcagctcctggttcccagtatggcacaatgaccaggcagatatctcgacacaactctactacttcttcgacatcttctggtggatacagacgaactccctctgtgactgctcaattttctgctcagcctcatgttaatggaggtccactttattctcaaaattcaatttctattgctccaccccctccccctatgcctcagttgactccacagatacctctcacaggcttcgtggccagggtgcaggaaaacattgctgatagtccaactccaccgccaccacctccaccagatgacattcccatgtttgatgactctccacctcccccaccaccaccaccagtggattatgaagatgaggaggctgcagtagttcagtataatgatccatatgcagatggggatcctgcttgggcccccaagaattatattgagaaagttgttgcaatatatgattatacaaaagacaaggatgatgagctgtcatttatggagggtgcaatcatttatgttataaagaagaatgatgatggctggtatgaaggagtctgcaatcgagtgactggtctgttccctgggaactatgttgaatcaatcatgcactatactgattaatttttttttttcttttgaagtagattcttattactcagtcatactgtgggactattatggttaacagaactgtcttaatatgttttaaaatgtgcccatattttcagaacatgctgttttattggtaaattgaatgtctacctgtaagcataaatctttgaggcagtttatgtattgctgaatagcaatttatacaagaagctgtccataactgattatgcttatgtacttacttacacatttttaactttatgaccagcctaaatattctgggggaagtggggtataatatttaacgaatcatgattcagattgtaccattacatgtttcagtgcagcatggttactaacgctatgtcagactaatattaaaatcagaaaatttaaatgctggtgctggtcagactttttttgttagattctctcatttaaaaaaaatactgtttgtttaaagcatgcataaaaatttatgtattgaaatatacttaaaaattcaagatgcttcccatttgtgtaatatttacctggaggactcgtacttaggtgtcttaacgtgaattgagtctccaaggtctccatgtgaaacaagcaaaaagagaattatctgtaatgttgtaatttgtacctaagttttttaatgagtgaaatttgcattataaactttttccattcataaatacataagtgaaccaaaggtttttgtcctttccttcactgatttgctttaaaaaaaataaaagataatgatttattgcagaattatgattctattttctcaatatgttaacttggaaaaaaattttagccttatcttaatctgtcccaacagcaatgtgacggatttttgcagattcaaaatctgcaatggttatttacaagtcaatctactgaattccttttttaaataatcttttgaaactaagaaaatgtgtcaaattgtgtgcattcattctgtaggtaaaattcttaaggattgccatgtcagtccttcagttgtacagtgaactgttgtacactggttcaatgaaaggaagttaaaagtaccttttacatattgtaaaagtggatacagttgatttgtgagtaggcactctttaatccattacctggcactagcaacattagaattttaaaataaaataattgggaaagaaggtgggtcatgtattaatcagtgaacagagatttacctaaccaacagacttggattgtcttttgacataatcaaaatgcaacacatgcactttgtgtgtctcctcttaattgaagggagggctgagggatgttttctcttcttgtcttgtgtataattctctattgcttaggatattaaagtagagcactcaagtgtgggtttctgtgttattgaggatttgtttggaattcaaattacagttatgtactggatgctacagacttataacagcatagtgaatggtaagactagtgcaaaacagttatttctgaaaattaaagaccattattgctaccaaatcaatgtgactatttcatatgcattttgcctttgttaattttaaacaaacaaagtatcattagtgatcagctagctaccttctactttccatttttcaagtggattgttctcttaatttgtatataacctgttgtctaaattttatgtacagtcttttataataaaccattctcctatatgaaattttggatactgttaaaatataactcatgtggacttcaatgcagacttcacatttttctgacctttactcctacggtaaatcaagacaaaccatttgaattttaacattggttatttatttgtgtaatggccttacatgtggatattaacagtgtaaacaataccacatataaccatcaagataccttgattataatttataggactagaatgacagattcaggtggtttattaattacatttaaaaagttttctgaaaaaacttttgcaataaaaaaaaataaattgcccatcaataa

SEQ ID NO: 103356 - DNA, 1446 bp, Homo sapiens
  Payload ID: 151
  Gene Symbol: ABI1
  Gene Name: abl-interactor 1
  Uniprot ID: Q8IZP0
  ENST ID: ENST00000376140
  CDS Start-End: 1-1446
atggcagagctgcagatgttactagaggaggagatcccgtctggcaagagggcgctgatcgagagttaccagaacctgactcgggtggcagactactgtgaaaacaactacatacaggctacagacaagagaaaagctttagaggagaccaaagcctatacaacccaatctctagctagtgttgcttatcaaataaatgcattggccaacaatgtactccagttgctggatatccaagcctctcagcttcggagaatggagtcttccatcaatcatatctcacagactgtggatattcataaggagaaagtggcacgaagagagattggtattttgacaacaaataagaatacatcaagaactcacaaaataatagcacctgcgaatatggagcgccctgtaaggtatattcggaaacctatcgattacacagttctggatgatgtgggccatggtgtcaagtggctaaaagccaagcatggaaataaccagcctgcaagaactggcacactgtcgagaacaaatcctcctactcagaaaccgccaagtcctcccatgtcaggccggggaacactgggacggaatactccttataaaaccctggaacctgttaaacccccaacagttcctaatgactatatgaccagtcctgctaggcttggaagtcagcatagtccaggcaggacagcatctttaaatcagagaccaaggacacacagtggaagtagtggaggaagtggaagtcgagaaaacagtggtagcagtagtattggcattcccattgctgtgcctacaccttcgccacccactattggaccagcagccccgggctcagctcctggttcccagtatggcacaatgaccaggcagatatctcgacacaactctactacttcttcgacatcttctggtggatacagacgaactccctctgtgactgctcaattttctgctcagcctcatgttaatggaggtccactttattctcaaaattcaatttctattgctccaccccctccccctatgcctcagttgactccacagatacctctcacaggcttcgtggccagggtgcaggaaaacattgctgatagtccaactccaccgccaccacctccaccagatgacattcccatgtttgatgactctccacctcccccaccaccaccaccagtggattatgaagatgaggaggctgcagtagttcagtataatgatccatatgcagatggggatcctgcttgggcccccaagaattatattgagaaagttgttgcaatatatgattatacaaaagacaaggatgatgagctgtcatttatggagggtgcaatcatttatgttataaagaagaatgatgatggctggtatgaaggagtctgcaatcgagtgactggtctgttccctgggaactatgttgaatcaatcatgcactatactgattaa

SEQ ID NO: 103357 - DNA, 3576 bp, Homo sapiens
  Payload ID: 151
  Gene Symbol: ABI1
  Gene Name: abl-interactor 1
  Uniprot ID: Q8IZP0
  ENST ID: ENST00000376142
  CDS Start-End: 73-1599
gctcggagcctcggcggaccttgctgcctctgtctctttaacgcgagaggaagcgatgcagaggggtggaaaatggcagagctgcagatgttactagaggaggagatcccgtctggcaagagggcgctgatcgagagttaccagaacctgactcgggtggcagactactgtgaaaacaactacatacaggctacagacaagagaaaagctttagaggagaccaaagcctatacaacccaatctctagctagtgttgcttatcaaataaatgcattggccaacaatgtactccagttgctggatatccaagcctctcagcttcggagaatggagtcttccatcaatcatatctcacagactgtggatattcataaggagaaagtggcacgaagagagattggtattttgacaacaaataagaatacatcaagaactcacaaaataatagcacctgcgaatatggagcgccctgtaaggtatattcggaaacctatcgattacacagttctggatgatgtgggccatggtgtcaagtggctaaaagccaagcatggaaataaccagcctgcaagaactggcacactgtcgagaacaaatcctcctactcagaaaccgccaagtcctcccatgtcaggccggggaacactgggacggaatactccttataaaaccctggaacctgttaaacccccaacagttcctaatgactatatgaccagtcctgctaggcttggaagtcagcatagtccaggcaggacagcatctttaaatcagagaccaaggacacacagtggaagtagtggaggaagtggaagtcgagaaaacagtggtagcagtagtattggcattcccattgctgtgcctacaccttcgccacccactattggaccagaaaacatttctgtccctcctccttctggagctccaccagcaccacctctggcaccacttctcccagtgagcactgtgatagcagccccgggctcagctcctggttcccagtatggcacaatgaccaggcagatatctcgacacaactctactacttcttcgacatcttctggtggatacagacgaactccctctgtgactgctcaattttctgctcagcctcatgttaatggaggtccactttattctcaaaattcaatttctattgctccaccccctccccctatgcctcagttgactccacagatacctctcacaggcttcgtggccagggtgcaggaaaacattgctgatagtccaactccaccgccaccacctccaccagatgacattcccatgtttgatgactctccacctcccccaccaccaccaccagtggattatgaagatgaggaggctgcagtagttcagtataatgatccatatgcagatggggatcctgcttgggcccccaagaattatattgagaaagttgttgcaatatatgattatacaaaagacaaggatgatgagctgtcatttatggagggtgcaatcatttatgttataaagaagaatgatgatggctggtatgaaggagtctgcaatcgagtgactggtctgttccctgggaactatgttgaatcaatcatgcactatactgattaatttttttttttcttttgaagtagattcttattactcagtcatactgtgggactattatggttaacagaactgtcttaatatgttttaaaatgtgcccatattttcagaacatgctgttttattggtaaattgaatgtctacctgtaagcataaatctttgaggcagtttatgtattgctgaatagcaatttatacaagaagctgtccataactgattatgcttatgtacttacttacacatttttaactttatgaccagcctaaatattctgggggaagtggggtataatatttaacgaatcatgattcagattgtaccattacatgtttcagtgcagcatggttactaacgctatgtcagactaatattaaaatcagaaaatttaaatgctggtgctggtcagactttttttgttagattctctcatttaaaaaaaatactgtttgtttaaagcatgcataaaaatttatgtattgaaatatacttaaaaattcaagatgcttcccatttgtgtaatatttacctggaggactcgtacttaggtgtcttaacgtgaattgagtctccaaggtctccatgtgaaacaagcaaaaagagaattatctgtaatgttgtaatttgtacctaagttttttaatgagtgaaatttgcattataaactttttccattcataaatacataagtgaaccaaaggtttttgtcctttccttcactgatttgctttaaaaaaaataaaagataatgatttattgcagaattatgattctattttctcaatatgttaacttggaaaaaaattttagccttatcttaatctgtcccaacagcaatgtgacggatttttgcagattcaaaatctgcaatggttatttacaagtcaatctactgaattccttttttaaataatcttttgaaactaagaaaatgtgtcaaattgtgtgcattcattctgtaggtaaaattcttaaggattgccatgtcagtccttcagttgtacagtgaactgttgtacactggttcaatgaaaggaagttaaaagtaccttttacatattgtaaaagtggatacagttgatttgtgagtaggcactctttaatccattacctggcactagcaacattagaattttaaaataaaataattgggaaagaaggtgggtcatgtattaatcagtgaacagagatttacctaaccaacagacttggattgtcttttgacataatcaaaatgcaacacatgcactttgtgtgtctcctcttaattgaagggagggctgagggatgttttctcttcttgtcttgtgtataattctctattgcttaggatattaaagtagagcactcaagtgtgggtttctgtgttattgaggatttgtttggaattcaaattacagttatgtactggatgctacagacttataacagcatagtgaatggtaagactagtgcaaaacagttatttctgaaaattaaagaccattattgctaccaaatcaatgtgactatttcatatgcattttgcctttgttaattttaaacaaacaaagtatcattagtgatcagctagctaccttctactttccatttttcaagtggattgttctcttaatttgtatataacctgttgtctaaattttatgtacagtcttttataataaaccattctcctatatgaaattttggatactgttaaaatataactcatgtggacttcaatgcagacttcacatttttctgacctttactcctacggtaaatcaagacaaaccatttgaattttaacattggttatttatttgtgtaatggccttacatgtggatattaacagtgtaaacaataccacatataaccatcaagataccttgattataatttataggactagaatgacagattcaggtggtttattaattacatttaaaaagttttctgaaaaaacttttgcaataaaaaaaaataaattgcccatcaataa

SEQ ID NO: 103358 - DNA, 3515 bp, Homo sapiens
  Payload ID: 151
  Gene Symbol: ABI1
  Gene Name: abl-interactor 1
  ENST ID: ENST00000376160
  CDS Start-End: 111-1538
ggagggcgggtaggcggtttgtatccgggctgtgaggtgctcggagcctcggcggaccttgctgcctctgtctctttaacgcgagaggaagcgatgcagaggggtggaaaatggcagagctgcagatgttactagaggaggagatcccgtctggcaagagggcgctgatcgagagttaccagaacctgactcgggtggcagactactgtgaaaacaactacatacaggctacagacaagagaaaagctttagaggagaccaaagcctatacaacccaatctctagctagtgttgcttatcaaataaatgcattggccaacaatgtactccagttgctggatatccaagcctctcagcttcggagaatggagtcttccatcaatcatatctcacagactgtggatattcataaggagaaagtggcacgaagagagattggtattttgacaacaaataagaatacatcaagaactcacaaaataatagcacctgcgaatatggagcgccctgtaaggtatattcggaaacctatcgattacacagttctggatgatgtgggccatggtgtcaagcatggaaataaccagcctgcaagaactggcacactgtcgagaacaaatcctcctactcagaaaccgccaagtcctcccatgtcaggccggggaacactgggacggaatactccttataaaaccctggaacctgttaaacccccaacagttcctaatgactatatgaccagtcctgctaggcttggaagtcagcatagtccaggcaggacagcatctttaaatcagagaccaaggacacacagtggaagtagtggaggaagtggaagtcgagaaaacagtggtagcagtagtattggcattcccattgctgtgcctacaccttcgccacccactattggaccagccccgggctcagctcctggttcccagtatggcacaatgaccaggcagatatctcgacacaactctactacttcttcgacatcttctggtggatacagacgaactccctctgtgactgctcaattttctgctcagcctcatgttaatggaggtccactttattctcaaaattcaatttctattgctccaccccctccccctatgcctcagttgactccacagatacctctcacaggcttcgtggccagggtgcaggaaaacattgctgatagtccaactccaccgccaccacctccaccagatgacattcccatgtttgatgactctccacctcccccaccaccaccaccagtggattatgaagatgaggaggctgcagtagttcagtataatgatccatatgcagatggggatcctgcttgggcccccaagaattatattgagaaagttgttgcaatatatgattatacaaaagacaaggatgatgagctgtcatttatggagggtgcaatcatttatgttataaagaagaatgatgatggctggtatgaaggagtctgcaatcgagtgactggtctgttccctgggaactatgttgaatcaatcatgcactatactgattaatttttttttttcttttgaagtagattcttattactcagtcatactgtgggactattatggttaacagaactgtcttaatatgttttaaaatgtgcccatattttcagaacatgctgttttattggtaaattgaatgtctacctgtaagcataaatctttgaggcagtttatgtattgctgaatagcaatttatacaagaagctgtccataactgattatgcttatgtacttacttacacatttttaactttatgaccagcctaaatattctgggggaagtggggtataatatttaacgaatcatgattcagattgtaccattacatgtttcagtgcagcatggttactaacgctatgtcagactaatattaaaatcagaaaatttaaatgctggtgctggtcagactttttttgttagattctctcatttaaaaaaaatactgtttgtttaaagcatgcataaaaatttatgtattgaaatatacttaaaaattcaagatgcttcccatttgtgtaatatttacctggaggactcgtacttaggtgtcttaacgtgaattgagtctccaaggtctccatgtgaaacaagcaaaaagagaattatctgtaatgttgtaatttgtacctaagttttttaatgagtgaaatttgcattataaactttttccattcataaatacataagtgaaccaaaggtttttgtcctttccttcactgatttgctttaaaaaaaataaaagataatgatttattgcagaattatgattctattttctcaatatgttaacttggaaaaaaattttagccttatcttaatctgtcccaacagcaatgtgacggatttttgcagattcaaaatctgcaatggttatttacaagtcaatctactgaattccttttttaaataatcttttgaaactaagaaaatgtgtcaaattgtgtgcattcattctgtaggtaaaattcttaaggattgccatgtcagtccttcagttgtacagtgaactgttgtacactggttcaatgaaaggaagttaaaagtaccttttacatattgtaaaagtggatacagttgatttgtgagtaggcactctttaatccattacctggcactagcaacattagaattttaaaataaaataattgggaaagaaggtgggtcatgtattaatcagtgaacagagatttacctaaccaacagacttggattgtcttttgacataatcaaaatgcaacacatgcactttgtgtgtctcctcttaattgaagggagggctgagggatgttttctcttcttgtcttgtgtataattctctattgcttaggatattaaagtagagcactcaagtgtgggtttctgtgttattgaggatttgtttggaattcaaattacagttatgtactggatgctacagacttataacagcatagtgaatggtaagactagtgcaaaacagttatttctgaaaattaaagaccattattgctaccaaatcaatgtgactatttcatatgcattttgcctttgttaattttaaacaaacaaagtatcattagtgatcagctagctaccttctactttccatttttcaagtggattgttctcttaatttgtatataacctgttgtctaaattttatgtacagtcttttataataaaccattctcctatatgaaattttggatactgttaaaatataactcatgtggacttcaatgcagacttcacatttttctgacctttactcctacggtaaatcaagacaaaccatttgaattttaacattggttatttatttgtgtaatggccttacatgtggatattaacagtgtaaacaataccacatataaccatcaagataccttgattataatttataggactagaatgacagattcaggtggtttattaattacatttaaaaagttttctgaaaaaacttttgcaataaaaaaaaataaattgcccatcaataa

SEQ ID NO: 103359 - DNA, 3441 bp, Homo sapiens
  Payload ID: 151
  Gene Symbol: ABI1
  Gene Name: abl-interactor 1
  Uniprot ID: Q8IZP0
  ENST ID: ENST00000376166
  CDS Start-End: 124-1464
acaataccaggcgggagggcgggtaggcggtttgtatccgggctgtgaggtgctcggagcctcggcggaccttgctgcctctgtctctttaacgcgagaggaagcgatgcagaggggtggaaaatggcagagctgcagatgttactagaggaggagatcccgtctggcaagagggcgctgatcgagagttaccagaacctgactcgggtggcagactactgtgaaaacaactacatacaggctacagacaagagaaaagctttagaggagaccaaagcctatacaacccaatctctagctagtgttgcttatcaaataaatgcattggccaacaatgtactccagttgctggatatccaagcctctcagcttcggagaatggagtcttccatcaatcatatctcacagactgtggatattcataaggagaaagtggcacgaagagagattggtattttgacaacaaataagaatacatcaagaactcacaaaataatagcacctgcgaatatggagcgccctgtaaggtatattcggaaacctatcgattacacagttctggatgatgtgggccatggtgtcaagcatggaaataaccagcctgcaagaactggcacactgtcgagaacaaatcctcctactcagaaaccgccaagtcctcccatgtcaggccggggaacactgggacggaatactccttataaaaccctggaacctgttaaacccccaacagttcctaatgactatatgaccagtcctgctaggcttggaagtcagcatagtccaggcaggacagcatctttaaatcagagaccaaggacacacagtggaagtagtggaggaagtggaagtcgagaaaacagtggtagcagtagtattggcattcccattgctgtgcctacaccttcgccacccactattggaccagccccgggctcagctcctggttcccagtatggcacaatgaccaggcagatatctcgacacaactctactacttcttcgacatcttctggtggatacagacgaactccctctgtgactgctcaattttctgctcagcctcatgttaatggaggtccactttattctcaaaattcaattgctgatagtccaactccaccgccaccacctccaccagatgacattcccatgtttgatgactctccacctcccccaccaccaccaccagtggattatgaagatgaggaggctgcagtagttcagtataatgatccatatgcagatggggatcctgcttgggcccccaagaattatattgagaaagttgttgcaatatatgattatacaaaagacaaggatgatgagctgtcatttatggagggtgcaatcatttatgttataaagaagaatgatgatggctggtatgaaggagtctgcaatcgagtgactggtctgttccctgggaactatgttgaatcaatcatgcactatactgattaatttttttttttcttttgaagtagattcttattactcagtcatactgtgggactattatggttaacagaactgtcttaatatgttttaaaatgtgcccatattttcagaacatgctgttttattggtaaattgaatgtctacctgtaagcataaatctttgaggcagtttatgtattgctgaatagcaatttatacaagaagctgtccataactgattatgcttatgtacttacttacacatttttaactttatgaccagcctaaatattctgggggaagtggggtataatatttaacgaatcatgattcagattgtaccattacatgtttcagtgcagcatggttactaacgctatgtcagactaatattaaaatcagaaaatttaaatgctggtgctggtcagactttttttgttagattctctcatttaaaaaaaatactgtttgtttaaagcatgcataaaaatttatgtattgaaatatacttaaaaattcaagatgcttcccatttgtgtaatatttacctggaggactcgtacttaggtgtcttaacgtgaattgagtctccaaggtctccatgtgaaacaagcaaaaagagaattatctgtaatgttgtaatttgtacctaagttttttaatgagtgaaatttgcattataaactttttccattcataaatacataagtgaaccaaaggtttttgtcctttccttcactgatttgctttaaaaaaaataaaagataatgatttattgcagaattatgattctattttctcaatatgttaacttggaaaaaaattttagccttatcttaatctgtcccaacagcaatgtgacggatttttgcagattcaaaatctgcaatggttatttacaagtcaatctactgaattccttttttaaataatcttttgaaactaagaaaatgtgtcaaattgtgtgcattcattctgtaggtaaaattcttaaggattgccatgtcagtccttcagttgtacagtgaactgttgtacactggttcaatgaaaggaagttaaaagtaccttttacatattgtaaaagtggatacagttgatttgtgagtaggcactctttaatccattacctggcactagcaacattagaattttaaaataaaataattgggaaagaaggtgggtcatgtattaatcagtgaacagagatttacctaaccaacagacttggattgtcttttgacataatcaaaatgcaacacatgcactttgtgtgtctcctcttaattgaagggagggctgagggatgttttctcttcttgtcttgtgtataattctctattgcttaggatattaaagtagagcactcaagtgtgggtttctgtgttattgaggatttgtttggaattcaaattacagttatgtactggatgctacagacttataacagcatagtgaatggtaagactagtgcaaaacagttatttctgaaaattaaagaccattattgctaccaaatcaatgtgactatttcatatgcattttgcctttgttaattttaaacaaacaaagtatcattagtgatcagctagctaccttctactttccatttttcaagtggattgttctcttaatttgtatataacctgttgtctaaattttatgtacagtcttttataataaaccattctcctatatgaaattttggatactgttaaaatataactcatgtggacttcaatgcagacttcacatttttctgacctttactcctacggtaaatcaagacaaaccatttgaattttaacattggttatttatttgtgtaatggccttacatgtggatattaacagtgtaaacaataccacatataaccatcaagataccttgattataatttataggactagaatgacagattcaggtggtttattaattacatttaaaaagttttctgaaaaaacttttgcaataaaaaaaaataaattgcccatcaataa

SEQ ID NO: 103360 - DNA, 3362 bp, Homo sapiens
  Payload ID: 151
  Gene Symbol: ABI1
  Gene Name: abl-interactor 1
  Uniprot ID: Q8IZP0
  ENST ID: ENST00000376170
  CDS Start-End: 30-1385
cgagaggaagcgatgcagaggggtggaaaatggcagagctgcagatgttactagaggaggagatcccgtctggcaagagggcgctgatcgagagttaccagaacctgactcgggtggcagactactgtgaaaacaactacatacaggctacagacaagagaaaagctttagaggagaccaaagcctatacaacccaatctctagctagtgttgcttatcaaataaatgcattggccaacaatgtactccagttgctggatatccaagcctctcagcttcggagaatggagtcttccatcaatcatatctcacagactgtggatattcataaggagaaagtggcacgaagagagattggtattttgacaacaaataagaatacatcaagaactcacaaaataatagcacctgcgaatatggagcgccctgtaaggtatattcggaaacctatcgattacacagttctggatgatgtgggccatggtgtcaagtggctaaaagccaagcatggaaataaccagcctgcaagaactggcacactgtcgagaacaaatcctcctactcagaaaccgccaagtcctcccatgtcaggccggggaacactgggacggaatactccttataaaaccctggaacctgttaaacccccaacagttcctaatgactatatgaccagtcctgctaggcttggaagtcagcatagtccaggcaggacagcatctttaaatcagagaccaaggacacacagtggaagtagtggaggaagtggaagtcgagaaaacagtggtagcagtagtattggcattcccattgctgtgcctacaccttcgccacccactattggaccagccccgggctcagctcctggttcccagtatggcacaatgaccaggcagatatctcgacacaactctactacttcttcgacatcttctggtggatacagacgaactccctctgtgactgctcaattttctgctcagcctcatgttaatggaggtccactttattctcaaaattcaattgctgatagtccaactccaccgccaccacctccaccagatgacattcccatgtttgatgactctccacctcccccaccaccaccaccagtggattatgaagatgaggaggctgcagtagttcagtataatgatccatatgcagatggggatcctgcttgggcccccaagaattatattgagaaagttgttgcaatatatgattatacaaaagacaaggatgatgagctgtcatttatggagggtgcaatcatttatgttataaagaagaatgatgatggctggtatgaaggagtctgcaatcgagtgactggtctgttccctgggaactatgttgaatcaatcatgcactatactgattaatttttttttttcttttgaagtagattcttattactcagtcatactgtgggactattatggttaacagaactgtcttaatatgttttaaaatgtgcccatattttcagaacatgctgttttattggtaaattgaatgtctacctgtaagcataaatctttgaggcagtttatgtattgctgaatagcaatttatacaagaagctgtccataactgattatgcttatgtacttacttacacatttttaactttatgaccagcctaaatattctgggggaagtggggtataatatttaacgaatcatgattcagattgtaccattacatgtttcagtgcagcatggttactaacgctatgtcagactaatattaaaatcagaaaatttaaatgctggtgctggtcagactttttttgttagattctctcatttaaaaaaaatactgtttgtttaaagcatgcataaaaatttatgtattgaaatatacttaaaaattcaagatgcttcccatttgtgtaatatttacctggaggactcgtacttaggtgtcttaacgtgaattgagtctccaaggtctccatgtgaaacaagcaaaaagagaattatctgtaatgttgtaatttgtacctaagttttttaatgagtgaaatttgcattataaactttttccattcataaatacataagtgaaccaaaggtttttgtcctttccttcactgatttgctttaaaaaaaataaaagataatgatttattgcagaattatgattctattttctcaatatgttaacttggaaaaaaattttagccttatcttaatctgtcccaacagcaatgtgacggatttttgcagattcaaaatctgcaatggttatttacaagtcaatctactgaattccttttttaaataatcttttgaaactaagaaaatgtgtcaaattgtgtgcattcattctgtaggtaaaattcttaaggattgccatgtcagtccttcagttgtacagtgaactgttgtacactggttcaatgaaaggaagttaaaagtaccttttacatattgtaaaagtggatacagttgatttgtgagtaggcactctttaatccattacctggcactagcaacattagaattttaaaataaaataattgggaaagaaggtgggtcatgtattaatcagtgaacagagatttacctaaccaacagacttggattgtcttttgacataatcaaaatgcaacacatgcactttgtgtgtctcctcttaattgaagggagggctgagggatgttttctcttcttgtcttgtgtataattctctattgcttaggatattaaagtagagcactcaagtgtgggtttctgtgttattgaggatttgtttggaattcaaattacagttatgtactggatgctacagacttataacagcatagtgaatggtaagactagtgcaaaacagttatttctgaaaattaaagaccattattgctaccaaatcaatgtgactatttcatatgcattttgcctttgttaattttaaacaaacaaagtatcattagtgatcagctagctaccttctactttccatttttcaagtggattgttctcttaatttgtatataacctgttgtctaaattttatgtacagtcttttataataaaccattctcctatatgaaattttggatactgttaaaatataactcatgtggacttcaatgcagacttcacatttttctgacctttactcctacggtaaatcaagacaaaccatttgaattttaacattggttatttatttgtgtaatggccttacatgtggatattaacagtgtaaacaataccacatataaccatcaagataccttgattataatttataggactagaatgacagattcaggtggtttattaattacatttaaaaagttttctgaaaaaacttttgcaataaaaaaaaataaattgcccatcaataa

SEQ ID NO: 103361 - DNA, 3380 bp, Homo sapiens
  Payload ID: 151
  Gene Symbol: ABI1
  Gene Name: abl-interactor 1
  ENST ID: ENST00000536334
  CDS Start-End: 225-1406
gagaaataaacgctcgcgagagaacgaggttcaggcggctgcacgaagggggtggaggggggctggagagagtgaggaggaaggggaggaggtgccgtcccacaataccaggcgggagggcgggtaggcggtttgtatccgggctgtgaggtgctcggagcctcggcggaccttgctgcctctgtctctttaacgcgagaggaagcgatgcagaggggtggaaaatggcagagctgcagatgttactagaggaggagatcccgtctggcaagagggcgctgatcgagagttaccagaacctgactcgggtggcagactactgtgaaaacaactacatacaggctacagacaagagaaaagctttagaggagaccaaagcctatacaacccaatctctagctagtgttgcttatcaaataaatgcattggccaacaatgtactccagttgctggatatccaagcctctcagcttcggagaatggagtcttccatcaatcatatctcacagactgtggatattcataaggagaaagtggcacgaagagagattggtattttgacaacaaataagaatacatcaagaactcacaaaataatagcacctgcgaatatggagcgccctgtaaggtatattcggaaacctatcgattacacagttctggatgatgtgggccatggtgtcaagtggctaaaagccaagcatggaaataaccagcctgcaagaactggcacactgtcgagaacaaatcctcctactcagaaaccgccaagtcctcccatgtcaggccggggaacactgggacggaatactccttataaaaccctggaacctgttaaacccccaacagttcctaatgactatatgaccagtcctgctaggcttggaagtcagcatagtccaggcaggacagcatctttaaatcagagaccaaggacacacagtggaagtagtggaggaagtggaagtcgagaaaacagtggtagcagtagtattggcattcccattgctgtgcctacaccttcgccacccactattggaccagttgctgatagtccaactccaccgccaccacctccaccagatgacattcccatgtttgatgactctccacctcccccaccaccaccaccagtggattatgaagatgaggaggctgcagtagttcagtataatgatccatatgcagatggggatcctgcttgggcccccaagaattatattgagaaagttgttgcaatatatgattatacaaaagacaaggatgatgagctgtcatttatggagggtgcaatcatttatgttataaagaagaatgatgatggctggtatgaaggagtctgcaatcgagtgactggtctgttccctgggaactatgttgaatcaatcatgcactatactgattaatttttttttttcttttgaagtagattcttattactcagtcatactgtgggactattatggttaacagaactgtcttaatatgttttaaaatgtgcccatattttcagaacatgctgttttattggtaaattgaatgtctacctgtaagcataaatctttgaggcagtttatgtattgctgaatagcaatttatacaagaagctgtccataactgattatgcttatgtacttacttacacatttttaactttatgaccagcctaaatattctgggggaagtggggtataatatttaacgaatcatgattcagattgtaccattacatgtttcagtgcagcatggttactaacgctatgtcagactaatattaaaatcagaaaatttaaatgctggtgctggtcagactttttttgttagattctctcatttaaaaaaaatactgtttgtttaaagcatgcataaaaatttatgtattgaaatatacttaaaaattcaagatgcttcccatttgtgtaatatttacctggaggactcgtacttaggtgtcttaacgtgaattgagtctccaaggtctccatgtgaaacaagcaaaaagagaattatctgtaatgttgtaatttgtacctaagttttttaatgagtgaaatttgcattataaactttttccattcataaatacataagtgaaccaaaggtttttgtcctttccttcactgatttgctttaaaaaaaataaaagataatgatttattgcagaattatgattctattttctcaatatgttaacttggaaaaaaattttagccttatcttaatctgtcccaacagcaatgtgacggatttttgcagattcaaaatctgcaatggttatttacaagtcaatctactgaattccttttttaaataatcttttgaaactaagaaaatgtgtcaaattgtgtgcattcattctgtaggtaaaattcttaaggattgccatgtcagtccttcagttgtacagtgaactgttgtacactggttcaatgaaaggaagttaaaagtaccttttacatattgtaaaagtggatacagttgatttgtgagtaggcactctttaatccattacctggcactagcaacattagaattttaaaataaaataattgggaaagaaggtgggtcatgtattaatcagtgaacagagatttacctaaccaacagacttggattgtcttttgacataatcaaaatgcaacacatgcactttgtgtgtctcctcttaattgaagggagggctgagggatgttttctcttcttgtcttgtgtataattctctattgcttaggatattaaagtagagcactcaagtgtgggtttctgtgttattgaggatttgtttggaattcaaattacagttatgtactggatgctacagacttataacagcatagtgaatggtaagactagtgcaaaacagttatttctgaaaattaaagaccattattgctaccaaatcaatgtgactatttcatatgcattttgcctttgttaattttaaacaaacaaagtatcattagtgatcagctagctaccttctactttccatttttcaagtggattgttctcttaatttgtatataacctgttgtctaaattttatgtacagtcttttataataaaccattctcctatatgaaattttggatactgttaaaatataactcatgtggacttcaatgcagacttcacatttttctgacctttactcctacggtaaatcaagacaaaccatttgaattttaacattggttatttatttgtgtaatggccttacatgtggatattaacagtgtaaacaataccacatataaccatcaagataccttgattataatttataggactagaatgacagattcaggtggtttattaattacatttaaaaagttttctgaaaaaacttttgcaataaaaaaaaataaattgcccatcaa

SEQ ID NO: 103362 - DNA, 3188 bp, Homo sapiens
  Payload ID: 151
  Gene Symbol: ABI1
  Gene Name: abl-interactor 1
  Uniprot ID: Q8IZP0
  ENST ID: ENST00000490841
  CDS Start-End: 225-1214
gagaaataaacgctcgcgagagaacgaggttcaggcggctgcacgaagggggtggaggggggctggagagagtgaggaggaaggggaggaggtgccgtcccacaataccaggcgggagggcgggtaggcggtttgtatccgggctgtgaggtgctcggagcctcggcggaccttgctgcctctgtctctttaacgcgagaggaagcgatgcagaggggtggaaaatggcagagctgcagatgttactagaggaggagatcccgtctggcaagagggcgctgatcgagagttaccagaacctgactcgggtggcagactactgtgaaaacaactacatacaggctacagacaagagaaaagctttagaggagaccaaagcctatacaacccaatctctagctagtgttgcttatcaaataaatgcattggccaacaatgtactccagttgctggatatccaagcctctcagcttcggagaatggagtcttccatcaatcatatctcacagcatggaaataaccagcctgcaagaactggcacactgtcgagaacaaatcctcctactcagaaaccgccaagtcctcccatgtcaggccggggaacactgggacggaatactccttataaaaccctggaacctgttaaacccccaacagttcctaatgactatatgaccagtcctgctaggcttggaagtcagcatagtccaggcaggacagcatctttaaatcagagaccaaggacacacagtggaagtagtggaggaagtggaagtcgagaaaacagtggtagcagtagtattggcattcccattgctgtgcctacaccttcgccacccactattggaccagttgctgatagtccaactccaccgccaccacctccaccagatgacattcccatgtttgatgactctccacctcccccaccaccaccaccagtggattatgaagatgaggaggctgcagtagttcagtataatgatccatatgcagatggggatcctgcttgggcccccaagaattatattgagaaagttgttgcaatatatgattatacaaaagacaaggatgatgagctgtcatttatggagggtgcaatcatttatgttataaagaagaatgatgatggctggtatgaaggagtctgcaatcgagtgactggtctgttccctgggaactatgttgaatcaatcatgcactatactgattaatttttttttttcttttgaagtagattcttattactcagtcatactgtgggactattatggttaacagaactgtcttaatatgttttaaaatgtgcccatattttcagaacatgctgttttattggtaaattgaatgtctacctgtaagcataaatctttgaggcagtttatgtattgctgaatagcaatttatacaagaagctgtccataactgattatgcttatgtacttacttacacatttttaactttatgaccagcctaaatattctgggggaagtggggtataatatttaacgaatcatgattcagattgtaccattacatgtttcagtgcagcatggttactaacgctatgtcagactaatattaaaatcagaaaatttaaatgctggtgctggtcagactttttttgttagattctctcatttaaaaaaaatactgtttgtttaaagcatgcataaaaatttatgtattgaaatatacttaaaaattcaagatgcttcccatttgtgtaatatttacctggaggactcgtacttaggtgtcttaacgtgaattgagtctccaaggtctccatgtgaaacaagcaaaaagagaattatctgtaatgttgtaatttgtacctaagttttttaatgagtgaaatttgcattataaactttttccattcataaatacataagtgaaccaaaggtttttgtcctttccttcactgatttgctttaaaaaaaataaaagataatgatttattgcagaattatgattctattttctcaatatgttaacttggaaaaaaattttagccttatcttaatctgtcccaacagcaatgtgacggatttttgcagattcaaaatctgcaatggttatttacaagtcaatctactgaattccttttttaaataatcttttgaaactaagaaaatgtgtcaaattgtgtgcattcattctgtaggtaaaattcttaaggattgccatgtcagtccttcagttgtacagtgaactgttgtacactggttcaatgaaaggaagttaaaagtaccttttacatattgtaaaagtggatacagttgatttgtgagtaggcactctttaatccattacctggcactagcaacattagaattttaaaataaaataattgggaaagaaggtgggtcatgtattaatcagtgaacagagatttacctaaccaacagacttggattgtcttttgacataatcaaaatgcaacacatgcactttgtgtgtctcctcttaattgaagggagggctgagggatgttttctcttcttgtcttgtgtataattctctattgcttaggatattaaagtagagcactcaagtgtgggtttctgtgttattgaggatttgtttggaattcaaattacagttatgtactggatgctacagacttataacagcatagtgaatggtaagactagtgcaaaacagttatttctgaaaattaaagaccattattgctaccaaatcaatgtgactatttcatatgcattttgcctttgttaattttaaacaaacaaagtatcattagtgatcagctagctaccttctactttccatttttcaagtggattgttctcttaatttgtatataacctgttgtctaaattttatgtacagtcttttataataaaccattctcctatatgaaattttggatactgttaaaatataactcatgtggacttcaatgcagacttcacatttttctgacctttactcctacggtaaatcaagacaaaccatttgaattttaacattggttatttatttgtgtaatggccttacatgtggatattaacagtgtaaacaataccacatataaccatcaagataccttgattataatttataggactagaatgacagattcaggtggtttattaattacatttaaaaagttttctgaaaaaacttttgcaataaaaaaaaataaattgcccatcaa

SEQ ID NO: 103363 - DNA, 6634 bp, Homo sapiens
  Payload ID: 152
  Gene Symbol: ABI2
  Gene Name: abl-interactor 2
  ENST ID: ENST00000261016
  CDS Start-End: 642-1814
gggaatctttttcgggctcccgggggcggagggaagggagcgcgcgtgcgcgcgcccggccggccgtcgccgcggtgaccgtcctcggagtccgtcggctcgcgccccgcccccgtcgccccctcccctgtcgcgcgctggggctgtttctcgctccttccgagttaccgccgccgtcgccgccgctcctcctctcccggtcctgggtttccttggcgctgcggccgccgctccctctgcgacctgtatgaggaggaggaggaggaggatgtgaagatggcggagctgcagatgctgctggaagaggaaatcccggggggccgccgggccctcttcgacagctacacaaatctggaacgggtggccgattactgcgagaacaactacatacagcagataagcagagagccctagaagaaaccaaagcctacaccacccaatccttagcaagtgttgcctatctgataaacaccttggccaacaatgtcctgcagatgctggatatccaggcatcccagctacgaaggatggaatcttcaatcaatcatatttcacaagcaatactgcagttcaaccccgtgtggtagtatgatggcaagaatgcaaattataccgttgttagattacctttattattatagatgttttttaaaagttatttacttaaaatatctatacttaggcaaattagaggcgttgatcttgagtcgacttttgtgaccaaatttggaaacaattgcagtttgagattgaatgagacagttgatattcataaagagaaagttgcaagaagagaaattggtattttgactaccaataaaaacacttcaaggacacataagattattgctccagccaaccttgaacgaccagttcgttatattagaaaacctattgactatacaattctagatgatattggacatggagtaaaggtgagtacccagaacatgaagatgggtgggctgccgcgtacaacacctccaactcagaagccccctagtccccctatgtcagggaaagggacacttgggcggcactccccctatcgcacactggagccagtgcgtcctccagtggtaccaaatgattacgtacctagcccaacccgtaatatggctccctcgcagcagagccctgtgaggacagcttctgtgaatcaaagaaatcgaacttacagcagcagtgggagtagtggagggagccacccaagtagtcggagcagcagtcgagagaacagtggaagtggtagtgtgggggttcctattgctgttcctactccatctcctcccagtgtctttccaggtcatcctgtacagttctacagcatgaataggcctgcctctcgccatactcccccaacaatagggggctcgttgccctatagacgccctccttccattacttcacaaacaagccttcagaatcagatgaatggaggacctttttatagccagaatccagtttcagatacaccacctccaccgccacctgtggaagaaccagtctttgatgagtctcccccacctcctcctcctccagaagattacgaagaggaggaagctgctgtggttgagtatagtgatccttatgctgaagaggacccaccgtgggctccacgttcttacttggaaaaggttgtggcaatttatgactatacaaaagacaaggaagatgagctgtcctttcaggaaggagccattatttatgtcatcaagaagaatgacgatggttggtatgagggagttatgaatggagtgactgggctttttcctgggaattacgttgagtctatcatgcattattctgagtaaagctcagcagggctgtgcttgcctcacaggaatagtcaggtcttcccagattatctgaaggccctggggattccactccagtaaagtagaatgaaggatacaaatgataaaaattacacttttttttttggtttattccccagtattaaaaacaaagcaagctgagtctgaacaaatggatctttctgccatcatttgtacaatgctgagctgtctggattgaaataaaatgaccatttttatgtatgtcaaaggtataacagcataactgtgtagccaaaacaaaatcagattaagactgattcagaaaaatctgggatctttctcaggaatactgtatacccttgggatttctcctcctgcagaatctgtggcattggatgttcttcattgcctgtgctaaggggttaacctcatggcccagtgggtaccctagccccttcttttcttccacttgtatgaagaggagggaaccaacatttaaataccacacttaaccatttttacaattatttcagatggcttttttcctctgtgacactgtaaattctgcattctctcagcacttgagtgcaccaaacgagtgaatgctgaactcacttgcatcccttcatgtttctgtttgtggattataaggatgatgaaatgtgaaagtctcccaacactctgagggtggtgaacgattgccacccgtttgattttaatgtgctgctgcatgagactgcattgttgctaatggccagtgtacccagatgtgaagtgtggtaggctggttcatatgtggaggtgggtgtgtgaagctagacacgaaggtccctaaggttctgaagagacttgaactgtggaaatgctcttagcaggcatcccgaacccctgcttcggtgctgttttgaggagtaggatcttggagttcagaccaactatgactatcatttccttcactatctagaaaaacgctattctactttggaagagaatagtagttattttcaagtctcctgacagtcactgggagtacaaggtttgctaatgtgctctctggacgttattaatggccagtattagttgctgctgtattactgactcgcttagctgtagaaagggtaatactctcctgattttgtatgattggactcttaagtagctgctgttagtcagaattaaaacccatctcagactaagaatataatgaataagattaataggccaaaatatgtatctaatcacattgataaaaattaatataactgacacaataaaacacatttcccccatctgtacaataaatacagcttcaaattcagtggagtctgtagggcagataactttaatcatcactactgtagtcagtataagaaatgctgaaaaaaatccaggagggcttgtctctttgtgggtggtcactgtgatgttgggccagctcctgttcaggtccagagctgctaacgtgggttctactcagtcccagtgacttggccagaatagagctttgccaggtaactgccctgtgctaggtgaaaggggaaaagcagtagctggatatatttcaaatgaggttttgaacaagttcagaaagtggaacttgattgaaaagtgaacaagtgtagtagtgtgtgagaaaattcagatggtgtcggatgcagaagttaatattccacttaatgttatctgagcattaaaaatcatcagcatttaactgagaccccactatagagtttccttatcaagactttttggttttaaagttgtttttaatgcattgcaagttacaatagctattttgcttttagatttttcccagcactttgtatttattagctttcattaacttgcctccagtatacattccacttcgtgcttttcttaggtcatttctacatcccttattccttgttttcctgcagtgtaatggccctgaatgtcctctgagccttcagctccattatggacccaaactagactatacttggataagttaagctcttcttcgtgtactggtctataattagaaaaactgttttaaattagatgttcccattatttatttaaacagctttttgctgagaaagcttagtggattaatgaggcagagggtgttttgaaatccaataaatagttcccacaggctgggtgtggtggcttatgcctgtaatcccagcactttcggaggccgaggtgggtggatcatgaggtcaataaattgagaccatcctggccaacatggtgaaaccccatctctactaaaaacacaaaaattagctgggcgtggtggcgcacacctgtagtcccagctacttgggaggctgaggcaggagaatcactggaacctgggaggcagaggttgcagtgagccgagattgtgccactgcactccagcctggtgacagagcgagactccatcaaaaaaaaaaaaaaaaagttcccacagctcaccactacagaagcagggaagacaactatgcagaaaacagagttagtggcggtcagcaggaatgcagctggtcttttggacccctacgggatgggggcagtgcagaagacactggtgaagtcctttatactgaagacctgtggttgggagcaggggtagtccatgggtctgctgattttttttccctatttagtactaatgtgtgtgtgatctttgttttacaaacagtaccttttgggttttctgcatattttataatttttgtacagttttgaattctatagattgtcttggaaggatactgtgtgatgggtcaggcacacagtaattggagacttttaatgtatgtaatatttcatagattgcatgctattaatcatctgtgagggtagtattttttgttttattgtaagtttccctctttttttataaattaaaagatggttggtattaggaatttcaaatgaatgcagaaaatcttacatgctgtgtactattaatattataacagacgatccaagtccaaaatctgaccaataaagcaaccattttatcaagatagagggattctaatgggagaggggattcttccctcctgaagtttgtgtgtccagtccccttaaaaaaaatgaatagttgtcttttcttgtcatattaatactcgaaagtccatggtggtattaatgaaagtacactttattgttgcctttgaacttacggccaaggcaataaatcagaaacaaaaatagtgccaatgtgtcaaaatcgacatctgagagattcagcctcccatttggaataaatatgaatcttctaagctatcttgtttaatattttccatcatttagctacttcctatctccctcagaggcgcctgctgttcccattttagagttgacagtggcctgctaattttgctatgttcctaaaagttactgggtgtgagacattttcatcccctcctttttcctactgctggtgtttattatccagctagacaatattttatgcatatttaccgtgatgtctggaccgtacctgtgctccttggcagtttatgttgaagataactaaagatttttctctttgggaggcatcaaaatgatggtagtttgcttttatctttttatgttcattttcttttagtaggtgacctttctgcattaagaactgtttttatcttttactaccttttcttttctcctttgtggagacagcatgacatgtcctgaaggtcacctttgcctttgaaaaaggtttgatggaggaattcacaggtgactgacaagtctttgaaaagaatgggatctgctcacttctggtctttttggccgggaactcctgattggtgttaaggtggtaatttcccccatataagatttagaatcactgagtttgagctagatgaaatttttaaaatttctggttgtctcattagactgatgaggtgagttttcttcttcatatgaacagctagttaataacagcagagttctcactcagtgctcagtacttaattttccactgcaccacaactgtcttaactaaatgtgctgtatttttctttaaaagttaagagttctatttggtgttttcaggaatatacgtgaaaagacatgccatgttttggtaaataccatcagagttgtgtaaaggcgtgtactaagtgcaatcttaatttgtggaaataatcttcatttacccctcctaaaactacactcagtataaacactttcccataaggtgtgtgcagtaaaaatgttatattactccaacactggcaggagcacagcacagcagccttattggagagagccttataaaagtgattaaatggaggcattgagctcattacctttaagtttactttgtgctgacctttgttcctgttttgagaatctcatataattattaaaaaaaaaaaacaattaaaacgaaacggcggggcctagctgtgtataaatgatccttgctgaatatcttaaggttttttgtaagaaaaaagaaaaaccaacaaaaaaagcttattttcacattaaaatgaaacctcttttgcaacttaagaattctatggaaaagcagtttttatcatattttgtgtccatgcaccatttttcttaaaatggcttacaaaaaagaatgtaaacaatttgtgatctggccagttgtacttttagctcccagagggagagttggtggtattatgagttgagtaaaaaccatccaggggaacttgagggagcagtctgttgccagtaatgttccttgtgtgccattaaaccacctccagatgagtggaggaacatcactttttaattttttaattgtatttggaattgttgccgtgtactaagaacttgacctaaataaaatcccacaaagtatattc

SEQ ID NO: 103364 - DNA, 6484 bp, Homo sapiens
  Payload ID: 152
  Gene Symbol: ABI2
  Gene Name: abl-interactor 2
  Uniprot ID: Q9NYB9
  ENST ID: ENST00000261017
  CDS Start-End: 236-1663
gcgcgtgcgcgcgcccggccggccgtcgccgcggtgaccgtcctcggagtccgtcggctcgcgccccgcccccgtcgccccctcccctgtcgcgcgctggggctgtttctcgctccttccgagttaccgccgccgtcgccgccgctcctcctctcccggtcctgggtttccttggcgctgcggccgccgctccctctgcgacctgtatgaggaggaggaggaggaggatgtgaagatggcggagctgcagatgctgctggaagaggaaatcccggggggccgccgggccctcttcgacagctacacaaatctggaacgggtggccgattactgcgagaacaactacatacagtcagcagataagcagagagccctagaagaaaccaaagcctacaccacccaatccttagcaagtgttgcctatctgataaacaccttggccaacaatgtcctgcagatgctggatatccaggcatcccagctacgaaggatggaatcttcaatcaatcatatttcacaaacagttgatattcataaagagaaagttgcaagaagagaaattggtattttgactaccaataaaaacacttcaaggacacataagattattgctccagccaaccttgaacgaccagttcgttatattagaaaacctattgactatacaattctagatgatattggacatggagtaaaggtgagtacccagaacatgaagatgggtgggctgccgcgtacaacacctccaactcagaagccccctagtccccctatgtcagggaaagggacacttgggcggcactccccctatcgcacactggagccagtgcgtcctccagtggtaccaaatgattacgtacctagcccaacccgtaatatggctccctcgcagcagagccctgtgaggacagcttctgtgaatcaaagaaatcgaacttacagcagcagtgggagtagtggagggagccacccaagtagtcggagcagcagtcgagagaacagtggaagtggtagtgtgggggttcctattgctgttcctactccatctcctcccagtgtctttccaggtcatcctgtacagttctacagcatgaataggcctgcctctcgccatactcccccaacaatagggggctcgttgccctatagacgccctccttccattacttcacaaacaagccttcagaatcagatgaatggaggacctttttatagccagaatccagtatctcttgctcctcctcctccctccatcctacaggtaactcctcagttacctttaatgggatttgtggccagagtccaagaaaatatttcagatacaccacctccaccgccacctgtggaagaaccagtctttgatgagtctcccccacctcctcctcctccagaagattacgaagaggaggaagctgctgtggttgagtatagtgatccttatgctgaagaggacccaccgtgggctccacgttcttacttggaaaaggttgtggcaatttatgactatacaaaagacaaggaagatgagctgtcctttcaggaaggagccattatttatgtcatcaagaagaatgacgatggttggtatgagggagttatgaatggagtgactgggctttttcctgggaattacgttgagtctatcatgcattattctgagtaaagctcagcagggctgtgcttgcctcacaggaatagtcaggtcttcccagattatctgaaggccctggggattccactccagtaaagtagaatgaaggatacaaatgataaaaattacacttttttttttggtttattccccagtattaaaaacaaagcaagctgagtctgaacaaatggatctttctgccatcatttgtacaatgctgagctgtctggattgaaataaaatgaccatttttatgtatgtcaaaggtataacagcataactgtgtagccaaaacaaaatcagattaagactgattcagaaaaatctgggatctttctcaggaatactgtatacccttgggatttctcctcctgcagaatctgtggcattggatgttcttcattgcctgtgctaaggggttaacctcatggcccagtgggtaccctagccccttcttttcttccacttgtatgaagaggagggaaccaacatttaaataccacacttaaccatttttacaattatttcagatggcttttttcctctgtgacactgtaaattctgcattctctcagcacttgagtgcaccaaacgagtgaatgctgaactcacttgcatcccttcatgtttctgtttgtggattataaggatgatgaaatgtgaaagtctcccaacactctgagggtggtgaacgattgccacccgtttgattttaatgtgctgctgcatgagactgcattgttgctaatggccagtgtacccagatgtgaagtgtggtaggctggttcatatgtggaggtgggtgtgtgaagctagacacgaaggtccctaaggttctgaagagacttgaactgtggaaatgctcttagcaggcatcccgaacccctgcttcggtgctgttttgaggagtaggatcttggagttcagaccaactatgactatcatttccttcactatctagaaaaacgctattctactttggaagagaatagtagttattttcaagtctcctgacagtcactgggagtacaaggtttgctaatgtgctctctggacgttattaatggccagtattagttgctgctgtattactgactcgcttagctgtagaaagggtaatactctcctgattttgtatgattggactcttaagtagctgctgttagtcagaattaaaacccatctcagactaagaatataatgaataagattaataggccaaaatatgtatctaatcacattgataaaaattaatataactgacacaataaaacacatttcccccatctgtacaataaatacagcttcaaattcagtggagtctgtagggcagataactttaatcatcactactgtagtcagtataagaaatgctgaaaaaaatccaggagggcttgtctctttgtgggtggtcactgtgatgttgggccagctcctgttcaggtccagagctgctaacgtgggttctactcagtcccagtgacttggccagaatagagctttgccaggtaactgccctgtgctaggtgaaaggggaaaagcagtagctggatatatttcaaatgaggttttgaacaagttcagaaagtggaacttgattgaaaagtgaacaagtgtagtagtgtgtgagaaaattcagatggtgtcggatgcagaagttaatattccacttaatgttatctgagcattaaaaatcatcagcatttaactgagaccccactatagagtttccttatcaagactttttggttttaaagttgtttttaatgcattgcaagttacaatagctattttgcttttagatttttcccagcactttgtatttattagctttcattaacttgcctccagtatacattccacttcgtgcttttcttaggtcatttctacatcccttattccttgttttcctgcagtgtaatggccctgaatgtcctctgagccttcagctccattatggacccaaactagactatacttggataagttaagctcttcttcgtgtactggtctataattagaaaaactgttttaaattagatgttcccattatttatttaaacagctttttgctgagaaagcttagtggattaatgaggcagagggtgttttgaaatccaataaatagttcccacaggctgggtgtggtggcttatgcctgtaatcccagcactttcggaggccgaggtgggtggatcatgaggtcaataaattgagaccatcctggccaacatggtgaaaccccatctctactaaaaacacaaaaattagctgggcgtggtggcgcacacctgtagtcccagctacttgggaggctgaggcaggagaatcactggaacctgggaggcagaggttgcagtgagccgagattgtgccactgcactccagcctggtgacagagcgagactccatcaaaaaaaaaaaaaaaaagttcccacagctcaccactacagaagcagggaagacaactatgcagaaaacagagttagtggcggtcagcaggaatgcagctggtcttttggacccctacgggatgggggcagtgcagaagacactggtgaagtcctttatactgaagacctgtggttgggagcaggggtagtccatgggtctgctgattttttttccctatttagtactaatgtgtgtgtgatctttgttttacaaacagtaccttttgggttttctgcatattttataatttttgtacagttttgaattctatagattgtcttggaaggatactgtgtgatgggtcaggcacacagtaattggagacttttaatgtatgtaatatttcatagattgcatgctattaatcatctgtgagggtagtattttttgttttattgtaagtttccctctttttttataaattaaaagatggttggtattaggaatttcaaatgaatgcagaaaatcttacatgctgtgtactattaatattataacagacgatccaagtccaaaatctgaccaataaagcaaccattttatcaagatagagggattctaatgggagaggggattcttccctcctgaagtttgtgtgtccagtccccttaaaaaaaatgaatagttgtcttttcttgtcatattaatactcgaaagtccatggtggtattaatgaaagtacactttattgttgcctttgaacttacggccaaggcaataaatcagaaacaaaaatagtgccaatgtgtcaaaatcgacatctgagagattcagcctcccatttggaataaatatgaatcttctaagctatcttgtttaatattttccatcatttagctacttcctatctccctcagaggcgcctgctgttcccattttagagttgacagtggcctgctaattttgctatgttcctaaaagttactgggtgtgagacattttcatcccctcctttttcctactgctggtgtttattatccagctagacaatattttatgcatatttaccgtgatgtctggaccgtacctgtgctccttggcagtttatgttgaagataactaaagatttttctctttgggaggcatcaaaatgatggtagtttgcttttatctttttatgttcattttcttttagtaggtgacctttctgcattaagaactgtttttatcttttactaccttttcttttctcctttgtggagacagcatgacatgtcctgaaggtcacctttgcctttgaaaaaggtttgatggaggaattcacaggtgactgacaagtctttgaaaagaatgggatctgctcacttctggtctttttggccgggaactcctgattggtgttaaggtggtaatttcccccatataagatttagaatcactgagtttgagctagatgaaatttttaaaatttctggttgtctcattagactgatgaggtgagttttcttcttcatatgaacagctagttaataacagcagagttctcactcagtgctcagtacttaattttccactgcaccacaactgtcttaactaaatgtgctgtatttttctttaaaagttaagagttctatttggtgttttcaggaatatacgtgaaaagacatgccatgttttggtaaataccatcagagttgtgtaaaggcgtgtactaagtgcaatcttaatttgtggaaataatcttcatttacccctcctaaaactacactcagtataaacactttcccataaggtgtgtgcagtaaaaatgttatattactccaacactggcaggagcacagcacagcagccttattggagagagccttataaaagtgattaaatggaggcattgagctcattacctttaagtttactttgtgctgacctttgttcctgttttgagaatctcatataattattaaaaaaaaaaaacaattaaaacgaaacggcggggcctagctgtgtataaatgatccttgctgaatatcttaaggttttttgtaagaaaaaagaaaaaccaacaaaaaaagcttattttcacattaaaatgaaacctcttttgcaacttaagaattctatggaaaagcagtttttatcatattttgtgtccatgcaccatttttcttaaaatggcttacaaaaaagaatgtaaacaatttgtgatctggccagttgtacttttagctcccagagggagagttggtggtattatgagttgagtaaaaaccatccaggggaacttgagggagcagtctgttgccagtaatgttccttgtgtgccattaaaccacctccagatgagtggaggaacatcactttttaattttttaattgtatttggaattgttgccgtgtactaagaacttgacctaaataaaatcccacaaagtatattca

SEQ ID NO: 103365 - DNA, 6638 bp, Homo sapiens
  Payload ID: 152
  Gene Symbol: ABI2
  Gene Name: abl-interactor 2
  ENST ID: ENST00000261018
  CDS Start-End: 277-1818
gggaatctttttcgggctcccgggggcggagggaagggagcgcgcgtgcgcgcgcccggccggccgtcgccgcggtgaccgtcctcggagtccgtcggctcgcgccccgcccccgtcgccccctcccctgtcgcgcgctggggctgtttctcgctccttccgagttaccgccgccgtcgccgccgctcctcctctcccggtcctgggtttccttggcgctgcggccgccgctccctctgcgacctgtatgaggaggaggaggaggaggatgtgaagatggcggagctgcagatgctgctggaagaggaaatcccggggggccgccgggccctcttcgacagctacacaaatctggaacgggtggccgattactgcgagaacaactacatacagtcagcagataagcagagagccctagaagaaaccaaagcctacaccacccaatccttagcaagtgttgcctatctgataaacaccttggccaacaatgtcctgcagatgctggatatccaggcatcccagctacgaaggatggaatcttcaatcaatcatatttcacaaacagttgatattcataaagagaaagttgcaagaagagaaattggtattttgactaccaataaaaacacttcaaggacacataagattattgctccagccaaccttgaacgaccagttcgttatattagaaaacctattgactatacaattctagatgatattggacatggagtaaagtggttgcttagatttaaggtgagtacccagaacatgaagatgggtgggctgccgcgtacaacacctccaactcagaagccccctagtccccctatgtcagggaaagggacacttgggcggcactccccctatcgcacactggagccagtgcgtcctccagtggtaccaaatgattacgtacctagcccaacccgtaatatggctccctcgcagcagagccctgtgaggacagcttctgtgaatcaaagaaatcgaacttacagcagcagtgggagtagtggagggagccacccaagtagtcggagcagcagtcgagagaacagtggaagtggtagtgtgggggttcctattgctgttcctactccatctcctcccagtgtctttccagcccctgctggctctgctggcactcctccccttcctgctacttctgcatctgcccctgctcctcttgttcctgctactgtcccttcctccactgccccagacgctgctgctgggggtgcccagacccttgctgatggcttcacttctccaactccccctgttgtttcttccactccccctacaggtcatcctgtacagttctacagcatgaataggcctgcctctcgccatactcccccaacaatagggggctcgttgccctatagacgccctccttccattacttcacaaacaagccttcagaatcagatgaatggaggacctttttatagccagaatccagtttcagatacaccacctccaccgccacctgtggaagaaccagtctttgatgagtctcccccacctcctcctcctccagaagattacgaagaggaggaagctgctgtggttgagtatagtgatccttatgctgaagaggacccaccgtgggctccacgttcttacttggaaaaggttgtggcaatttatgactatacaaaagacaaggaagatgagctgtcctttcaggaaggagccattatttatgtcatcaagaagaatgacgatggttggtatgagggagttatgaatggagtgactgggctttttcctgggaattacgttgagtctatcatgcattattctgagtaaagctcagcagggctgtgcttgcctcacaggaatagtcaggtcttcccagattatctgaaggccctggggattccactccagtaaagtagaatgaaggatacaaatgataaaaattacacttttttttttggtttattccccagtattaaaaacaaagcaagctgagtctgaacaaatggatctttctgccatcatttgtacaatgctgagctgtctggattgaaataaaatgaccatttttatgtatgtcaaaggtataacagcataactgtgtagccaaaacaaaatcagattaagactgattcagaaaaatctgggatctttctcaggaatactgtatacccttgggatttctcctcctgcagaatctgtggcattggatgttcttcattgcctgtgctaaggggttaacctcatggcccagtgggtaccctagccccttcttttcttccacttgtatgaagaggagggaaccaacatttaaataccacacttaaccatttttacaattatttcagatggcttttttcctctgtgacactgtaaattctgcattctctcagcacttgagtgcaccaaacgagtgaatgctgaactcacttgcatcccttcatgtttctgtttgtggattataaggatgatgaaatgtgaaagtctcccaacactctgagggtggtgaacgattgccacccgtttgattttaatgtgctgctgcatgagactgcattgttgctaatggccagtgtacccagatgtgaagtgtggtaggctggttcatatgtggaggtgggtgtgtgaagctagacacgaaggtccctaaggttctgaagagacttgaactgtggaaatgctcttagcaggcatcccgaacccctgcttcggtgctgttttgaggagtaggatcttggagttcagaccaactatgactatcatttccttcactatctagaaaaacgctattctactttggaagagaatagtagttattttcaagtctcctgacagtcactgggagtacaaggtttgctaatgtgctctctggacgttattaatggccagtattagttgctgctgtattactgactcgcttagctgtagaaagggtaatactctcctgattttgtatgattggactcttaagtagctgctgttagtcagaattaaaacccatctcagactaagaatataatgaataagattaataggccaaaatatgtatctaatcacattgataaaaattaatataactgacacaataaaacacatttcccccatctgtacaataaatacagcttcaaattcagtggagtctgtagggcagataactttaatcatcactactgtagtcagtataagaaatgctgaaaaaaatccaggagggcttgtctctttgtgggtggtcactgtgatgttgggccagctcctgttcaggtccagagctgctaacgtgggttctactcagtcccagtgacttggccagaatagagctttgccaggtaactgccctgtgctaggtgaaaggggaaaagcagtagctggatatatttcaaatgaggttttgaacaagttcagaaagtggaacttgattgaaaagtgaacaagtgtagtagtgtgtgagaaaattcagatggtgtcggatgcagaagttaatattccacttaatgttatctgagcattaaaaatcatcagcatttaactgagaccccactatagagtttccttatcaagactttttggttttaaagttgtttttaatgcattgcaagttacaatagctattttgcttttagatttttcccagcactttgtatttattagctttcattaacttgcctccagtatacattccacttcgtgcttttcttaggtcatttctacatcccttattccttgttttcctgcagtgtaatggccctgaatgtcctctgagccttcagctccattatggacccaaactagactatacttggataagttaagctcttcttcgtgtactggtctataattagaaaaactgttttaaattagatgttcccattatttatttaaacagctttttgctgagaaagcttagtggattaatgaggcagagggtgttttgaaatccaataaatagttcccacaggctgggtgtggtggcttatgcctgtaatcccagcactttcggaggccgaggtgggtggatcatgaggtcaataaattgagaccatcctggccaacatggtgaaaccccatctctactaaaaacacaaaaattagctgggcgtggtggcgcacacctgtagtcccagctacttgggaggctgaggcaggagaatcactggaacctgggaggcagaggttgcagtgagccgagattgtgccactgcactccagcctggtgacagagcgagactccatcaaaaaaaaaaaaaaaaagttcccacagctcaccactacagaagcagggaagacaactatgcagaaaacagagttagtggcggtcagcaggaatgcagctggtcttttggacccctacgggatgggggcagtgcagaagacactggtgaagtcctttatactgaagacctgtggttgggagcaggggtagtccatgggtctgctgattttttttccctatttagtactaatgtgtgtgtgatctttgttttacaaacagtaccttttgggttttctgcatattttataatttttgtacagttttgaattctatagattgtcttggaaggatactgtgtgatgggtcaggcacacagtaattggagacttttaatgtatgtaatatttcatagattgcatgctattaatcatctgtgagggtagtattttttgttttattgtaagtttccctctttttttataaattaaaagatggttggtattaggaatttcaaatgaatgcagaaaatcttacatgctgtgtactattaatattataacagacgatccaagtccaaaatctgaccaataaagcaaccattttatcaagatagagggattctaatgggagaggggattcttccctcctgaagtttgtgtgtccagtccccttaaaaaaaatgaatagttgtcttttcttgtcatattaatactcgaaagtccatggtggtattaatgaaagtacactttattgttgcctttgaacttacggccaaggcaataaatcagaaacaaaaatagtgccaatgtgtcaaaatcgacatctgagagattcagcctcccatttggaataaatatgaatcttctaagctatcttgtttaatattttccatcatttagctacttcctatctccctcagaggcgcctgctgttcccattttagagttgacagtggcctgctaattttgctatgttcctaaaagttactgggtgtgagacattttcatcccctcctttttcctactgctggtgtttattatccagctagacaatattttatgcatatttaccgtgatgtctggaccgtacctgtgctccttggcagtttatgttgaagataactaaagatttttctctttgggaggcatcaaaatgatggtagtttgcttttatctttttatgttcattttcttttagtaggtgacctttctgcattaagaactgtttttatcttttactaccttttcttttctcctttgtggagacagcatgacatgtcctgaaggtcacctttgcctttgaaaaaggtttgatggaggaattcacaggtgactgacaagtctttgaaaagaatgggatctgctcacttctggtctttttggccgggaactcctgattggtgttaaggtggtaatttcccccatataagatttagaatcactgagtttgagctagatgaaatttttaaaatttctggttgtctcattagactgatgaggtgagttttcttcttcatatgaacagctagttaataacagcagagttctcactcagtgctcagtacttaattttccactgcaccacaactgtcttaactaaatgtgctgtatttttctttaaaagttaagagttctatttggtgttttcaggaatatacgtgaaaagacatgccatgttttggtaaataccatcagagttgtgtaaaggcgtgtactaagtgcaatcttaatttgtggaaataatcttcatttacccctcctaaaactacactcagtataaacactttcccataaggtgtgtgcagtaaaaatgttatattactccaacactggcaggagcacagcacagcagccttattggagagagccttataaaagtgattaaatggaggcattgagctcattacctttaagtttactttgtgctgacctttgttcctgttttgagaatctcatataattattaaaaaaaaaaaacaattaaaacgaaacggcggggcctagctgtgtataaatgatccttgctgaatatcttaaggttttttgtaagaaaaaagaaaaaccaacaaaaaaagcttattttcacattaaaatgaaacctcttttgcaacttaagaattctatggaaaagcagtttttatcatattttgtgtccatgcaccatttttcttaaaatggcttacaaaaaagaatgtaaacaatttgtgatctggccagttgtacttttagctcccagagggagagttggtggtattatgagttgagtaaaaaccatccaggggaacttgagggagcagtctgttgccagtaatgttccttgtgtgccattaaaccacctccagatgagtggaggaacatcactttttaattttttaattgtatttggaattgttgccgtgtactaagaacttgacctaaataaaatcccacaaagtatattc

SEQ ID NO: 103366 - DNA, 22209 bp, Homo sapiens
  Payload ID: 152
  Gene Symbol: ABI2
  Gene Name: abl-interactor 2
  ENST ID: ENST00000295851
  CDS Start-End: 297-1838
ccggcggcgcgggcgagggtgggaatctttttcgggctcccgggggcggagggaagggagcgcgcgtgcgcgcgcccggccggccgtcgccgcggtgaccgtcctcggagtccgtcggctcgcgccccgcccccgtcgccccctcccctgtcgcgcgctggggctgtttctcgctccttccgagttaccgccgccgtcgccgccgctcctcctctcccggtcctgggtttccttggcgctgcggccgccgctccctctgcgacctgtatgaggaggaggaggaggaggatgtgaagatggcggagctgcagatgctgctggaagaggaaatcccggggggccgccgggccctcttcgacagctacacaaatctggaacgggtggccgattactgcgagaacaactacatacagtcagcagataagcagagagccctagaagaaaccaaagcctacaccacccaatccttagcaagtgttgcctatctgataaacaccttggccaacaatgtcctgcagatgctggatatccaggcatcccagctacgaaggatggaatcttcaatcaatcatatttcacaaacagttgatattcataaagagaaagttgcaagaagagaaattggtattttgactaccaataaaaacacttcaaggacacataagattattgctccagccaaccttgaacgaccagttcgttatattagaaaacctattgactatacaattctagatgatattggacatggagtaaagtggttgcttagatttaaggtgagtacccagaacatgaagatgggtgggctgccgcgtacaacacctccaactcagaagccccctagtccccctatgtcagggaaagggacacttgggcggcactccccctatcgcacactggagccagtgcgtcctccagtggtaccaaatgattacgtacctagcccaacccgtaatatggctccctcgcagcagagccctgtgaggacagcttctgtgaatcaaagaaatcgaacttacagcagcagtgggagtagtggagggagccacccaagtagtcggagcagcagtcgagagaacagtggaagtggtagtgtgggggttcctattgctgttcctactccatctcctcccagtgtctttccagcccctgctggctctgctggcactcctccccttcctgctacttctgcatctgcccctgctcctcttgttcctgctactgtcccttcctccactgccccagacgctgctgctgggggtgcccagacccttgctgatggcttcacttctccaactccccctgttgtttcttccactccccctacaggtcatcctgtacagttctacagcatgaataggcctgcctctcgccatactcccccaacaatagggggctcgttgccctatagacgccctccttccattacttcacaaacaagccttcagaatcagatgaatggaggacctttttatagccagaatccagtttcagatacaccacctccaccgccacctgtggaagaaccagtctttgatgagtctcccccacctcctcctcctccagaagattacgaagaggaggaagctgctgtggttgagtatagtgatccttatgctgaagaggacccaccgtgggctccacgttcttacttggaaaaggttgtggcaatttatgactatacaaaagacaaggaagatgagctgtcctttcaggaaggagccattatttatgtcatcaagaagaatgacgatggttggtatgagggagttatgaatggagtgactgggctttttcctgggaattacgttgagtctatcatgcattattctgagtaaagctcagcagggctgtgcttgcctcacaggaatagtcaggtcttcccagattatctgaaggccctggggattccactccagtaaagtagaatgaaggatacaaatgataaaaattacacttttttttttggtttattccccagtattaaaaacaaagcaagctgagtctgaacaaatggatctttctgccatcatttgtacaatgctgagctgtctggattgaaataaaatgaccatttttatgtatgtcaaaggtataacagcataactgtgtagccaaaacaaaatcagattaagactgattcagaaaaatctgggatctttctcaggaatactgtatacccttgggatttctcctcctgcagaatctgtggcattggatgttcttcattgcctgtgctaaggggttaacctcatggcccagtgggtaccctagccccttcttttcttccacttgtatgaagaggagggaaccaacatttaaataccacacttaaccatttttacaattatttcagatggcttttttcctctgtgacactgtaaattctgcattctctcagcacttgagtgcaccaaacgagtgaatgctgaactcacttgcatcccttcatgtttctgtttgtggattataaggatgatgaaatgtgaaagtctcccaacactctgagggtggtgaacgattgccacccgtttgattttaatgtgctgctgcatgagactgcattgttgctaatggccagtgtacccagatgtgaagtgtggtaggctggttcatatgtggaggtgggtgtgtgaagctagacacgaaggtccctaaggttctgaagagacttgaactgtggaaatgctcttagcaggcatcccgaacccctgcttcggtgctgttttgaggagtaggatcttggagttcagaccaactatgactatcatttccttcactatctagaaaaacgctattctactttggaagagaatagtagttattttcaagtctcctgacagtcactgggagtacaaggtttgctaatgtgctctctggacgttattaatggccagtattagttgctgctgtattactgactcgcttagctgtagaaagggtaatactctcctgattttgtatgattggactcttaagtagctgctgttagtcagaattaaaacccatctcagactaagaatataatgaataagattaataggccaaaatatgtatctaatcacattgataaaaattaatataactgacacaataaaacacatttcccccatctgtacaataaatacagcttcaaattcagtggagtctgtagggcagataactttaatcatcactactgtagtcagtataagaaatgctgaaaaaaatccaggagggcttgtctctttgtgggtggtcactgtgatgttgggccagctcctgttcaggtccagagctgctaacgtgggttctactcagtcccagtgacttggccagaatagagctttgccaggtaactgccctgtgctaggtgaaaggggaaaagcagtagctggatatatttcaaatgaggttttgaacaagttcagaaagtggaacttgattgaaaagtgaacaagtgtagtagtgtgtgagaaaattcagatggtgtcggatgcagaagttaatattccacttaatgttatctgagcattaaaaatcatcagcatttaactgagaccccactatagagtttccttatcaagactttttggttttaaagttgtttttaatgcattgcaagttacaatagctattttgcttttagatttttcccagcactttgtatttattagctttcattaacttgcctccagtatacattccacttcgtgcttttcttaggtcatttctacatcccttattccttgttttcctgcagtgtaatggccctgaatgtcctctgagccttcagctccattatggacccaaactagactatacttggataagttaagctcttcttcgtgtactggtctataattagaaaaactgttttaaattagatgttcccattatttatttaaacagctttttgctgagaaagcttagtggattaatgaggcagagggtgttttgaaatccaataaatagttcccacaggctgggtgtggtggcttatgcctgtaatcccagcactttcggaggccgaggtgggtggatcatgaggtcaataaattgagaccatcctggccaacatggtgaaaccccatctctactaaaaacacaaaaattagctgggcgtggtggcgcacacctgtagtcccagctacttgggaggctgaggcaggagaatcactggaacctgggaggcagaggttgcagtgagccgagattgtgccactgcactccagcctggtgacagagcgagactccatcaaaaaaaaaaaaaaaaagttcccacagctcaccactacagaagcagggaagacaactatgcagaaaacagagttagtggcggtcagcaggaatgcagctggtcttttggacccctacgggatgggggcagtgcagaagacactggtgaagtcctttatactgaagacctgtggttgggagcaggggtagtccatgggtctgctgattttttttccctatttagtactaatgtgtgtgtgatctttgttttacaaacagtaccttttgggttttctgcatattttataatttttgtacagttttgaattctatagattgtcttggaaggatactgtgtgatgggtcaggcacacagtaattggagacttttaatgtatgtaatatttcatagattgcatgctattaatcatctgtgagggtagtattttttgttttattgtaagtttccctctttttttataaattaaaagatggttggtattaggaatttcaaatgaatgcagaaaatcttacatgctgtgtactattaatattataacagacgatccaagtccaaaatctgaccaataaagcaaccattttatcaagatagagggattctaatgggagaggggattcttccctcctgaagtttgtgtgtccagtccccttaaaaaaaatgaatagttgtcttttcttgtcatattaatactcgaaagtccatggtggtattaatgaaagtacactttattgttgcctttgaacttacggccaaggcaataaatcagaaacaaaaatagtgccaatgtgtcaaaatcgacatctgagagattcagcctcccatttggaataaatatgaatcttctaagctatcttgtttaatattttccatcatttagctacttcctatctccctcagaggcgcctgctgttcccattttagagttgacagtggcctgctaattttgctatgttcctaaaagttactgggtgtgagacattttcatcccctcctttttcctactgctggtgtttattatccagctagacaatattttatgcatatttaccgtgatgtctggaccgtacctgtgctccttggcagtttatgttgaagataactaaagatttttctctttgggaggcatcaaaatgatggtagtttgcttttatctttttatgttcattttcttttagtaggtgacctttctgcattaagaactgtttttatcttttactaccttttcttttctcctttgtggagacagcatgacatgtcctgaaggtcacctttgcctttgaaaaaggtttgatggaggaattcacaggtgactgacaagtctttgaaaagaatgggatctgctcacttctggtctttttggccgggaactcctgattggtgttaaggtggtaatttcccccatataagatttagaatcactgagtttgagctagatgaaatttttaaaatttctggttgtctcattagactgatgaggtgagttttcttcttcatatgaacagctagttaataacagcagagttctcactcagtgctcagtacttaattttccactgcaccacaactgtcttaactaaatgtgctgtatttttctttaaaagttaagagttctatttggtgttttcaggaatatacgtgaaaagacatgccatgttttggtaaataccatcagagttgtgtaaaggcgtgtactaagtgcaatcttaatttgtggaaataatcttcatttacccctcctaaaactacactcagtataaacactttcccataaggtgtgtgcagtaaaaatgttatattactccaacactggcaggagcacagcacagcagccttattggagagagccttataaaagtgattaaatggaggcattgagctcattacctttaagtttactttgtgctgacctttgttcctgttttgagaatctcatataattattaaaaaaaaaaaacaattaaaacgaaacggcggggcctagctgtgtataaatgatccttgctgaatatcttaaggttttttgtaagaaaaaagaaaaaccaacaaaaaaagcttattttcacattaaaatgaaacctcttttgcaacttaagaattctatggaaaagcagtttttatcatattttgtgtccatgcaccatttttcttaaaatggcttacaaaaaagaatgtaaacaatttgtgatctggccagttgtacttttagctcccagagggagagttggtggtattatgagttgagtaaaaaccatccaggggaacttgagggagcagtctgttgccagtaatgttccttgtgtgccattaaaccacctccagatgagtggaggaacatcactttttaattttttaattgtatttggaattgttgccgtgtactaagaacttgacctaaataaaatcccacaaagtatattcaggtgtcttgttaacttatttatataaataacctctttttctaaggtggtatcttgagtttacgtgttagggataatctgacttttctgttgctctaaaccagggagctgccttttattactgaagaagtcgtctttttaaattttcaaagatttaaaatgttgagctttaaatttgatctcaagtttcttccctgaagacagctgttctaattaagaactttctaatcctgtttttgctccactcgcacctggggttttcttaccacttttctccaaatctaattctgttaatgtacagtttttttaattcaacagacaaacactgaagatgggtgttgactaaaaaatattgcagactggtcagaagtgaatctaaaagacaaaccactaactagcctgtgctttgttgctatgagagcctagattataaaagaattttctaatgatgtatctgagggtagcaagtaagtttgtcttcacaatacccaaaatgatgtttcagcttttctcacttttcaagcccatcttatttcctctgtacctttattattttggtatcattaggtaaggtgaagaataatgtaggaaacaaatacccagctaaaacatttatgggtttctcgtatttgtgaataggattttaggcgtcagagcagtcttgtcttgtctcaaagatagatagtatccaatcttttgttaataagcctattgcttgacttttttgggttactttggaattacacatttggttgaacggctttgtggatctggggcatatgccaattaaggggcacatgccatgcgttctgttttcctgtcagcctgtgtacactgctgcttctgaaggcataagtacaggtgcagtttccacaaccacgtatgattgacagatggtgaacgaaaggggaaggcttccactttttttgccctagtttggtacataataaagtgattgcaaacacattatacatttatacataccttcacatggcagtccaacacgtaattgtgactccaaagatttgaaacaaacaaaaggcattcctttttgtattactttactttgtacttagttctttgtttaaagaagaaaaatcttttttaccttttttttttttttgagacggagtctcgctctgttgcccaggctggagtgcagtggcacaatttcagctcactgcaagctccacctcctgggttcatgccattctcctgcctcagcttcccgagtagctgggactacaggcgactgccaccactcctggctaatttttttttgtatttttaatagagacggggtttcaccatgttagccgggatggtctcgatctcctgacctcgcgatccacccacctcggcctcccaaagtgctgggattacaggcgtgagccaccgcacccggctgagaagaaaagtctttctttaaaagctgttgtcacttaatcaccaatgtatttaatggccaaatttccctagttggtataaactactcttaaaagttaacaaattgaacatatcaaactagtttatttaccacacttaatttcttctgtgtatggcctatgttttgggtaccctgacatgaaatgcaaaaccagattcttaatggtgccgatccacaaacactcaaagtccccatgtttaaatgaaatctatgaattttttttattaaggatttgataagctgatataatgaaaacatgtaaatgaaaaacatttacactgactgtacgactagtgtgctaagccattacaatagtttactgacataactggcaagagtaacttggaaaataacttaatccagcagaacaaaaacatcctcagaaaaacatcctcagtagtactgaatatatctctctcatatatctatctatctatctatatatatatatatatatatatagctttgcacaatcagggagcaaggcacataatgaaatgagcatacatttatgcagaagaaaataatagcaacaaagctgcgagaaaaattgtaacttcatcttcactgagctgtgcataatcctttgaataataatgtcctctacctggtacattataatgaagttccttgtcttcttcatgctttaaaaaagtatacttctacattgtatctacctatggcaaagctcccacagcctacaagttggtgtgagccttgactcttgttttttaaagaactgagggagggagcaatcccagttaaatataatgtgcaattcccctttaacagtaaacaatgtttttaaaacacttagcacaagctaattttatcttaaatgtacatctctgtaagagttcactagtggctgatagtaaaatgaagcaaaattgtttgaaacattccagttaatgcttattttctagaaggggttattttacaagtagcaaaaaaaaaaaaaaaagtaggaggtggggaaataatatgaaaaacggcagtttttggtattaggttacaataaatttaacgaatggacagtttgcaaaatataagggtttctccccctttagtgctgcagacaagttttactgcctaagacgttgaggctgcaacaatcatgagcttggtattagtagccatccatgataaacataattaattctcaacttaaccatctataaaatatgtagtgttcaccatcaccctgactcaattcacttctctaaatgtctttggtagaaagcagccagaccccacgtgggtagtgatgtctcttgtgagacacttttcatttctgccaaaactagaaataccaccttcctttactttcattagcacctcaaagtttgcttgctggatttctttaaaaatattctgccaaaagagttgaaggcactgggggtttacagcaagtattttctctttaaaacggtttattacttcaacaagcaaagagcaaaccaactggagaaatgtatgttttttctttttatttatcaagttttattctacagctaaatttcagatttcttttacatatagaccttgcaagggcacggtaagaactgagcacttgttttatttgagggataaaggtgtagaaattttctctttgaattttataaggaaaggctgggtacagtggctcatgcctgtaatctcagcattttgggaggctgaggcaggaagatcacttgtggccaggagtttgagaccagcctgggcaacacagtgagacccccatctctaccaaaaaaaaaaaaaaaccttaaaagataataagtatctaattcttttatacttgcatttctctttggatcaaatctcaactttgtgagaggtcatacatttctacagggttaggagtaccctgcataatttatacaaatgtaaagtgtatattaaaaaaaaaaaagtgaaagttacctgcaatctaaagggttttcttcccctagaaacagtcaccctctcgtcaagtgtatgacccaattatacctattttatgaaaagcaaggcatcacattgataaccatacaggatcctatgggtttaactggtctaaacttgagtggattaaatcagttgtaattagttagctctgtaggtatatgaaaaacttttggtaatgtacaaaaataggaatgggttttttacctgtttaaagtcactttgtgtttataacaaaattacttttagctgaggaacaaaggtgacaaagatttctgttggtggctgagagtcaaagcaggccaatccacaccattacctgaaatatttttcaggctaatttataactttatggatttcctcgatacaagtttattagtttattctccatatacaagtttattctcccagaatagcagcaaataaaacttgaattggatgtacagctcctaataaccttgatgtcagagttgtcacttggttggaattattatgatcccccaatttaaattttcttgataaactcagcgttgtttgttttcagtgacaagaaaacatacatggaaaggggacccaagacagttcaccaagatagttcacagccctttgcaggatatgcctttggtgggtgggagcacctagattttagaggactataaaacgccatgtttactttgtttgaaattttctgatgaaaagtcttttgtaacttaacattccacattttcatttaaaaagtcccagaaatataaactatccaatttacaactaaggtgggtatctgtaaaaaccttaagaatagttactcttcccaagagaattacagcgtctaagggggggaaagaaagcatctgagcagtaaaagtcaagctggtaaaatccaatacagaatatctaataaaccataagttattttactgagaatagattctgctgccctacagcattggtgccaaaactctaagcatagagtgattctactttgaaattatccatagtagaaattaggagtgtcactaattaagcaagtcactacctctaataagcacctgtttgcactgccctcagcagcaggatgagttaatccatgctgttcacttttcagtacagccaagtcaactgcacagacttgaagcagccaagctgggtgagagctgcagagcagagggcagtgaaagaaggcacagtactagtgtcgtgcggcagtagatgctttccatgaatacaccagagaaaaagagctacagaaatacagtctaggaaaagctacatcccaacaaaaatccaaattaaagaaaacccactagggagtaaaacagaagtataaagtatcactttagtggttttttaaattcagttcatacatgaggttaaaacatttttaatagccatttctgtctgtggaggaatgtaaagggaaatggcctgttgtcggacaagccactggactggggttaaaatgagtctcctcctctagccttactctcttcctggcatcattagtgttcaaaaggatgtctgctattccaggaaaacagaccagaagcatctgttcaggatggctatcatcaggattgatacaagcaagaaattccaagaaatcctgcactgaaaacataaaggctgttgttttagggctcaaatcatgggtgaaaaaaggttagcgggtacattttttccccctcaagaaaaactgaagtgttgtctaccttctcatgagaaaatcaccaccacaataaaactcaaaacctcagggatgaatactttgataactggattcatattcttactaactctaacccacaaatatgggtgcccctcaaactataaaactgcaggcagaagactatgagaaattcattcatgaatcacagtagcgcttggcaatctactcaaacattacccaaatttctgtgcatgcttaaattaacaatgcagatgtgttaaagatcacttcataaatatcaaacacaaaacttggtgaacaatttgaaagacctaaaaattaatggtatatattcttattgctccataaccacatgaacataaccgaacaatattctggagatgtagcaatggagaggtgctgttcactctctgtttacgatgcggttttcgtggagtgtgggttatgcaagaccttgagtatactgtactaattaagcacttttgctcattctagaattatttaccatctcttcccccactttactggcatcactttttccttgtgggacaatgtcaactgatttctgcagtttgcattggtaatcattaacaataggcacagactttcattacaagatgtgctccccttataagtgctgggatggcccatttttattctcttgtttaggagctgctctgagattgttttattcctaatagtccaatttatcataagttgatgagagtacttatttctctcatgtaccaaggaaaattcacagaaaaaagcatatagaagtatagtgtgtcgttagagcactgactccacgttataccaaactgcacacgcataaaacgtaatgtcagttactggacttggactgtcccactccatcagaacacctagtaacctgaactaatcacaaccaggctgcagtcagcaagggtcctggtagccccagtagctataaatgaaactgtcttccctctccatgtagtcccatacttaatgagctttttgtattacatattataacccatatacaaccagattaatgacacctgtacaggggccagttctgttctctcatcacccttcccttctatagagcaatgctcaaaaaatgcattttagaaaatgattttgtttttcataatgcaccatattggggcacaggatgtgtatatttcatataccaattgtctacagatatgtaataacacctacctaaagcacatattttaagaaggtaactggtgacccaaagacatactgggacagaacattacagagataactgtgttatccatcctcttaaaatcaatcaaagtgaggatcatgaagccaagttgataaagcttcataaaacagtactaaaaaggaactatccagaattatagcactaattatccatgtattgtaggcaaagagcttatctgtcagcacatcctaaatgtgggtggatcactgcagcagtactgcagctagaacagctgagttaattacgccatgtatttactttctatgcacaaccacatacagatgatgtctgtgaacatttccccatcctgcactagttacccgttctatgaagctgagagattttcctgatttaaagtgccccttcatgtatagcaatgaagtgtcagtcaagcaattctaacttcagccaactggggaaaaacaaacacaaaagccttatagatacaccaaacattctggtgatttttctcaaccagaaatagcacattctacatctattccttagttatataatacacaacatgcacgaataggctacacatggacagacacttataaataccttctaaataagtgattagaagtttttggtccaatccacatgatatagaaatcttaagagacaacacacatccccttctatgcctcttccacccaaaatacagaacacccattttcagattaggagagaaaaggaataaatagaataactctcagctctctctctatatacacatacacatacatatatgtatacatatatacacacactgtacagctgtgtgtacatgcacgtgtacacacacacatacacatatagctggacactacctgaataacatcataccaggaggctctgaacacctgaattcacagatgatcaggtgagctgattgtagcagtgattacagatatcatgaaaataaagtcctatggtggctaccagtctctggagagcttggtgttctggtctcttttggggggagcaggagggggtcctctccgcaacgttgcatagcctgatatatgactgcctccgtaaccagccttctgttgatcagacagcagttcagggggtggtggaggcaatgccatatcatccatggtggctgttggttctgctctggacatgcgggaggagagtgagccgtgccgagtgatggactttcgttgcagtgtcctgttgaggtcagccaggaatccaggctggacactaaggctggatttgggagaggtgggcacttgtggcacaactgtggccattgttggctgctcagaaatctcagcttgagtgaggcgggtgctatcattccgtttgggtcgtgtgggtggaggggccttcttcactgacattttagaccattgttgtggttgaggattaacgactgccacttttggagaggtgtttcccgagaaaactgctggaatctcaatggggggcagaggaagctctgtttcaggtggagggggtggaaaatcagaatcggatggaggagaaggaaattccaccacggagtcctttccacgcccactcagaacaggggcttttgctgacacacacccttgttggagaactccaggaaggttgactccagaaagattgagttttccaggcttggggggtgctgcaggaggtggtagggtctccttgctgggagaccctgattctgctggcggtgtaaacttgctgactagactgtccaccgagggtctcttgggctcggggtgctctgcaccactgctggatttaatgctggagttgcgctgtggggttgggggtggtttctttcccccagggctggacgtcttactggtctttttgcctggagatccacttttgtcaggggtaggagaagctgtgggtggaggtggtggtggtggggctgggacaggtgatgggggtggaggaggaaacaccaggctgctttcaggagggggaggagggaagtccggagaagggactgggatggagctgggctgccacttgggctttgcttttactgcaggaggggactgtggagctacatttgctgggacaggctttaagggctgagattccatggcagggggagttggagggggtggaaactggctggctatctgcttcacgaccgagggcaccggtgacagtggagagggagggggttttgcacagaagctctgttgcttgggtaatgttggcgggggtactggaacaggaggggtagggggagagggtggaatgtaagaagcagggaaagctggctgcttttttgctgggggcactggaggagtaggtgtgggtggtgcagcttgagtcacaacaggtgccacagtcttggtgctggttggtgcggggatggtcacaaggggttttgggggagcttggggagggaggggtgcagggataggaggaggtggggggggtgttgggggagccacctgagtaatatgctgaacttgatggatcttcagtggaggaggcggggcactgaactgtggaagggatggggcacacggtgcaggctttagctgggccatggcagagcctggggttgggggtggaggagggggagggggtggtggaacaactccattggggggtaccaggatctgaggcttcactgactgtgactgcatcactgggggtgttggcggcttaaacagggcccctgaatgctgagacgcattctgtagccgtgttattgtgctgtacttgacgaacattggggctgctgagcctgcagaaggtgcagactggctggggagtgggggaggagggggtggtggagggggtggtggaggaggaggtgggggtggcggaggaggtagaggtggtgaaggctgtgaagcagtgtagggggtgactatcttaggttgcggggataaagggggcacaagtgaagtgtagggccgattcatagactccattctggcctaaaaggagtataaaaagggagtgggagagagaaaaacacaacaaacaaaacagttacagaggtaagctttgattgtgtaaaactaaaaagcagggagtctgggacatgcatgaaaaggatgcagaagttggtggtgatcataaagatggacaatgtcaggaaggctaaaatctgattgtgcgggcaagaaggaaacagaaaacttgttttaccccacagtaaaatagctagaccatctaacaatctaggaaaaatgtccggctgcaaaagctgtttgaatggtgacaggatgcatgacttctgaccttggctgtatgactttgacacagcctgccctacatggaaccctctgtggcggtcctctgagcactggacttccaaggggagatgtgatggctccagtttacctttcagtccatgactgcatccacatcaagcagatgctataactgggtttaggagggcttcctggtggaatgaggatggctttttgatgctagtaagctgacacaggagagtatgagaatgttgagcaggcgtgcacagtcacacaggaatgaataagcttgacacacacactcgtgttggtgtgagacaattgcatccaacatgcacagaagtccagcaatgcaggtaaaggggggacattctttacatttgttttactggaaaatacataaagaaatgctttgtaaacattatagcaaaagactgtaaaaatatcatacagaaaaagccagaagaaattaagaggaagctctggaaggctagaataaagaaaatgtatcaagaaatggcagctagcatttgccaacaaccaacccatctgggtagctgaaatgatcacatctggtagtttatttcgtggagctaatcatgcacgatggtggttcaggtactttgaaaagaggaaaggaaggacccttgttttaaaaactttaggtacatcttttaggctctttgaacaaactttgaggatccaagataaaccatttgttttcaattttgaatgacatcgagaatgcatgggttagtgaactagaaggctcattatagggctgaattctaatagccatccggacattcacatgtttcttttaaaattacacaaaaagattagtctgtgagattgggatacaggcgtcaccgaggttaatgtgtttccagagaacaacccctgaccttaacttgaccctgtcttggctgcttcaggggcgcaggccttagctgtgctggccttctcatttggcacctgagactgaggtaacaggagaagaaatacagagtgatcaagccttaaagcattactgctgacagcagggttcctactcttctgaaactctgtgcaataacggactttgctgcttaatcacagaacattttgggtctgtgattttgttttccttggccttacacataactaggttctataacttaaaatgcacacggatctcaccattagtaatttggtaaggcaaaggggtttttctttagccatccgaattctgtaaaccaacttctttagtacatttttaaaatactagctccatccaaattgattaaatgggggaagggagagagaaattatttcttaaaagtttgagtctctaataagggagttaaactcagtgttttgagaatttagatcgttagaaccaattctcaaatgctcatttctgaaggaaagggcttcagccccacatggtgctactaaggccttctcttccctgcgggagcccagttagtgaaccacatatacgaatgaaggaataaaaggaaaaatgtccatttattctcattcgtgaatgtacctgtataagtgattcagaccaaaagcaccccccaccaaaaaattaaataaataaataaaaacaattattagtaaaaataaaatagttgagcccagggtgccactggttcctcaatgatggagtgacctcttgcatattgaaatggtgactacagccaggacacatccttgcctacacaactacagatgatgtctgatagaaggccatgatgtctttcaaatgaactgaagaacctctctattttcctaattatagtcttgcaataactatactcatccttcagtctcactgcacaatatactatgcaaggctcaggaatccaaaacttttaagggaaatgattttaatttagtcttccacataaagtataatttgaaaaaattcatcaatgcccaaagaaatggcaaaagcattaaaaaaaaaaaaggtaaggaatgagtctgaataaattaaccaataaagaaataactggactgaatatggtggctcatgcctgtaatcccaggactttggaaagccgaggcaggaggatcgcttgaggccaggagttcgagaccagcccaggcaaaatagccagaccttgtctctaccaaaaaataaaaaactagccaggcatggtggtgtgcacctgtagtcccaactactcaggcaactactcgggaggctgaggtgagcaagcaggctgaggtgggaggatcatttgagcccaggaggcttaagtgagccctgataacaccactgcattccagcctgggtgacgggaaagggagagggagagggagaggaggggatggggagaaggaaggaaaggaagggaaggaagggagagaaggaaggggagggagggagggaagtgaggggagggaggaaaggagggaaggaaggaagaaaagaataaaaaagaagagaaaaaaagagagagagaggctgggcacggtggctctcgcctgtaatcccagcactctgggaggctgaggcaggtggatctcgaagtcaagaggttgaaaccatcctagacaacagggtgaaaccctgtctctactaaaaatacaaaaattagctgggcgtggtagcatgtgcctataatcccagctactcgggaggctgaggcaggagaatcgtttgaacccgggaggcgaaggctgcagtgagctgagatcacgccactgcactccagcctggcgacagactgacactctgtcaaaaaaaaaaaaaaaaaaaaaggaagaagaaaaaaagacaggaaagaagagagagaactgtaaacagcttctctagaatttagggcatttgcaatagatggtgttttgccatccaaactgcttaaaggtggaaaggaagaaattgttatttcttaaaaatctgagccactgatgaaagaattaaactgccagttttttttgtttttttgagattttaagtcattagagccaatttgtaaaatactcatttccaaggggaagtcaaatcaacaggtctctctgaactgtctttacccactacaattaggaagattgaaaattaataaaggagactgaaataaggccaaataagatccccgataaagacataagagagcaacaatttaaacccaaaagaataccacagaattttcaatgtaaattaaaacgaagctgttaccttgctggactcttccaactgagtgcctcgtttccaggcttcagagaatacggagctcacaatgctctgggaacggacgtgtcctgctggctgggtgtcagaaactccgctatcagactgattggagtggtttgactgagactctgtttaaaatagttttttaaacataggtttaaaagagtcagtattctgacaatattcatatgtatgtctagttagatcttttacacaaggtcaagtgctgtgtacaacagcaccaagttattttactcatttcatcataaacacagccagtattttctactagaaaacttcccttaccttggaattaagaaatctcagattagtgttaaatatttcaccatgagagactgataattataataaatgattcacataacattattggtatcctgacacccagtcttgcatgaaatcaactctaaacaataaaagaattaatgaaccatcagtagaggagtctctcaatcatgtctgcattacattgagaatcagcctttttaatacccctgccttaaggtcacgccagaattgtaacttaggaattcggatctatacacaatgattatttccttttttctagcaatgagcaatacttagaatttgaccctctagtgcgaagtgtgtttcctagggatttaggtattggacccatagggtggcagctgtgctgtatcctggcctgtcagcaaggcacaaaaaagttttgaaaggagtggggcctggtgggaatggctgtgagcatacagtgtctctttgccgcctgagcaaggaggctgaggtgggaggatcatttgagcccaggagagttaagtgagctatgataacaccactgcattccagcctgggtgatgggagaggaaggaaggaaaaggaaggggaaccatgttctggaagggttgttggttggttttttttccccattttaataaatattttcttagaatagttttaagatatctacatattagatatttgaatattagaacagttttagcacagaattcctacatacccggcatccagtttacccatttagcaatatgtttggttttaaagaaattctcctttggggaaaaagtgtcctcttttaattttattcccttttccccattattaacatgttacattactatactacatttgtcacaactaaggaaatgtcctgctactattaactacgctccacactttatttggatttcactagtttttccctcatgtgccttttctgatccaggacaccacgtcacagttagtcatcatgtctcctataacggcttctcagaatttcctgtttttgatgacttagacagttttgaggaatagtggtcaggtatcttgtagactgtctctcagttttggtttgtctgatgctttttctcttgattagtctgtttatggaacttggggaggaagatcatagaggaaaaaagccattctcacacactatgtcaaaggtccctataaccaatgtgacttagatactgaccttgaccacatggttgtggcagtgtttgtcaggtttctccactgtgaagttacccctaatccccgttccataatcactggaagcaagtcactaagcacagtccacacttgaggacttaggtaagctctacttccttcaggacaaagtgtcttcataaatcatttagaaatctacacaggacagttctctcctcttccccatttatttattcaatgatttatttacatcagtataaactcatggatatttatgtccatgggttacaatcctatactatattacttattgtattgctcaaattgttccagctttgacctttggagctctttcagactggctcctctgtgtatccctttgacatattctcatcttgtgttttgtgagacagggtctcgttctgttgcacaagctggagcacagtggtgtgattatagctcactgcagccttgaacttttgggctcaagcaatcctcctgcctcagcctcctgagttgctaggactatgtgtactactaagtctggctaatttaaaaaaaaaaaaaaaaaaaagttgtggagatggggtcttgctgtgctgcccaggctggttttgaactactgggctcacgtgatcccttaacctaggcctcccaaagcattggcattacaggcgtcagccactgtgcctggccctactgtcgttttttaagcattcccttactttctggcattacaagatgctctaggctcatcttgtatatattctctgctgcagccctataatttgccatttctttgagagccttggttttcttttctttcttttttttttttttttttgaagaatggtattagaaaccatgatctatttaagcagcatccttggccaaaatttaataaaacgaaaaaacaaaaagaaacctctatgatctagggactgggtattctcattgttcctggggtatcactgcttctagtcctcagtggacagcactaggaaatgtatgtgtatatacacattctaaatttgtttttacttaatagagatgaaatagagtcatgcagcttttaaatatactactaaagttattatttctttcatcacatccaatgcaaaaatttaaaaattctgcttttagatgacatggatctcattcatgaaacattttgaattgaaagaagatttatgttaagatgtaatcatagcatgcacttgtttaaaggatataggaatctgaaggagtgcagcttcttcatggtttctgagtacaaagattctttccaagtaatgttttatcccaaattatgcattaacagtgtccagcagtatgtatgttttgaataaattttataaatataaataa

SEQ ID NO: 103367 - DNA, 2240 bp, Homo sapiens
  Payload ID: 152
  Gene Symbol: ABI2
  Gene Name: abl-interactor 2
  ENST ID: ENST00000424558
  CDS Start-End: 121-1644
cttccgagttaccgccgccgtcgccgccgctcctcctctcccggtcctgggtttccttggcgctgcggccgccgctccctctgcgacctgtatgaggaggaggaggaggaggatgtgaagatggcggagctgcagatgctgctggaagaggaaatcccggggggccgccgggccctcttcgacagctacacaaatctggaacgggtggccgattactgcgagaacaactacatacagtcagcagataagcagagagccctagaagaaaccaaagcctacaccacccaatccttagcaagtgttgcctatctgataaacaccttggccaacaatgtcctgcagatgctggatatccaggcatcccagctacgaaggatggaatcttcaatcaatcatatttcacaaacagttgatattcataaagagaaagttgcaagaagagaaattggtattttgactaccaataaaaacacttcaaggacacataagattattgctccagccaaccttgaacgaccagttcgttatattagaaaacctattgactatacaattctagatgatattggacatggagtaaaggtgagtacccagaacatgaagatgggtgggctgccgcgtacaacacctccaactcagaagccccctagtccccctatgtcagggaaagggacacttgggcggcactccccctatcgcacactggagccagtgcgtcctccagtggtaccaaatgattacgtacctagcccaacccgtaatatggctccctcgcagcagagccctgtgaggacagcttctgtgaatcaaagaaatcgaacttacagcagcagtgggagtagtggagggagccacccaagtagtcggagcagcagtcgagagaacagtggaagtggtagtgtgggggttcctattgctgttcctactccatctcctcccagtgtctttccagcccctgctggctctgctggcactcctccccttcctgctacttctgcatctgcccctgctcctcttgttcctgctactgtcccttcctccactgccccagacgctgctgctgggggtgcccagacccttgctgatggcttcacttctccaactccccctgttgtttcttccactccccctacaggtcatcctgtacagttctacagcatgaataggcctgcctctcgccatactcccccaacaatagggggctcgttgccctatagacgccctccttccattacttcacaaacaagccttcagaatcagatgaatggaggacctttttatagccagaatccagtttcagatacaccacctccaccgccacctgtggaagaaccagtctttgatgagtctcccccacctcctcctcctccagaagattacgaagaggaggaagctgctgtggttgagtatagtgatccttatgctgaagaggacccaccgtgggctccacgttcttacttggaaaaggttgtggcaatttatgactatacaaaagacaaggaagatgagctgtcctttcaggaaggagccattatttatgtcatcaagaagaatgacgatggttggtatgagggagttatgaatggagtgactgggctttttcctgggaattacgttgagtctatcatgcattattctgagtaaagctcagcagggctgtgcttgcctcacaggaatagtcaggtcttcccagattatctgaaggccctggggattccactccagtaaagtagaatgaaggatacaaatgataaaaattacacttttttttttggtttattccccagtattaaaaacaaagcaagctgagtctgaacaaatggatctttctgccatcatttgtacaatgctgagctgtctggattgaaataaaatgaccatttttatgtatgtcaaaggtataacagcataactgtgtagccaaaacaaaatcagattaagactgattcagaaaaatctgggatctttctcaggaatactgtatacccttgggatttctcctcctgcagaatctgtggcattggatgttcttcattgcctgtgctaaggggttaacctcatggcccagtgggtaccctagccccttcttttcttccacttgtatgaagaggagggaaccaacatttaaataccacacttaaccatttttacaattatttcagatggcttttttcctctgtgacactgtaaattctgcattctctcagcacttgagtgcaccaaacgagtgaatgctgaac

SEQ ID NO: 103368 - DNA, 2718 bp, Homo sapiens
  Payload ID: 152
  Gene Symbol: ABI2
  Gene Name: abl-interactor 2
  ENST ID: ENST00000422511
  CDS Start-End: 32-1474
gtatgaggaggaggaggaggaggatgtgaagatggcggagctgcagatgctgctggaagaggaaatcccggggggccgccgggccctcttcgacagctacacaaatctggaacgggtggccgattactgcgagaacaactacatacagtcagcagataagcagagagccctagaagaaaccaaagcctacaccacccaatccttagcaagtgttgcctatctgataaacaccttggccaacaatgtcctgcagatgctggatatccaggcatcccagctacgaaggatggaatcttcaatcaatcatatttcacaaacagttgatattcataaagagaaagttgcaagaagagaaattggtattttgactaccaataaaaacacttcaaggacacataagattattgctccagccaaccttgaacgaccagttcgttatattagaaaacctattgactatacaattctagatgatattggacatggagtaaagtggttgcttagatttaaggtgagtacccagaacatgaagatgggtgggctgccgcgtacaacacctccaactcagaagccccctagtccccctatgtcagggaaagggacacttgggcggcactccccctatcgcacactggagccagtgcgtcctccagtggtaccaaatgattacgtacctagcccaacccgtaatatggctccctcgcagcagagccctgtgaggacagcttctgtgaatcaaagaaatcgaacttacagcagcagtgggagtagtggagggagccacccaagtagtcggagcagcagtcgagagaacagtggaagtggtagtgtgggggttcctattgctgttcctactccatctcctcccagtgtctttccagacgctgctgctgggggtgcccagacccttgctgatggcttcacttctccaactccccctgttgtttcttccactccccctacaggtcatcctgtacagttctacagcatgaataggcctgcctctcgccatactcccccaacaatagggggctcgttgccctatagacgccctccttccattacttcacaaacaagccttcagaatcagatgaatggaggacctttttatagccagaatccagtttcagatacaccacctccaccgccacctgtggaagaaccagtctttgatgagtctcccccacctcctcctcctccagaagattacgaagaggaggaagctgctgtggttgagtatagtgatccttatgctgaagaggacccaccgtgggctccacgttcttacttggaaaaggttgtggcaatttatgactatacaaaagacaaggaagatgagctgtcctttcaggaaggagccattatttatgtcatcaagaagaatgacgatggttggtatgagggagttatgaatggagtgactgggctttttcctgggaattacgttgagtctatcatgcattattctgagtaaagctcagcagggctgtgcttgcctcacaggaatagtcaggtcttcccagattatctgaaggccctggggattccactccagtaaagtagaatgaaggatacaaatgataaaaattacacttttttttttggtttattccccagtattaaaaacaaagcaagctgagtctgaacaaatggatctttctgccatcatttgtacaatgctgagctgtctggattgaaataaaatgaccatttttatgtatgtcaaaggtataacagcataactgtgtagccaaaacaaaatcagattaagactgattcagaaaaatctgggatctttctcaggaatactgtatacccttgggatttctcctcctgcagaatctgtggcattggatgttcttcattgcctgtgctaaggggttaacctcatggcccagtgggtaccctagccccttcttttcttccacttgtatgaagaggagggaaccaacatttaaataccacacttaaccatttttacaattatttcagatggcttttttcctctgtgacactgtaaattctgcattctctcagcacttgagtgcaccaaacgagtgaatgctgaactcacttgcatcccttcatgtttctgtttgtggattataaggatgatgaaatgtgaaagtctcccaacactctgagggtggtgaacgattgccacccgtttgattttaatgtgctgctgcatgagactgcattgttgctaatggccagtgtacccagatgtgaagtgtggtaggctggttcatatgtggaggtgggtgtgtgaagctagacacgaaggtccctaaggttctgaagagacttgaactgtggaaatgctcttagcaggcatcccgaacccctgcttcggtgctgttttgaggagtaggatcttggagttcagaccaactatgactatcatttccttcactatctagaaaaacgctattctactttggaagagaatagtagttattttcaagtctcctgacagtcactgggagtacaaggtttgctaatgtgctctctggacgttattaatggccagtattagttgctgctgtattactgactcgcttagctgtagaaagggtaatactctcctgattttgtatgattggactcttaagtagctgctgttagtcagaattaaaacccatctcagactaagaatataatgaataagattaataggccaaaatatgtatctaatcacattgataaaaattaata

SEQ ID NO: 103369 - DNA, 741 bp, Homo sapiens
  Payload ID: 152
  Gene Symbol: ABI2
  Gene Name: abl-interactor 2
  ENST ID: ENST00000447762
  CDS Start-End: 234-461
gcgtgcgcgcgcccggccggccgtcgccgcggtgaccgtcctcggagtccgtcggctcgcgccccgcccccgtcgccccctcccctgtcgcgcgctggggctgtttctcgctccttccgagttaccgccgccgtcgccgccgctcctcctctcccggtcctgggtttccttggcgctgcggccgccgctccctctgcgacctgtatgaggaggaggaggaggaggatgtgaagatggcggagctgcagatgctgctggaagaggaaatcccggggggccgccgggccctcttcgacagctacacaaatctggaacgggtggccgattactgcgagaacaactacatacagagatggggtcttggtatgtcatgcaggctggaatgcagtggtgtgatcatagctcactgcagccttgaactcctgtgctcaagtgatcatcctgcctcagtctctcagtagtctgggactacagtcagcagataagcagagagccctagaagaaaccaaagcctacaccacccaatccttagcaagtgttgcctatctgataaacaccttggccaacaatgtcctgcagatgctggatatccaggcatcccagctacgaaggatggaatcttcaatcaatcatatttcacaaacagttgatattcataaagagaaagttgcaagaagagaaattggtattttgactaccaataaaaacacttcaaggacacataagattattgctccagcc

SEQ ID NO: 103370 - DNA, 563 bp, Homo sapiens
  Payload ID: 152
  Gene Symbol: ABI2
  Gene Name: abl-interactor 2
  ENST ID: ENST00000444584
  CDS Start-End: 111-245
accgccgccgtcgccgccgctcctcctctcccggtcctgggtttccttggcgctgcggccgccgctccctctgcgacctgtatgaggaggaggaggaggaggatgtgaagatggcggagctgcagatgctgctggaagaggaaatcccggggggccgccgggccctcttcgacagctacacaaatctggaacgggtggccgattactgcgagaacaactacatacagataagcagagagccctagaagaaaccaaagcctacaccacccaatccttagcaagtgttgcctatctgataaacaccttggccaacaatgtcctgcagatgctggatatccaggcatcccagctacgaaggatggaatcttcaatcaatcatatttcacaaatgttttcccacactgatgggcagctaactgaggcaaattagaggcgttgatcttgagtcgacttttgtgaccaaatttggaaacaattgcagtttgagattgaatgagacagttgatattcataaagagaaagttgcaagaagagaaattggtattttgactaccaataaaaac

SEQ ID NO: 103371 - DNA, 490 bp, Homo sapiens
  Payload ID: 152
  Gene Symbol: ABI2
  Gene Name: abl-interactor 2
  ENST ID: ENST00000425253
  CDS Start-End: 122-301
ccttccgagttaccgccgccgtcgccgccgctcctcctctcccggtcctgggtttccttggcgctgcggccgccgctccctctgcgacctgtatgaggaggaggaggaggaggatgtgaagatggcggagctgcagatgctgctggaagaggaaatcccggggggccgccgggccctcttcgacagctacacaaatctggaacgggtggccgattactgcgagaacaactacatacaggctttccgttttgacagtgcatatcctctggtgcttcctgacaaagaatacatggaaagttaaaaaaagaagactgggtacggtggctcattcctgtaatcctagcactttgggaggtcatggtaagaggattgctggagctcaggtgggaagactagcctgagcaacatgtcagcagataagcagagagccctagaagaaaccaaagcctacaccacccaatccttagcaagtgttgcctatctgataaac

SEQ ID NO: 103372 - DNA, 940 bp, Homo sapiens
  Payload ID: 152
  Gene Symbol: ABI2
  Gene Name: abl-interactor 2
  ENST ID: ENST00000454023
  CDS Start-End: 1-881
aggtgagtacccagaacatgaagatgggtgggctgccgcgtacaacacctccaactcagaagccccctagtccccctatgtcagggaaagggacacttgggcggcactccccctatcgcacactggagccagtgcgtcctccagtggtaccaaatgattacgtacctagcccaacccgtaatatggctccctcgcagcagagccctgtgaggacagcttctgtgaatcaaagaaatcgaacttacagcagcagtgggagtagtggagggagccacccaagtagtcggagcagcagtcgagagaacagtggaagtggtagtgtgggggttcctattgctgttcctactccatctcctcccagtgtctttccaggtcatcctgtacagttctacagcatgaataggcctgcctctcgccatactcccccaacaatagggggctcgttgccctatagacgccctccttccattacttcacaaacaagccttcagaatcagatgaatggaggacctttttatagccagaatccagtttcagatacaccacctccaccgccacctgtggaagaaccagtctttgatgagtctcccccacctcctcctcctccagaagattacgaagaggaggaagctgctgtggttgagtatagtgatccttatgctgaagaggacccaccgtgggctccacgttcttacttggaaaaggttgtggcaatttatgactatacaaaagacaaggaagatgagctgtcctttcaggaaggagccattatttatgtcatcaagaagaatgacgatggttggtatgagggagttatgaatggagtgactgggctttttcctgggaattacgttgagtctatcatgcattattctgagtaaagctcagcagggctgtgcttgcctcacaggaatagtcaggtcttcccagattatctgaa

SEQ ID NO: 103373 - DNA, 515 bp, Homo sapiens
  Payload ID: 152
  Gene Symbol: ABI2
  Gene Name: abl-interactor 2
  ENST ID: ENST00000413635
  CDS Start-End: 121-282
cttccgagttaccgccgccgtcgccgccgctcctcctctcccggtcctgggtttccttggcgctgcggccgccgctccctctgcgacctgtatgaggaggaggaggaggaggatgtgaagatggcggagctgcagatgctgctggaagaggaaatcccggggggccgccgggccctcttcgacagctacacaaatctggaacgggtggccgattactgcgagaacaactacatacagttattgagcatctttccattctgtgaggtcagtgtcagcagataagcagagagccctagaagaaaccaaagcctacaccacccaatccttagcaagtgttgcctatctgataaacaccttggccaacaatgtcctgcagatgctggatatccaggcatcccagctacgaaggatggaatcttcaatcaatcatatttcacaagcaaattagaggcgttgatcttgagtcgacttttgtgaccaaatttggaaacaattgcagtttgagattgaatgag

SEQ ID NO: 103374 - DNA, 1087 bp, Homo sapiens
  Payload ID: 152
  Gene Symbol: ABI2
  Gene Name: abl-interactor 2
  ENST ID: ENST00000416001
  CDS Start-End: 125-388
gctccttccgagttaccgccgccgtcgccgccgctcctcctctcccggtcctgggtttccttggcgctgcggccgccgctccctctgcgacctgtatgaggaggaggaggaggaggatgtgaagatggcggagctgcagatgctgctggaagaggaaatcccggggggccgccgggccctcttcgacagctacacaaatctggaacgggtggccgattactgcgagaacaactacatacagtcagcagataagcagagagccctagaagaaaccaaagcctacaccacccaatccttagcaagtgttgcctatctgataaacaccttggccaacaatgtcctgcagatgctggatatccaggtcatcctgtacagttctacagcatgaataggcctgcctctcgccatactcccccaacaatagggggctcgttgccctatagacgccctccttccattacttcacaaacaagccttcagaatcagatgaatggaggacctttttatagccagaatccagtttcagatacaccacctccaccgccacctgtggaagaaccagtctttgatgagtctcccccacctcctcctcctccagaagattacgaagaggaggaagctgctgtggttgagtatagtgatccttatgctgaagaggacccaccgtgggctccacgttcttacttggaaaaggttgtggcaatttatgactatacaaaagacaaggaagatgagctgtcctttcaggaaggagccattatttatgtcatcaagaagaatgacgatggttggtatgagggagttatgaatggagtgactgggctttttcctgggaattacgttgagtctatcatgcattattctgagtaaagctcagcagggctgtgcttgcctcacaggaatagtcaggtcttcccagattatctgaaggccctggggattccactccagtaaagtagaatgaaggatacaaatgataaaaattacacttttttttttggtttattccccagtattaaaaacaaagcaagctgagtctgaacaaatggatctttctgccatcatttgtacaatgctgagctgtctg

SEQ ID NO: 103375 - DNA, 580 bp, Homo sapiens
  Payload ID: 152
  Gene Symbol: ABI2
  Gene Name: abl-interactor 2
  ENST ID: ENST00000431886
  CDS Start-End: 117-443
cgagttaccgccgccgtcgccgccgctcctcctctcccggtcctgggtttccttggcgctgcggccgccgctccctctgcgacctgtatgaggaggaggaggaggaggatgtgaagatggcggagctgcagatgctgctggaagaggaaatcccggggggccgccgggccctcttcgacagctacacaaatctggaacgggtggccgattactgcgagaacaactacatacagtcagcagataagcagagagccctagaagaaaccaaagcctacaccacccaatccttagcaagtgttgcctatctgataaacaccttggccaacaatgtcctgcagatgctggatatccaggcatcccagctacgaaggatggaatcttcaatcaatcatatttcacaaatgttttcccacactgatgggcagctaactgaggcaaattagaggcgttgatcttgagtcgacttttgtgaccaaatttggaaacaattgcagtttgagattgaatgagacagttgatattcataaagagaaagttgcaagaagagaaattggtattttgactaccaataaaaacactt

SEQ ID NO: 103376 - DNA, 1676 bp, Homo sapiens
  Payload ID: 152
  Gene Symbol: ABI2
  Gene Name: abl-interactor 2
  ENST ID: ENST00000430418
  CDS Start-End: 124-1500
ctccttccgagttaccgccgccgtcgccgccgctcctcctctcccggtcctgggtttccttggcgctgcggccgccgctccctctgcgacctgtatgaggaggaggaggaggaggatgtgaagatggcggagctgcagatgctgctggaagaggaaatcccggggggccgccgggccctcttcgacagctacacaaatctggaacgggtggccgattactgcgagaacaactacatacagtcagcagataagcagagagccctagaagaaaccaaagcctacaccacccaatccttagcaagtgttgcctatctgataaacaccttggccaacaatgtcctgcagatgctggatatccaggcatcccagctacgaaggatggaatcttcaatcaatcatatttcacaaacagttgatattcataaagagaaagttgcaagaagagaaattggtattttgactaccaataaaaacacttcaaggacacataagattattgctccagccaaccttgaacgaccagttcgttatattagaaaacctattgactatacaattctagatgatattggacatggagtaaaggtgagtacccagaacatgaagatgggtgggctgccgcgtacaacacctccaactcagaagccccctagtccccctatgtcagggaaagggacacttggcagcagtgggagtagtggagggagccacccaagtagtcggagcagcagtcgagagaacagtggaagtggtagtgtgggggttcctattgctgttcctactccatctcctcccagtgtctttccagcccctgctggctctgctggcactcctccccttcctgctacttctgcatctgcccctgctcctcttgttcctgctactgtcccttcctccactgccccagacgctgctgctgggggtgcccagacccttgctgatggcttcacttctccaactccccctgttgtttcttccactccccctacaggtcatcctgtacagttctacagcatgaataggcctgcctctcgccatactcccccaacaatagggggctcgttgccctatagacgccctccttccattacttcacaaacaagccttcagaatcagatgaatggaggacctttttatagccagaatccagtttcagatacaccacctccaccgccacctgtggaagaaccagtctttgatgagtctcccccacctcctcctcctccagaagattacgaagaggaggaagctgctgtggttgagtatagtgatccttatgctgaagaggacccaccgtgggctccacgttcttacttggaaaaggttgtggcaatttatgactatacaaaagacaaggaagatgagctgtcctttcaggaaggagccattatttatgtcatcaagaagaatgacgatggttggtatgagggagttatgaatggagtgactgggctttttcctgggaattacgttgagtctatcatgcattattctgagtaaagctcagcagggctgtgcttgcctcacaggaatagtcaggtcttcccagattatctgaaggccctggggattccactccagtaaagtagaatgaaggatacaaatgataaaaattacacttttttttttggtttattccccagtattaaaaacaaagcaagctgagtctgaacaaa

SEQ ID NO: 103377 - DNA, 1430 bp, Homo sapiens
  Payload ID: 152
  Gene Symbol: ABI2
  Gene Name: abl-interactor 2
  ENST ID: ENST00000441061
  CDS Start-End: 1-131
cccaatccttagcaagtgttgcctatctgataaacaccttggccaacaatgtcctgcagatgctggatatccaggcatcccagctacgaaggatggaatcttcaatcaatcatatttcacaagcaaattagaggcgttgatcttgagtcgacttttgtgaccaaatttggaaacaattgcagtttgagattgaatgagacagttgatattcataaagagaaagttgcaagaagagaaattggtattttgactaccaataaaaacacttcaaggacacataagattattgctccagccaaccttgaacgaccagttcgttatattagaaaacctattgactatacaattctagatgatattggacatggagtaaaggtgagtacccagaacatgaagatgggtgggctgccgcgtacaacacctccaactcagaagccccctagtccccctatgtcagggaaagggacacttgggcggcactccccctatcgcacactggagccagtgcgtcctccagtggtaccaaatgattacgtacctagcccaacccgtaatatggctccctcgcagcagagccctgtgaggacagcttctgtgaatcaaagaaatcgaacttacagcagcagtgggagtagtggagggagccacccaagtagtcggagcagcagtcgagagaacagtggaagtggtagtgtgggggttcctattgctgttcctactccatctcctcccagtgtctttccaggtcatcctgtacagttctacagcatgaataggcctgcctctcgccatactcccccaacaatagggggctcgttgccctatagacgccctccttccattacttcacaaacaagccttcagaatcagatgaatggaggacctttttatagccagaatccagtttcagatacaccacctccaccgccacctgtggaagaaccagtctttgatgagtctcccccacctcctcctcctccagaagattacgaagaggaggaagctgctgtggttgagtatagtgatccttatgctgaagaggacccaccgtgggctccacgttcttacttggaaaaggttgtggcaatttatgactatacaaaagacaaggaagatgagctgtcctttcaggaaggagccattatttatgtcatcaagaagaatgacgatggttggtatgagggagttatgaatggagtgactgggctttttcctgggaattacgttgagtctatcatgcattattctgagtaaagctcagcagggctgtgcttgcctcacaggaatagtcaggtcttcccagattatctgaaggccctggggattccactccagtaaagtagaatgaaggatacaaatgataaaaattacacttttttttttggtttattccccagtattaaaaacaaagcaagctgagtctgaacaaa

SEQ ID NO: 103378 - DNA, 603 bp, Homo sapiens
  Payload ID: 152
  Gene Symbol: ABI2
  Gene Name: abl-interactor 2
  ENST ID: ENST00000451591
  CDS Start-End: 1-603
accttgaacgaccagttcgttatattagaaaacctattgactatacaattctagatgatattggacatggagtaaaggtgagtacccagaacatgaagatgggtgggctgccgcgtacaacacctccaactcagaagccccctagtccccctatgtcagggaaagggacacttgggcggcactccccctatcgcacactggagccagtgcgtcctccagtggtaccaaatgattacgtacctagcccaacccgtaatatggctccctcgcagcagagccctgtgaggacagcttctgtgaatcaaagaaatcgaacttacagcagtgggagtagtggagggagccacccaagtagtcggagcagcagtcgagagaacagtggaagtggtagtgtgggggttcctattgctgttcctactccatctcctcccagtgtctttccaggtcatcctgtacagttctacagcatgaataggcctgcctctcgccatactcccccaacaatagggggctcgttgccctatagacgccctccttccattacttcacaaacaagccttcagaatcagatgaatggaggacctttttatagccagaatccag

SEQ ID NO: 103379 - DNA, 1567 bp, Homo sapiens
  Payload ID: 152
  Gene Symbol: ABI2
  Gene Name: abl-interactor 2
  ENST ID: ENST00000417864
  CDS Start-End: 109-1567
cgccgccgtcgccgccgctcctcctctcccggtcctgggtttccttggcgctgcggccgccgctccctctgcgacctgtatgaggaggaggaggaggaggatgtgaagatggcggagctgcagatgctgctggaagaggaaatcccggggggccgccgggccctcttcgacagctacacaaatctggaacgggtggccgattactgcgagaacaactacatacagtcagcagataagcagagagccctagaagaaaccaaagcctacaccacccaatccttagcaagtgttgcctatctgataaacaccttggccaacaatgtcctgcagatgctggatatccaggcatcccagctacgaaggatggaatcttcaatcaatcatatttcacaaacagttgatattcataaagagaaagttgcaagaagagaaattggtattttgactaccaataaaaacacttcaaggacacataagattattgctccagccaaccttgaacgaccagttcgttatattagaaaacctattgactatacaattctagatgatattggacatggagtaaagtggttgcttagatttaaggtgagtacccagaacatgaagatgggtgggctgccgcgtacaacacctccaactcagaagccccctagtccccctatgtcagggaaagggacacttgggcggcactccccctatcgcacactggagccagtgcgtcctccagtggtaccaaatgattacgtacctagcccaacccgtaatatggctccctcgcagcagagccctgtgaggacagcttctgtgaatcaaagaaatcgaacttacagcagcagtgggagtagtggagggagccacccaagtagtcggagcagcagtcgagagaacagtggaagtggtagtgtgggggttcctattgctgttcctactccatctcctcccagtgtctttccagcccctgctggctctgctggcactcctccccttcctgctacttctgcatctgcccctgctcctcttgttcctgctactgtcccttcctccactgccccagacgctgctgctgggggtgcccagacccttgctgatggcttcacttctccaactccccctgttgtttcttccactccccctacaggtcatcctgtacagttctacagcatgaataggcctgcctctcgccatactcccccaacaatagggggctcgttgccctatagacgccctccttccattacttcacaaacaagccttcagaatcagatgaatggaggacctttttatagccagaatccagtttcagatacaccacctccaccgccacctgtggaagaaccagtctttgatgagtctcccccacctcctcctcctccagaagattacgaagaggaggaagctgctgtggttgagtatagtgatccttatgctgaagaggacccaccgtgggctccacgttcttacttggaaaaggttgtggcaatttatgactatacaaaagacaaggaagatgagctgtcctttcaggaaggagccattatttatgtcatcaagaagaatgacgatg

SEQ ID NO: 103380 - DNA, 6132 bp, Homo sapiens
  Payload ID: 153
  Gene Symbol: ASPM
  Gene Name: abnormal spindle microtubule assembly
  Uniprot ID: Q8IZT6
  ENST ID: ENST00000294732
  CDS Start-End: 258-5936
attggtggaggcggcaagtttaaacagagtcaaaacgccatacttgtttggctcctctttttaatttgcgagtttattgggcttgttttctgttttctagggagtaggttagtggaaaagaaaaagggccgaattcactcccacgacctctacagccgcccctgaggggaagcggtcagcgtaagtcccggatccccgctccggagccgcctcgtgggagcggggcaaggagatccaggaggggtctcgaatctgccatggcgaaccggcgagtggggcgaggctgctgggaagtgagcccgaccgagcggaggccgcccgcggggctgcggggccccgcggccgaggaggaggcgtcttccccgccggtcctgtctctcagccacttctgcaggtctcctttcctttgcttcggggacgttctcctgggagcctcacggacgctgtctctggccctagacaaccctaacgaggaggtggcagaagtgaagatctcccacttcccggccgcggacctgggcttcagtgtgtcgcagcgctgtttcgtgttgcagcctaaagagaaaattgttatttctgttaactggacaccactcaaagaaggccgagtaagagagattatgacatttcttgtaaatgatgttctgaaacaccaagctatattactaggaaatgcagaagagcagaaaaagaaaaagaggagtctttgggataccattaaaaagaagaaaatttcagcctctacaagtcacaacagaagggtttcaaatattcagaatgttaataaaacatttagtgtttcccaaaaagttgacagagttaggagcccactacaagcttgtgaaaacttggctatgaatgaaggcggtcccccaacagaaaacaattctttaatacttgaagaaaataaaatacccatatcacctattagccctgctttcaatgaatgccatggtgcaacttgcttgccactctctgtacgtcgatctactacctactcatctcttcatgcatcagaaaatagggaactattaaatgtacacagtgccaacgtttcaaaagtttcttttaatgagaaagctgtaactgaaacttcctttaattccgtaaatgttaatggccaaagaggagagaatagtaaacttagtcttacccccaactgttcttcaactttgaacattacacaaagccaaatacattttctaagtccagattcttttgtaaataatagtcatggagctaataatgaactagaattagtaacatgtctttcatcagatatgtttatgaaagataattcacagcctgtgcatttggaatcaacaattgcacatgaaatttatcagaaaattttaagtccagattctttcataaaagataattatggactaaatcaggatctagaatcagagtcagttaatcctattttatcccctaatcaatttttaaaagataacatggcatatatgtgtacatctcagcaaacatgtaaagtaccattatcaaatgaaaattctcaagtcccacagtctcctgaagattggagaaaaagtgaagtttcgccacgtattcctgaatgtcagggttcaaaatctcccaaagctatttttgaagaactagtagaaatgaagtcaaattactacagttttataaaacaaaataatcctaaattttctgcagttcaggatatttctagtcatagccacaataaacaacctaagagacgtccaatactttctgccactgttactaaaaggaaggccacctgtaccagagaaaaccaaactgagattaataaaccaaaagcaaaaagatgtctcaacagtgcagtgggtgaacatgaaaaagtaataaataatcaaaaggaaaaagaagattttcattcttatcttccaattatagatccaatattaagtaaatctaagagttataaaaacgaggtaacaccctcttcgacaacagcttcagttgctcggaaaagaaagagcgatggaagcatggaagatgcaaatgtgagagttgcaattacagaacatacagaagtgcgagaaatcaaaagaatccatttttctccctcagagcctaaaacatcagctgttaagaaaacaaaaaatgtgacaacacccatctcaaaacgtattagcaacagagagaaattaaacctgaagaagaaaactgatttatcaatattcagaactccaatttctaaaacaaacaaaaggacaaaacccattatcgctgtggcacagtccagtttgaccttcataaaaccattaaaaacagatattcccagacacccgatgccatttgctgcaaaaaacatgttttatgatgaacgctggaaggaaaagcaggaacagggcttcacttggtggttaaattttatattaacccctgatgacttcactgtaaaaacaaatatttctgaagtaaatgctgctactcttcttttgggaatagagaatcaacataaaataagtgttcctagagcacctacaaaagaggaaatgtctctcagagcttatactgctcggtgtaggttaaacagactacgtcgtgcagcatgccgtttgtttacttctgaaaaaatggttaaagctattaaaaagcttgaaattgaaattgaagctaggcggttaattgttcgaaaagatagacacctatggaaagatgtgggagaacgtcagaaagtcctgaattggctgttgtcctacaatcctttgtggcttcgaattggtctagagacaacttatggagaactcatatctttggaagataacagtgatgtcacagggttggctatgtttattctgaatcgcctactttggaatcctgatatagcagctgagtatagacaccccactgttcctcacctgtatagagatggtcatgaagaagctttgtccaagtttacattgaaaaagttattgttgttggtctgttttcttgattatgctaaaatttccagactcattgatcatgatccttgtctcttctgtaaagatgccgaattcaaggctagtaaagaaatccttttggctttttcacgagatttcctaagtggtgaaggtgacctttcccgtcaccttggcttattgggattacctgttaaccatgttcagacaccatttgatgaatttgattttgccgttacaaatcttgccgtagacttgcaatgtggagtgcgccttgtgcgaaccatggaacttctcacacagaactgggacctctcaaagaaactcaggattccggcaataagtcgtcttcaaaagatgcacaatgttgacattgttcttcaagttcttaaatcacgaggaattgaattaagtgatgagcatggaaatacaattctatctaaggatattgtggataggcacagagaaaaaactctcaggttgctttggaaaatagcgtttgcttttcaggtggatatttcccttaacttagatcaattaaaggaagaaattgcctttctaaaacacacaaagagtataaagaaaacaatatctctactatcatgccattctgatgatcttattaataagaaaaaaggcaaaagggatagtggttcctttgaacaatatagtgaaaacataaagttattgatggattgggtaaatgctgtttgtgccttctataataaaaaggtggagaattttacagtgtctttctcagacggccgtgtgttatgttacctgatccaccattaccatccttgctatgtgccatttgacgctatatgtcagcgtactactcaaactgtggaatgtacgcaaactggttcagtggtattaaattcatcatctgaatctgatgacagttctctggatatgtctcttaaagcatttgatcatgaaaatacttcagagctatacaaagagctcctagaaaatgaaaagaaaaattttcacttggttaggtctgcagttagagaccttggtggaatacctgctatgattaatcattcagatatgtcaaatacaattccagatgaaaaggtggttattacctatttgtcatttctttgtgcaaggcttttggatcttcgtaaagaaataagagctgctcgactcatacaaacaacatggagaaaatataaactaaaaacagatctcaaacgccatcaggagagagagaaagctgcaagaattattcaattggctgtaatcaattttctagcaaaacaaagattgagaaaaagagttaatgcagcactcgtcattcagaaatattggcgaagagtcttagcacagagaaaattattaatgttaaaaaaggaaaagctggaaaaagttcaaaataaagcagcatcacttattcaggctatgtggaggagatatagagccaagaaatatttatgtaaagtgaaagctgcctgcaagattcaagcctggtatagatgttggagagcacacaaagaatatctagctatattaaaagctgttaaaattattcaaggttgcttctataccaaactagagagaacacggtttttgaatgtgagagcatcagcaattatcattcagagaaaatggagagctatacttcctgcaaagatagctcatgaacacttcttaatgataaaaagacatcgagctgcttgtttgatccaagcacattatagaggatataaaggaaggcaggtctttcttcggcagaaatctgctgctttgatcatacaaaaatatatacgagccagggaggctggaaagcatgaaaggataaaatatattgaatttaaaaaatctacagttatcctacaagcactggtgcgtggttggctagtacgaaaaagatttttagaacagagagccaaaattcgacttcttcacttcactgcagctgcatattatcacctgaatgctgttagaattcaaagagcctataaactttacctggctgtgaagaatgctaacaagcaggttaattcagtcatctgtattcagagatggtttcgagcaagattacaagaaaagagatttattcagaaatatcatagcatcaaaaagattgagcatgaaggtcaagaatgtctgagccagcgaaatagggctgcatcagtaatacagaaagcagtgcgccattttctcctccgtaaaaagcaggaaaaattcactagtggaatcattaaaattcaggcattatggagaggctattcttggaggaagaaaaatgattgtacaaaaattaaagctatacgactaagtcttcaagttgttaatagggagattcgagaagaaaacaaactctacaaaagaactgcacttgcacttcattaccttttgacatataagcacctttctgccattcttgaggccttaaaacacctagaggtagttactagattgtctccactttgttgtgagaacatggcccagagtggagcaatttctaaaatatttgttttgatccgaagttgtaatcgcagtattccttgtatggaagtcatcagatatgctgtgcaagtcttgcttaatgtatctaagtatgagaaaactacttcagcagtttatgatgtagaaaattgtatagatatactattggagcttttgcagatataccgagaaaagcctggtaataaagttgcagacaaaggcggaagcatttttacaaaaacttgttgtttgttggctattttactgaagacaacaaatagagcctctgatgtacgaagtaggtccaaagttgttgaccgtatttacagtctctacaaacttacagctcataaacataaaatgaatactgaaagaatactttacaagcaaaagaagaattcttctataagcattccttttatcccagaaacacctgtaaggaccagaatagtttcaagacttaagccagattgggttttgagaagagataacatggaagaaatcacaaatcccctgcaagctattcaaatggtgatggatacgcttggcattccttattagtaaatgtaaacattttcagtatgtatagtgtaaagaaatattaaagccaatcatgagtacgtaaagtgatttttgctctccgtgtacaacttttaaaatctgactttgttttaaaaaaacataaactgttcattacattcttcatttttatcatttatagttttatgcatgtaataaactaatatgtcataagatg

SEQ ID NO: 103381 - DNA, 3747 bp, Homo sapiens
  Payload ID: 153
  Gene Symbol: ASPM
  Gene Name: abnormal spindle microtubule assembly
  ENST ID: ENST00000367408
  CDS Start-End: 127-3555
tttatattaacccctgatgacttcactgtaaaaacaaatatttctgaagtaaatgctgctactcttcttttgggaatagagaatcaacataaaataagtgttcctagagcacctacaaaagaggaaatgtctctcagagcttatactgctcggtgtaggttaaacagactacgtcgtgcagcatgccgtttgtttacttctgaaaaaatggttaaagctattaaaaagcttgaaattgaaattgaagctaggcggttaattgttcgaaaagatagacacctatggaaagatgtgggagaacgtcagaaagtcctgaattggctgttgtcctacaatcctttgtggcttcgaattggtctagagacaacttatggagaactcatatctttggaagataacagtgatgtcacagggttggctatgtttattctgaatcgcctactttggaatcctgatatagcagctgagtatagacaccccactgttcctcacctgtatagagatggtcatgaagaagctttgtccaagtttacattgaaaaagttattgttgttggtctgttttcttgattatgctaaaatttccagactcattgatcatgatccttgtctcttctgtaaagatgccgaattcaaggctagtaaagaaatccttttggctttttcacgagatttcctaagtggtgaaggtgacctttcccgtcaccttggcttattgggattacctgttaaccatgttcagacaccatttgatgaatttgattttgccgttacaaatcttgccgtagacttgcaatgtggagtgcgccttgtgcgaaccatggaacttctcacacagaactgggacctctcaaagaaactcaggattccggcaataagtcgtcttcaaaagatgcacaatgttgacattgttcttcaagttcttaaatcacgaggaattgaattaagtgatgagcatggaaatacaattctatctaaggatattgtggataggcacagagaaaaaactctcaggttgctttggaaaatagcgtttgcttttcaggtggatatttcccttaacttagatcaattaaaggaagaaattgcctttctaaaacacacaaagagtataaagaaaacaatatctctactatcatgccattctgatgatcttattaataagaaaaaaggcaaaagggatagtggttcctttgaacaatatagtgaaaacataaagttattgatggattgggtaaatgctgtttgtgccttctataataaaaaggtggagaattttacagtgtctttctcagacggccgtgtgttatgttacctgatccaccattaccatccttgctatgtgccatttgacgctatatgtcagcgtactactcaaactgtggaatgtacgcaaactggttcagtggtattaaattcatcatctgaatctgatgacagttctctggatatgtctcttaaagcatttgatcatgaaaatacttcagagctatacaaagagctcctagaaaatgaaaagaaaaattttcacttggttaggtctgcagttagagaccttggtggaatacctgctatgattaatcattcagatatgtcaaatacaattccagatgaaaaggtggttattacctatttgtcatttctttgtgcaaggcttttggatcttcgtaaagaaataagagctgctcgactcatacaaacaacatggagaaaatataaactaaaaacagatctcaaacgccatcaggagagagagaaagctgcaagaattattcaattggctgtaatcaattttctagcaaaacaaagattgagaaaaagagttaatgcagcactcgtcattcagaaatattggcgaagagtcttagcacagagaaaattattaatgttaaaaaaggaaaagctggaaaaagttcaaaataaagcagcatcacttattcaggctatgtggaggagatatagagccaagaaatatttatgtaaagtgaaagctgcctgcaagattcaagcctggtatagatgttggagagcacacaaagaatatctagctatattaaaagctgttaaaattattcaaggttgcttctataccaaactagagagaacacggtttttgaatgtgagagcatcagcaattatcattcagagaaaatggagagctatacttcctgcaaagatagctcatgaacacttcttaatgataaaaagacatcgagctgcttgtttgatccaagcacattatagaggatataaaggaaggcaggtctttcttcggcagaaatctgctgctttgatcatacaaaaatatatacgagccagggaggctggaaagcatgaaaggataaaatatattgaatttaaaaaatctacagttatcctacaagcactggtgcgtggttggctagtacgaaaaagatttttagaacagagagccaaaattcgacttcttcacttcactgcagctgcatattatcacctgaatgctgttagaattcaaagagcctataaactttacctggctgtgaagaatgctaacaagcaggttaattcagtcatctgtattcagagatggtttcgagcaagattacaagaaaagagatttattcagaaatatcatagcatcaaaaagattgagcatgaaggtcaagaatgtctgagccagcgaaatagggctgcatcagtaatacagaaagcagtgcgccattttctcctccgtaaaaagcaggaaaaattcactagtggaatcattaaaattcaggcattatggagaggctattcttggaggaagaaaaatgattgtacaaaaattaaagctatacgactaagtcttcaagttgttaatagggagattcgagaagaaaacaaactctacaaaagaactgcacttgcacttcattaccttttgacatataagcacctttctgccattcttgaggccttaaaacacctagaggtagttactagattgtctccactttgttgtgagaacatggcccagagtggagcaatttctaaaatatttgttttgatccgaagttgtaatcgcagtattccttgtatggaagtcatcagatatgctgtgcaagtcttgcttaatgtatctaagtatgagaaaactacttcagcagtttatgatgtagaaaattgtatagatatactattggagcttttgcagatataccgagaaaagcctggtaataaagttgcagacaaaggcggaagcatttttacaaaaacttgttgtttgttggctattttactgaagacaacaaatagagcctctgatgtacgaagtaggtccaaagttgttgaccgtatttacagtctctacaaacttacagctcataaacataaaatgaatactgaaagaatactttacaagcaaaagaagaattcttctataagcattccttttatcccagaaacacctgtaaggaccagaatagtttcaagacttaagccagattgggttttgagaagagataacatggaagaaatcacaaatcccctgcaagctattcaaatggtgatggatacgcttggcattccttattagtaaatgtaaacattttcagtatgtatagtgtaaagaaatattaaagccaatcatgagtacgtaaagtgatttttgctctccgtgtacaacttttaaaatctgactttgttttaaaaaaacataaactgttcattacattcttcatttttatcatttatagttttatgcatgtaataaactaatatgtcataa

SEQ ID NO: 103382 - DNA, 10887 bp, Homo sapiens
  Payload ID: 153
  Gene Symbol: ASPM
  Gene Name: abnormal spindle microtubule assembly
  Uniprot ID: Q8IZT6
  ENST ID: ENST00000367409
  CDS Start-End: 258-10691
attggtggaggcggcaagtttaaacagagtcaaaacgccatacttgtttggctcctctttttaatttgcgagtttattgggcttgttttctgttttctagggagtaggttagtggaaaagaaaaagggccgaattcactcccacgacctctacagccgcccctgaggggaagcggtcagcgtaagtcccggatccccgctccggagccgcctcgtgggagcggggcaaggagatccaggaggggtctcgaatctgccatggcgaaccggcgagtggggcgaggctgctgggaagtgagcccgaccgagcggaggccgcccgcggggctgcggggccccgcggccgaggaggaggcgtcttccccgccggtcctgtctctcagccacttctgcaggtctcctttcctttgcttcggggacgttctcctgggagcctcacggacgctgtctctggccctagacaaccctaacgaggaggtggcagaagtgaagatctcccacttcccggccgcggacctgggcttcagtgtgtcgcagcgctgtttcgtgttgcagcctaaagagaaaattgttatttctgttaactggacaccactcaaagaaggccgagtaagagagattatgacatttcttgtaaatgatgttctgaaacaccaagctatattactaggaaatgcagaagagcagaaaaagaaaaagaggagtctttgggataccattaaaaagaagaaaatttcagcctctacaagtcacaacagaagggtttcaaatattcagaatgttaataaaacatttagtgtttcccaaaaagttgacagagttaggagcccactacaagcttgtgaaaacttggctatgaatgaaggcggtcccccaacagaaaacaattctttaatacttgaagaaaataaaatacccatatcacctattagccctgctttcaatgaatgccatggtgcaacttgcttgccactctctgtacgtcgatctactacctactcatctcttcatgcatcagaaaatagggaactattaaatgtacacagtgccaacgtttcaaaagtttcttttaatgagaaagctgtaactgaaacttcctttaattccgtaaatgttaatggccaaagaggagagaatagtaaacttagtcttacccccaactgttcttcaactttgaacattacacaaagccaaatacattttctaagtccagattcttttgtaaataatagtcatggagctaataatgaactagaattagtaacatgtctttcatcagatatgtttatgaaagataattcacagcctgtgcatttggaatcaacaattgcacatgaaatttatcagaaaattttaagtccagattctttcataaaagataattatggactaaatcaggatctagaatcagagtcagttaatcctattttatcccctaatcaatttttaaaagataacatggcatatatgtgtacatctcagcaaacatgtaaagtaccattatcaaatgaaaattctcaagtcccacagtctcctgaagattggagaaaaagtgaagtttcgccacgtattcctgaatgtcagggttcaaaatctcccaaagctatttttgaagaactagtagaaatgaagtcaaattactacagttttataaaacaaaataatcctaaattttctgcagttcaggatatttctagtcatagccacaataaacaacctaagagacgtccaatactttctgccactgttactaaaaggaaggccacctgtaccagagaaaaccaaactgagattaataaaccaaaagcaaaaagatgtctcaacagtgcagtgggtgaacatgaaaaagtaataaataatcaaaaggaaaaagaagattttcattcttatcttccaattatagatccaatattaagtaaatctaagagttataaaaacgaggtaacaccctcttcgacaacagcttcagttgctcggaaaagaaagagcgatggaagcatggaagatgcaaatgtgagagttgcaattacagaacatacagaagtgcgagaaatcaaaagaatccatttttctccctcagagcctaaaacatcagctgttaagaaaacaaaaaatgtgacaacacccatctcaaaacgtattagcaacagagagaaattaaacctgaagaagaaaactgatttatcaatattcagaactccaatttctaaaacaaacaaaaggacaaaacccattatcgctgtggcacagtccagtttgaccttcataaaaccattaaaaacagatattcccagacacccgatgccatttgctgcaaaaaacatgttttatgatgaacgctggaaggaaaagcaggaacagggcttcacttggtggttaaattttatattaacccctgatgacttcactgtaaaaacaaatatttctgaagtaaatgctgctactcttcttttgggaatagagaatcaacataaaataagtgttcctagagcacctacaaaagaggaaatgtctctcagagcttatactgctcggtgtaggttaaacagactacgtcgtgcagcatgccgtttgtttacttctgaaaaaatggttaaagctattaaaaagcttgaaattgaaattgaagctaggcggttaattgttcgaaaagatagacacctatggaaagatgtgggagaacgtcagaaagtcctgaattggctgttgtcctacaatcctttgtggcttcgaattggtctagagacaacttatggagaactcatatctttggaagataacagtgatgtcacagggttggctatgtttattctgaatcgcctactttggaatcctgatatagcagctgagtatagacaccccactgttcctcacctgtatagagatggtcatgaagaagctttgtccaagtttacattgaaaaagttattgttgttggtctgttttcttgattatgctaaaatttccagactcattgatcatgatccttgtctcttctgtaaagatgccgaattcaaggctagtaaagaaatccttttggctttttcacgagatttcctaagtggtgaaggtgacctttcccgtcaccttggcttattgggattacctgttaaccatgttcagacaccatttgatgaatttgattttgccgttacaaatcttgccgtagacttgcaatgtggagtgcgccttgtgcgaaccatggaacttctcacacagaactgggacctctcaaagaaactcaggattccggcaataagtcgtcttcaaaagatgcacaatgttgacattgttcttcaagttcttaaatcacgaggaattgaattaagtgatgagcatggaaatacaattctatctaaggatattgtggataggcacagagaaaaaactctcaggttgctttggaaaatagcgtttgcttttcaggtggatatttcccttaacttagatcaattaaaggaagaaattgcctttctaaaacacacaaagagtataaagaaaacaatatctctactatcatgccattctgatgatcttattaataagaaaaaaggcaaaagggatagtggttcctttgaacaatatagtgaaaacataaagttattgatggattgggtaaatgctgtttgtgccttctataataaaaaggtggagaattttacagtgtctttctcagacggccgtgtgttatgttacctgatccaccattaccatccttgctatgtgccatttgacgctatatgtcagcgtactactcaaactgtggaatgtacgcaaactggttcagtggtattaaattcatcatctgaatctgatgacagttctctggatatgtctcttaaagcatttgatcatgaaaatacttcagagctatacaaagagctcctagaaaatgaaaagaaaaattttcacttggttaggtctgcagttagagaccttggtggaatacctgctatgattaatcattcagatatgtcaaatacaattccagatgaaaaggtggttattacctatttgtcatttctttgtgcaaggcttttggatcttcgtaaagaaataagagctgctcgactcatacaaacaacatggagaaaatataaactaaaaacagatctcaaacgccatcaggagagagagaaagctgcaagaattattcaattggctgtaatcaattttctagcaaaacaaagattgagaaaaagagttaatgcagcactcgtcattcagaaatattggcgaagagtcttagcacagagaaaattattaatgttaaaaaaggaaaagctggaaaaagttcaaaataaagcagcatcacttattcagggatattggagaagatattccactagacaaagatttctgaaattgaaatattattcaatcatcctgcaatctaggataagaatgataattgctgttacatcttataaacgatatctttgggctacagttacaattcagaggcattggcgtgcttatttaagaagaaaacaagatcaacaaagatatgaaatgctaaaatcatcaactcttataatccaatctatgttcagaaaatggaagcaacgtaaaatgcaatcacaagtaaaagctacagtaatattgcaaagagcttttagagaatggcatttaagaaaacaagctaaagaagaaaattctgctattatcatacaatcatggtatagaatgcataaagaattacggaaatatatttatattagatcttgtgttgttatcattcagaaaagatttcggtgctttcaagcccaaaagttatataaaagaagaaaagagtccatactaaccatccagaagtactacaaagcatatctgaaaggaaagattgagcgcaccaactatttgcagaaacgagctgcagccattcaattacaagctgcttttaggagactgaaagctcataatttatgtagacaaattagagctgcttgtgttattcagtcatactggagaatgagacaagacagagttcgatttttaaaccttaagaagactattatcaaatttcaggcacatgtaagaaaacatcaacaacgacagaaatataagaagatgaagaaagcagctgttataattcagactcatttccgagcttatatttttgccatgaaagttctagcatcttaccagaaaacacgctctgctgtcattgtgctgcagtctgcatatagagggatgcaagccaggaaaatgtatattcacatcctcacatctgttataaagattcaatcatattatcgtgcttatgtttctaaaaaggaatttttgagcctaaaaaatgctacaataaaattgcagtcaactgttaagatgaaacaaacacgtaaacaatatttgcatttaagagcagctgcactatttatccagcaatgttaccgttccaaaaaaatagctgcacaaaagagagaagagtatatgcagatgcgggaatcttgtatcaaactgcaagcatttgttagaggataccttgtccgaaagcagatgaggttacaaagaaaagctgttatttcactacagtcttatttcagaatgagaaaggctcggcagtattatctgaaaatgtataaagcaattattgtcattcagaattactatcatgcatacaaagcacaggtcaatcagaggaagaacttcttgcaagtcaaaaaagcagctacttgcttgcaagcagcttacagaggttataaagtacgccagctaatcaaacaacaatctatagctgctcttaaaattcagtctgcttttagaggctataataaaagggtaaaatatcaatctgtgcttcaatctataataaagattcagagatggtacagggcgtacaagactcttcatgatacaagaacacattttttgaagacaaaggcagctgtgatttccctccagtctgcttatcgtggctggaaggttcggaaacagattagaagggaacatcaagctgccttgaagattcagtctgcttttagaatggccaaggcccagaaacagtttagattgtttaaaacagcagcattagtcatccagcaaaatttcagagcatggactgcaggaaggaagcaatgtatggagtatattgaactccgtcatgcggtactggtgcttcaatctatgtggaagggaaaaacactgagaagacagcttcaaaggcaacataaatgtgctatcatcatacagtcatactatagaatgcatgtgcaacaaaagaagtggaaaatcatgaaaaaagctgctcttctgattcaaaagtattatagggcttacagtattggaagagaacagaatcatttatatttgaaaacaaaagcagctgtagtaactttacagtcagcttatcgtggtatgaaagtgagaaaaagaataaaggattgcaacaaagcagcagtcactatacagtctaaatacagagcttacaaaaccaaaaagaaatatgcaacctatagagcttcagctattataattcagagatggtatcgaggtattaaaattacaaaccatcagcataaggagtatcttaatttgaagaagacagcaattaaaatccaatctgtttatagaggtattagagttagaagacatattcaacacatgcacagggcagccacttttattaaagccatgtttaaaatgcatcagtcaagaataagttaccatacaatgagaaaagcagctattgttattcaagtaagatgtagagcatattatcaaggtaaaatgcagcgtgaaaagtacctgacaattttgaaagctgttaaagtccttcaggcaagttttagaggagtaagagttagacggactcttagaaagatgcagactgcagcaacactcattcagtcaaactacagaagatacagacagcaaacatactttaataagttaaagaaaataacaaaaacagtacagcaaagatactgggcaatgaaagaaagaaacatacaatttcaaaggtataacaaactgaggcattctgtaatatacattcaggctatttttaggggaaagaaagctagaagacatttaaaaatgatgcatatagccgcaactctcattcagaggagatttagaactctaatgatgagaagaagattcctctctctcaagaaaactgctattttgattcagagaaaatatcgggcacatctttgtacaaagcatcacttacagttccttcaggtacaaaatgcagttattaaaatccagtcatcatacagaagatggatgataaggaaaaggatgcgagagatgcacagggctgctactttcatccagtctactttcagaatgcacagattacatatgagatatcaggctttgaaacaggcctccgttgtgatccaacagcaataccaagcaaatagagctgcaaaactgcagaggcagcattatctcagacaaagacactctgctgtgatccttcaggctgcattcaggggtatgaaaactagaagacatttgaagagtatgcattcctctgcaacccttattcagagtaggtttagatcattactggtgaggagaagattcatttccctcaaaaaagctactatttttgttcagaggaaatatcgagccaccatttgtgccaaacataaattgtaccaattcttgcacttaagaaaggcagccattacaatacagtcatcttacagaagactgatggtaaagaagaagttacaagaaatgcaaagggctgcagttctcattcaggctactttcaggatgtacagaacatatattacatttcagacttggaaacatgcttcaattctaattcagcaacattatcgaacatatagagctgcaaaattacaaagagaaaattatatcagacaatggcattctgctgtggttattcaggctgcatataaaggaatgaaagcaagacaacttttaagggaaaaacacaaagcttctatcgtaatacaaagcacctacagaatgtataggcagtattgtttctaccaaaagcttcagtgggctacaaaaatcatacaagaaaaatatagagcaaataaaaagaaacagaaagtatttcaacacaatgaacttaagaaagagacttgtgttcaggcaggttttcaggacatgaacataaaaaaacagattcaggaacagcaccaggctgccattattattcagaagcattgtaaagcctttaaaataaggaagcattatctccaccttagagcaacagtagtttctattcaaagaagatacagaaaactaactgcagtgcgtacccaagcagttatttgtatacagtcttattacagaggctttaaagtacgaaaggatattcaaaatatgcaccgggctgccacactaattcagtcattctatcgaatgcacagggccaaagttgattatgaaacaaagaaaactgcaattgtggttatacagaattattataggttgtatgttagagtaaaaacagaaagaaaaaactttttagcagttcagaaatctgtacgaactattcaggctgcttttagaggcatgaaagttagacaaaaattgaaaaatgtatcagaggaaaagatggcagccattgttaaccaatctgcactctgctgttacagaagtaaaactcagtatgaagctgttcaaagtgaaggtgttatgattcaagagtggtataaagcttctggccttgcttgttcacaggaagcagagtatcattctcaaagtagggctgcagtaacaattcaaaaagctttttgtagaatggtcacaagaaaactggaaacacagaaatgtgctgccctacggattcagttcttccttcagatggctgtgtatcggagaagatttgttcagcagaaaagagctgctatcactttacagcattattttaggacgtggcaaaccagaaaacagtttttactatatagaaaagcagcagtggttttacaaaatcactacagagcatttctgtctgcaaaacatcaaagacaagtctatttacagatcagaagcagtgttatcattattcaagctagaagtaaaggatttatacagaaacggaagtttcaggaaattaaaaatagcaccataaaaattcaggctatgtggaggagatatagagccaagaaatatttatgtaaagtgaaagctgcctgcaagattcaagcctggtatagatgttggagagcacacaaagaatatctagctatattaaaagctgttaaaattattcaaggttgcttctataccaaactagagagaacacggtttttgaatgtgagagcatcagcaattatcattcagagaaaatggagagctatacttcctgcaaagatagctcatgaacacttcttaatgataaaaagacatcgagctgcttgtttgatccaagcacattatagaggatataaaggaaggcaggtctttcttcggcagaaatctgctgctttgatcatacaaaaatatatacgagccagggaggctggaaagcatgaaaggataaaatatattgaatttaaaaaatctacagttatcctacaagcactggtgcgtggttggctagtacgaaaaagatttttagaacagagagccaaaattcgacttcttcacttcactgcagctgcatattatcacctgaatgctgttagaattcaaagagcctataaactttacctggctgtgaagaatgctaacaagcaggttaattcagtcatctgtattcagagatggtttcgagcaagattacaagaaaagagatttattcagaaatatcatagcatcaaaaagattgagcatgaaggtcaagaatgtctgagccagcgaaatagggctgcatcagtaatacagaaagcagtgcgccattttctcctccgtaaaaagcaggaaaaattcactagtggaatcattaaaattcaggcattatggagaggctattcttggaggaagaaaaatgattgtacaaaaattaaagctatacgactaagtcttcaagttgttaatagggagattcgagaagaaaacaaactctacaaaagaactgcacttgcacttcattaccttttgacatataagcacctttctgccattcttgaggccttaaaacacctagaggtagttactagattgtctccactttgttgtgagaacatggcccagagtggagcaatttctaaaatatttgttttgatccgaagttgtaatcgcagtattccttgtatggaagtcatcagatatgctgtgcaagtcttgcttaatgtatctaagtatgagaaaactacttcagcagtttatgatgtagaaaattgtatagatatactattggagcttttgcagatataccgagaaaagcctggtaataaagttgcagacaaaggcggaagcatttttacaaaaacttgttgtttgttggctattttactgaagacaacaaatagagcctctgatgtacgaagtaggtccaaagttgttgaccgtatttacagtctctacaaacttacagctcataaacataaaatgaatactgaaagaatactttacaagcaaaagaagaattcttctataagcattccttttatcccagaaacacctgtaaggaccagaatagtttcaagacttaagccagattgggttttgagaagagataacatggaagaaatcacaaatcccctgcaagctattcaaatggtgatggatacgcttggcattccttattagtaaatgtaaacattttcagtatgtatagtgtaaagaaatattaaagccaatcatgagtacgtaaagtgatttttgctctccgtgtacaacttttaaaatctgactttgttttaaaaaaacataaactgttcattacattcttcatttttatcatttatagttttatgcatgtaataaactaatatgtcataagatg

SEQ ID NO: 103383 - DNA, 4427 bp, Homo sapiens
  Payload ID: 153
  Gene Symbol: ASPM
  Gene Name: abnormal spindle microtubule assembly
  ENST ID: ENST00000612785
  CDS Start-End: 258-4427
attggtggaggcggcaagtttaaacagagtcaaaacgccatacttgtttggctcctctttttaatttgcgagtttattgggcttgttttctgttttctagggagtaggttagtggaaaagaaaaagggccgaattcactcccacgacctctacagccgcccctgaggggaagcggtcagcgtaagtcccggatccccgctccggagccgcctcgtgggagcggggcaaggagatccaggaggggtctcgaatctgccatggcgaaccggcgagtggggcgaggctgctgggaagtgagcccgaccgagcggaggccgcccgcggggctgcggggccccgcggccgaggaggaggcgtcttccccgccggtcctgtctctcagccacttctgcaggtctcctttcctttgcttcggggacgttctcctgggagcctcacggacgctgtctctggccctagacaaccctaacgaggaggtggcagaagtgaagatctcccacttcccggccgcggacctgggcttcagtgtgtcgcagcgctgtttcgtgttgcagcctaaagagaaaattgttatttctgttaactggacaccactcaaagaaggccgagtaagagagattatgacatttcttgtaaatgatgttctgaaacaccaagctatattactaggaaatgcagaagagcagaaaaagaaaaagaggagtctttgggataccattaaaaagaagaaaatttcagcctctacaagtcacaacagaagggtttcaaatattcagaatgttaataaaacatttagtgtttcccaaaaagttgacagaagatacagacagcaaacatactttaataagttaaagaaaataacaaaaacagtacagcaaagatactgggcaatgaaagaaagaaacatacaatttcaaaggtataacaaactgaggcattctgtaatatacattcaggctatttttaggggaaagaaagctagaagacatttaaaaatgatgcatatagccgcaactctcattcagaggagatttagaactctaatgatgagaagaagattcctctctctcaagaaaactgctattttgattcagagaaaatatcgggcacatctttgtacaaagcatcacttacagttccttcaggtacaaaatgcagttattaaaatccagtcatcatacagaagatggatgataaggaaaaggatgcgagagatgcacagggctgctactttcatccagtctactttcagaatgcacagattacatatgagatatcaggctttgaaacaggcctccgttgtgatccaacagcaataccaagcaaatagagctgcaaaactgcagaggcagcattatctcagacaaagacactctgctgtgatccttcaggctgcattcaggggtatgaaaactagaagacatttgaagagtatgcattcctctgcaacccttattcagagtaggtttagatcattactggtgaggagaagattcatttccctcaaaaaagctactatttttgttcagaggaaatatcgagccaccatttgtgccaaacataaattgtaccaattcttgcacttaagaaaggcagccattacaatacagtcatcttacagaagactgatggtaaagaagaagttacaagaaatgcaaagggctgcagttctcattcaggctactttcaggatgtacagaacatatattacatttcagacttggaaacatgcttcaattctaattcagcaacattatcgaacatatagagctgcaaaattacaaagagaaaattatatcagacaatggcattctgctgtggttattcaggctgcatataaaggaatgaaagcaagacaacttttaagggaaaaacacaaagcttctatcgtaatacaaagcacctacagaatgtataggcagtattgtttctaccaaaagcttcagtgggctacaaaaatcatacaagaaaaatatagagcaaataaaaagaaacagaaagtatttcaacacaatgaacttaagaaagagacttgtgttcaggcaggttttcaggacatgaacataaaaaaacagattcaggaacagcaccaggctgccattattattcagaagcattgtaaagcctttaaaataaggaagcattatctccaccttagagcaacagtagtttctattcaaagaagatacagaaaactaactgcagtgcgtacccaagcagttatttgtatacagtcttattacagaggctttaaagtacgaaaggatattcaaaatatgcaccgggctgccacactaattcagtcattctatcgaatgcacagggccaaagttgattatgaaacaaagaaaactgcaattgtggttatacagaattattataggttgtatgttagagtaaaaacagaaagaaaaaactttttagcagttcagaaatctgtacgaactattcaggctgcttttagaggcatgaaagttagacaaaaattgaaaaatgtatcagaggaaaagatggcagccattgttaaccaatctgcactctgctgttacagaagtaaaactcagtatgaagctgttcaaagtgaaggtgttatgattcaagagtggtataaagcttctggccttgcttgttcacaggaagcagagtatcattctcaaagtagggctgcagtaacaattcaaaaagctttttgtagaatggtcacaagaaaactggaaacacagaaatgtgctgccctacggattcagttcttccttcagatggctgtgtatcggagaagatttgttcagcagaaaagagctgctatcactttacagcattattttaggacgtggcaaaccagaaaacagtttttactatatagaaaagcagcagtggttttacaaaatcactacagagcatttctgtctgcaaaacatcaaagacaagtctatttacagatcagaagcagtgttatcattattcaagctagaagtaaaggatttatacagaaacggaagtttcaggaaattaaaaatagcaccataaaaattcaggctatgtggaggagatatagagccaagaaatatttatgtaaagtgaaagctgcctgcaagattcaagcctggtatagatgttggagagcacacaaagaatatctagctatattaaaagctgttaaaattattcaaggttgcttctataccaaactagagagaacacggtttttgaatgtgagagcatcagcaattatcattcagagaaaatggagagctatacttcctgcaaagatagctcatgaacacttcttaatgataaaaagacatcgagctgcttgtttgatccaagcacattatagaggatataaaggaaggcaggtctttcttcggcagaaatctgctgctttgatcatacaaaaatatatacgagccagggaggctggaaagcatgaaaggataaaatatattgaatttaaaaaatctacagttatcctacaagcactggtgcgtggttggctagtacgaaaaagatttttagaacagagagccaaaattcgacttcttcacttcactgcagctgcatattatcacctgaatgctgttagaattcaaagagcctataaactttacctggctgtgaagaatgctaacaagcaggttaattcagtcatctgtattcagagatggtttcgagcaagattacaagaaaagagatttattcagaaatatcatagcatcaaaaagattgagcatgaaggtcaagaatgtctgagccagcgaaatagggctgcatcagtaatacagaaagcagtgcgccattttctcctccgtaaaaagcaggaaaaattcactagtggaatcattaaaattcaggcattatggagaggctattcttggaggaagaaaaatgattgtacaaaaattaaagctatacgactaagtcttcaagttgttaatagggagattcgagaagaaaacaaactctacaaaagaactgcacttgcacttcattaccttttgacatataagcacctttctgccattcttgaggccttaaaacacctagaggtagttactagattgtctccactttgttgtgagaacatggcccagagtggagcaatttctaaaatatttgttttgatccgaagttgtaatcgcagtattccttgtatggaagtcatcagatatgctgtgcaagtcttgcttaatgtatctaagtatgagaaaactacttcagcagtttatgatgtagaaaattgtatagatatactattggagcttttgcagatataccgagaaaagcctggtaataaagttgcagacaaaggcggaagcatttttacaaaaacttgttgtttgttggctattttactgaagacaacaaatagagcctctgtaagtattagtcagttgcctttctttaagattatttttctgtggtcttaa

SEQ ID NO: 103384 - DNA, 1147 bp, Homo sapiens
  Payload ID: 154
  Gene Symbol: ABO
  Gene Name: ABO blood group (transferase A, alpha 1-3-N-acetylgalactosaminyltransferase
  transferase B, alpha 1-3-galactosyltransferase)
  ENST ID: ENST00000538324
  CDS Start-End: 26-1147
ggaggccgagaccagacgcggagccatggccgaggtgttgcggacgctggccggaaaaccaaaatgccacgcacttcgacctatgatccttttcctaataatgcttgtcttggtcttgtttggttacggggtcctaagccccagaagtctaatgccaggaagcctggaacgggggttctgcatggctgttagggaacctgaccatctgcagcgcgtctcgttgccaaggatggtctacccccagccaaaggtgctgacaccgtgtaggaaggatgtcctcgtgaccccttggctggctcccattgtctgggagggcacattcaacatcgacatcctcaacgagcagttcaggctccagaacaccaccattgggttaactgtgtttgccatcaagaaatacgtggctttcctgaagctgttcctggagacggcggagaagcacttcatggtgggccaccgtgtccactactatgtcttcaccgaccagccggccgcggtgccccgcgtgacgctggggaccggtcggcagctgtcagtgctggaggtgcgcgcctacaagcgctggcaggacgtgtccatgcgccgcatggagatgatcagtgacttctgcgagcggcgcttcctcagcgaggtggattacctggtgtgcgtggacgtggacatggagttccgcgaccacgtgggcgtggagatcctgactccgctgttcggcaccctgcaccccggcttctacggaagcagccgggaggccttcacctacgagcgccggccccagtcccaggcctacatccccaaggacgagggcgatttctactacctgggggggttcttcggggggtcggtgcaagaggtgcagcggctcaccagggcctgccaccaggccatgatggtcgaccaggccaacggcatcgaggccgtgtggcacgacgagagccacctgaacaagtacctgctgcgccacaaacccaccaaggtgctctcccccgagtacttgtgggaccagcagctgctgggctggcccgccgtcctgaggaagctgaggttcactgcggtgcccaagaaccaccaggcggtccggcgtgagcggctgccaggggctctgggagggctgccggcagccccgtccccctcccgcccttggttttag

SEQ ID NO: 103385 - DNA, 1577 bp, Homo sapiens
  Payload ID: 154
  Gene Symbol: ABO
  Gene Name: ABO blood group (transferase A, alpha 1-3-N-acetylgalactosaminyltransferase
  transferase B, alpha 1-3-galactosyltransferase)
  ENST ID: ENST00000611156
  CDS Start-End: 26-1087
ggaggccgagaccagacgcggagccatggccgaggtgttgcggacgctggccggaaaaccaaaatgccacgcacttcgacctatgatccttttcctaataatgcttgtcttggtcttgtttggttacggggtcctaagccccagaagtctaatgccaggaagcctggaacgggggttctgcatggctgttagggaacctgaccatctgcagcgcgtctcgttgccaaggatggtctacccccagccaaaggtgctgacaccgtgtaggaaggatgtcctcgtgaccccttggctggctcccattgtctgggagggcacattcaacatcgacatcctcaacgagcagttcaggctccagaacaccaccattgggttaactgtgtttgccatcaagaaatacgtggctttcctgaagctgttcctggagacggcggagaagcacttcatggtgggccaccgtgtccactactatgtcttcaccgaccagccggccgcggtgccccgcgtgacgctggggaccggtcggcagctgtcagtgctggaggtgcgcgcctacaagcgctggcaggacgtgtccatgcgccgcatggagatgatcagtgacttctgcgagcggcgcttcctcagcgaggtggattacctggtgtgcgtggacgtggacatggagttccgcgaccacgtgggcgtggagatcctgactccgctgttcggcaccctgcaccccggcttctacggaagcagccgggaggccttcacctacgagcgccggccccagtcccaggcctacatccccaaggacgagggcgatttctactacctgggggggttcttcggggggtcggtgcaagaggtgcagcggctcaccagggcctgccaccaggccatgatggtcgaccaggccaacggcatcgaggccgtgtggcacgacgagagccacctgaacaagtacctgctgcgccacaaacccaccaaggtgctctcccccgagtacttgtgggaccagcagctgctgggctggcccgccgtcctgaggaagctgaggttcactgcggtgcccaagaaccaccaggcggtccggaacccgtgagcggctgccaggggctctgggagggctgccggcagccccgtccccctcccgcccttggttttagcagaacgggtaaactctgtttcctttgtccgtcctgttgtgagtaactgaagcctaggccccgtccccacctcaaatcacacacaccccctccccaccacagagacaccattacatacacagacacacacagaaagacacacacagacacaaaatcacacacacaccctccccgccacagagacaccattacatacacagacacacacagaaagacacagacacaaaatcacacacacaccctccccgccacagagacacaccattacatacacagacacgcaatcgcagatacgcccttccggccacagaaacacaccattacacacacatacacagaaagacacacacagacacacaatcacacgcagcccctccccgccacagagacacaccattacatacacagacacacacagaaagacac

SEQ ID NO: 103386 - DNA, 845 bp, Homo sapiens
  Payload ID: 155
  Gene Symbol: ABRACL
  Gene Name: ABRA C-terminal like
  Uniprot ID: Q9P1F3
  ENST ID: ENST00000367660
  CDS Start-End: 201-446
gggcggcccctttcttgagcgcagaaacacttacttttccccctaccctgctcctcctcctccacagccgtctttctctttgcctcagccacttccttccttggcctcaccctccccagtgcactgaagaaggtaaccgggtccagacccacgcggcgccagttctccggcgggaaggaaaaccgcgcagagaggcagcaatgaatgtggatcacgaggttaacctcttagtggaggaaattcatcgtttgggttcaaaaaatgctgatggaaagttaagcgtgaaatttggggtcctcttccgtgatgataaatgtgccaacctctttgaagcattggtaggaactcttaaagctgcaaaacgaaggaagattgtaacatatccaggagagctgcttctgcaaggtgttcatgatgatgttgacattatattactgcaagattaatgtggtttacatatctttatgtactgccattttttgtttctggtaaactggaatataaagtgaaagaacaaacatttgaacatacttaatgtatttttatagaactttgtaaacgaaaggagattcatgttttagaagtctgtccttttttatatcttgaaagaaaatctatgtatgatgctataaaataaatcctattatttttctcaggaatctggttaggaattgcaggcaatgagattttttgcggggcagggatgggaatgtttgttcataaataattagacattttctatagatatttgacattctgcgaaagcaacaagcaaactgaagaccaactcctatgagaaatattatgatgtttatgtaataaagacatgtaactgtcttaaattt

SEQ ID NO: 103387 - DNA, 456 bp, Homo sapiens
  Payload ID: 155
  Gene Symbol: ABRACL
  Gene Name: ABRA C-terminal like
  ENST ID: ENST00000461027
  CDS Start-End: 41-244
agttctccggcgggaaggaaaaccgcgcagagaggcagcaatgaatgtggatcacgaggttaacctcttagtggaggaaattcatcgtttgggttcaaaaagtaagtatctgacagagatagagtatttctcctggctttaccttggaacaggtgagactggcatgctggagaagcctatgaaggggtcacccagggcttcaggacacaggtctgggagctctgcccacagccccaggttataactgcccttagccaggaattgacatctggagacacggggcttttggggtattgtgattctgatgcagggaatagttgagatatttcattatttttcgatagaaagcaaattaccaagcttcttgtatttgactgcattgaaatttggtaattgaatcatgttcaaatttttacttgtcatactattaaaattcatgttttctgccttgttctg

SEQ ID NO: 103388 - DNA, 7553 bp, Homo sapiens
  Payload ID: 156
  Gene Symbol: AIM1
  Gene Name: absent in melanoma 1
  Uniprot ID: Q9Y4K1
  ENST ID: ENST00000369066
  CDS Start-End: 488-5659
agatgccaccaccactgccaagcagctgcattcctcgccgggaaattcctccaggcaagagaacgcagagacgcccgcccgcagtccgggggaggacgcttcaccaggtgctggccacgaacaggaggctttcctgggtgtgaggggtgcgccagggtcgcccacccaggagcggcccgcgggaggactaggcgaggcccctaacggagcccccagtgtgtgtgccgaagaaggctccctggggccccgcaacgcccgcagccagccccccaagggcgcgtctgatttgccaggtgagcctccggccgagggcgcagcgcacacggccagctccgcgcaggcagactgcacagcccgccccaagggtcacgcccaccctgctaaggtgctaactttggacatctacttgagtaagactgagggggcacaagtggacgagccggtcgtgattactcccagagcggaagattgcggtgactgggacgacatggagaagaggtccagcggccgtaggtcggggaggcggagggggtcgcagaaatccaccgactcccccggcgcggacgccgagctccctgagagcgctgccagggacgacgcggtgttcgacgacgaggtggcgccaaacgcggccagcgataacgcctcggcggaaaagaaagtgaaatctccgcgggcagccctcgacgggggcgttgcctccgctgcgagcccagagtccaagcccagccccggtaccaaagggcagctccgaggggagtcggaccggagcaaacagccacccccggcttcgtcccccacgaagaggaagggcaggagccgtgccctcgaggccgtgcccgccccgcccgccagcggcccccgggctcccgccaaggagtccccacccaagagggtgcccgatcccagcccagtcaccaagggcactgcggccgagagcggggaggaggcggcgcgggccatcccccgcgagctcccggtcaagagcagctcgctgctgccggagatcaagcccgagcacaagaggggcccgctccccaaccacttcaacggccgggcagagggaggtcgaagcagagagctgggcagagcggccggagcgcctggagcttctgacgccgacggcttgaagcccaggaaccatttcggcgtgggcaggtcgacagtgaccactaaagtgaccctccctgccaagcccaaacatgtggaactaaatcttaaaacccctaagaatcttgacagtttgggaaatgagcacaatccatttagccagccagttcacaaaggcaacactgccaccaaaatctccttatttgaaaacaaacggacaaacagtagcccaagacacactgacattcgaggccaaaggaatactcctgcctctagtaaaacgtttgttgggagggcaaagctgaatttagccaaaaaagccaaagaaatggagcaacctgaaaagaaagtaatgccaaacagtccccagaatggtgtgctggttaaggaaactgctatagaaaccaaagttaccgtctcggaagaagagattctgccagcaaccagaggaatgaatggagactcttctgagaatcaagctcttggtcctcagcctaaccaagatgataaagcagatgtacaaacagatgctggctgcctttcagaaccagtggcttctgctctgattcctgtcaaggatcataagctcttagagaaggaggactcagaggctgcagacagcaaaagccttgtacttgaaaatgtaaccgatacagcacaagacatccccaccactgtggataccaaagatttacctccaacggccatgccaaagccacagcatacattttctgactcacagtcccctgctgagtcatctcctgggccttctctttcactgtctgcacccgctcctggggatgttcccaaagacacatgtgttcaatcacccataagcagtttcccatgcactgatctaaaagtgtcagaaaaccataaaggatgtgttttgcctgtgtctcgtcagaacaatgagaaaatgccacttttagaacttggaggagaaacaacccctcctttgtccacagagcgtagtccagaagctgtgggaagtgagtgtccatccagagtcctcgtccaggtcaggtccttcgtgctccccgtggagagcacccaggatgtgagctcccaggtcatcccagagagctctgaagttagagaagtgcagttgccaacttgtcacagtaatgaacctgaagtggtttccgttgcaagttgtgctcccccacaagaggaagtactgggcaatgaacactctcattgcacagcagagctcgcggcaaaatctggcccacaagtcataccgccagcatcagagaaaactctgcctattcaggctcaaagtcagggcagcagaacacccctgatggctgaatccagtcccaccaactctcccagcagcggaaatcacttagccactcctcaaaggccagatcagactgttacaaatggccaggatagccctgccagccttttgaacatttctgctggtagtgatgatagtgtatttgattcttcttctgatatggaaaaattcactgaaattataaaacagatggatagcgcagtttgtatgcccatgaaaagaaagaaggccaggatgccaaactctcctgctcctcactttgccatgcctcctattcacgaagaccatttagaaaaggtgtttgatcccaaagtgtttacctttggtttggggaagaagaaggaaagtcagccagaaatgtcaccggctttacatttgatgcagaaccttgacacaaaatccaaactgagacccaaacgtgcatctgctgaacagagcgtcctcttcaagtccctgcacaccaacactaatgggaacagtgagcctctggtgatgccggaaatcaatgacaaagagaacagggacgtcacaaatggtggcattaagagatcgagactagaaaaaagtgcacttttctcaagcttgttatcttctttaccacaagacaaaatcttttctccttctgtgacatcagtcaacactatgaccacggctttcagtacttctcagaacggttccctatctcagtcttcagtgtcacagcccacgactgagggtgccccgccctgtggtttgaacaaagaacagtcaaatcttctgcccgacaactccttaaaggtcttcaatttcaactcgtcaagtacatcacactccagtttgaaaagtccaagccacatggaaaaatacccgcaaaaagagaaaaccaaagaagatctggattcacgaagcaacctacacttgccagaaactaaattttctgaattgtcaaaactgaagaatgatgatatggaaaaggctaatcatattgaaagtgttattaaatcaaacttgccaaactgtgcaaacagtgacaccgacttcatgggtcttttcaaatcaagccggtatgacccaagcatttctttttctggaatgtcattatcagacacaatgacacttagaggaagtgtccaaaataaactcaatccccgacctggaaaggtagtgatatatagtgaacccgacgtctctgagaagtgcattgaagttttcagtgacattcaggattgcagttcttggagcctctctccagtgatactcataaaagttgttagaggatgttggattttgtatgagcaaccaaattttgaagggcactccatccccttagaagaaggagaattggaactctctggtctctggggtatagaagacattttggaaaggcacgaagaagcagagtctgataagccagtggtgattggttccatcagacatgtggttcaggattacagagttagtcacattgacttatttactgaaccagaagggttaggaatcctaagttcctactttgatgatactgaagaaatgcagggatttggtgtaatgcagaagacttgttccatgaaagtacattggggcacgtggctgatttatgaagaacctggatttcagggtgttcctttcatcctggaacctggtgaataccctgacttgtccttctgggatacagaagaagcgtacattggatccatgcggcctctgaaaatgggtggccgtaaagttgaattccctacagatccaaaggtagttgtttatgaaaagcctttctttgaaggaaaatgtgtggaactagaaacaggaatgtgtagttttgtcatggagggaggtgaaacagaagaggcgactggagacgatcatttgccgtttacgtcagtggggtctatgaaagttctaagaggcatttgggttgcatatgagaaacctggatttaccggtcatcagtatttgctagaagaaggagaatacagggactggaaagcctggggaggttacaatggagagcttcagtctttacgacctatattaggtgatttttcaaatgctcacatgataatgtacagtgaaaaaaactttggatccaaaggttccagtattgatgtattgggaattgttgctaatttaaaggagactggatatggagtgaagacacagtctattaatgtactgagtggagtatgggtagcctatgaaaatcctgacttcacaggagaacagtatatactggataaaggattttataccagttttgaggactggggaggcaaaaattgtaagatctcttctgttcaacctatatgtttggattctttcactggcccaaggagacgaaatcagattcacttgttttcagaaccacagtttcaaggtcacagtcaaagttttgaagaaacaacaagtcaaattgatgattcattttctaccaagtcttgcagagtttcaggaggcagctgggttgtatatgatggagaaaatttcactggtaatcaatacgtgttggaagaaggccattatccttgtctgtctgcaatgggatgcccgcctggagcaactttcaagtctcttcgttttatagatgttgaattttctgaaccaacaattattctctttgaaagagaagacttcaaaggaaaaaagattgaacttaatgcagaaactgtcaatctccgatccctgggattcaacacacaaatacgctctgttcaggttattggtggcatatgggttacttatgaatatggcagttacagagggcgacagttcctattgtcacctgcagaagtacctaattggtatgaattcagtggctgtcgccaaataggttctctacgaccttttgttcagaagcgaatttatttcagacttcgaaacaaagcaacagggttattcatgtcaaccaatggaaacttagaggatctgaagcttctgaggatacaggtcatggaggatgtcggggccgatgatcagatttggatctatcaagaaggatgtatcaaatgcaggatagcagaagactgctgcctgacgattgtgggcagcctggtaacatctggctccaagctaggcctggccctggaccagaatgctgacagccagttctggagcttgaagtccgatggcaggatttacagcaagttgaagccaaatttagttttagacattaaagggggcacacagtatgatcaaaatcacattatcctcaacactgtcagcaaagagaagtttacacaagtgtgggaagccatggtcctatatacctgaacaaagaaggaagaagaatcttctggaggtccttccagccaccttatttcttaaaaaggacaatgctgatggaagaccagactggaaagtggatcgactcctccttcattgattctaaattcaaccttaaatcatgctgccatgactcagagaacttactcatcgtttcaaaagactatcatagctttaaaccaataatttgtcctcctttcatttcttgcctttcatttttggtagctgcttaaacaggttgcctaattagcagcttttgggtgattttgtaaaatgttatatcaagatttcaagactgtgtacattttaaattatttccaaagatagtgacaggagagaactggaacaaatttaccaactttgtggacctacaaagcccttacactttaaagggtaagacaaaggcttaagtttgaaaggtagagaactgtttagcatctgagaagaaatactttattaggcctgtaattttggttcttggccttaaacactttctggaacctttaaatatgctgcatagcacaatgggaaagccttaggtattcacacatttaaggaactctaaacaaaatactattttcctttagttcatattaaaaattaatacattttaaaaatttaatgtcaaagtctggtaacatttgttagtaggatttgagttattattttttgagacaggatctcaggctggagtgcagtggcacaatcacggctcactgcagcctctacctccccaggctcaggtgatcctcccacctcagcctcccaagtagctgggactataggcacacatcaccaagcccagccaaattttgttttttttttgtagagatggggtttcatcacgttgcccaggctgatctcgaacctctgggctcaagcaattcactcgcctcggcctcccaaaatgctgggattacaggcctgagccactgcgcccagccaggatttgaattattttaactcatccatgggctgccctagaatgtcacaaatgagggttgtttaatgcctttcttatagctgctactggaacactattatgacctaatttatgagccatccttactcatctacaagtgctgaagcaatgttacatacttttttgctaaactcagattttttagcctaatttcttgtcctcctatccacctgcatccacacatggcctgcatggggctgccttccctgcagtgttctgcagccatgcttcagggtatagctgttggtggacagcctcaggtcttgggggcactatagccactaaacgaggtgtgaaaggctcaagaggatgaccagcaattaattatccccagaaagtgaaggaaaagagacctttagggatgttgctggtcaagtcttgatttgaccggagtcaaatcaatcttcaagcaatcttggaatcctcaactgcagtaagcatttcaaaatgcaaacaaactgcttaacaactgacaagacaccagcccatacgctgctcttccaacagtgggttctagctttgaacaaaagtgctaaacatttccttgaatatattcttcctctttttgtcctcatcactcaatactggtgctcttgtcacaggtagaacagcttgtttcttttccatctattcaagtgtgtttctaattctaaaatgctgatcttctctggagtctatggtaggcaattatggtcactggaatagtttgtcttgttttaaaatattattggtgcatgtacaacagcatccaacatatctgtcttgttcctagatatatagctctgattttaggccttttgtgcataccattacaatatggtggggtaagacattctacagtagcctgtgctgaactgatctcttaaataaacttgcttctggttaactatgttgatgaaa

SEQ ID NO: 103389 - DNA, 1032 bp, Homo sapiens
  Payload ID: 156
  Gene Symbol: AIM1
  Gene Name: absent in melanoma 1
  ENST ID: ENST00000457437
  CDS Start-End: 85-1032
gagagttaaaccgaagggaatggtagagacggcaaccccgggcctgtgcccagctgaaggatgaactgagggcaggatcgttaaatgcagaagccgaagacagtggcctgggagaatctgggtccagagatgtcagctcttggaactgctttttcaagagaaggtggccgtaaagttgaattccctacagatccaaaggtagttgtttatgaaaagcctttctttgaaggaaaatgtgtggaactagaaacaggaatgtgtagttttgtcatggagggaggtgaaacagaagaggcgactggagacgatcatttgccgtttacgtcagtggggtctatgaaagttctaagaggcatttgggttgcatatgagaaacctggatttaccggtcatcagtatttgctagaagaaggagaatacagggactggaaagcctggggaggttacaatggagagcttcagtctttacgacctatattaggtgatttttcaaatgctcacatgataatgtacagtgaaaaaaactttggatccaaaggttccagtattgatgtattgggaattgttgctaatttaaaggagactggatatggagtgaagacacagtctattaatgtactgagtggagtatgggtagcctatgaaaatcctgacttcacaggagaacagtatatactggataaaggattttataccagttttgaggactggggaggcaaaaattgtaagatctcttctgttcaacctatatgtttggattctttcactggcccaaggagacgaaatcagattcacttgttttcagaaccacagtttcaaggtcacagtcaaagttttgaagaaacaacaagtcaaattgatgattcattttctaccaagtcttgcagagtttcaggaggcagctgggttgtatatgatggagaaaatttcactggtaatcaatacgtgttggaagaaggccattatccttgtctgtctgcaatgggatgcccgcctggagcaactttcaagtctcttcgttttatagatgtt

SEQ ID NO: 103390 - DNA, 9909 bp, Homo sapiens
  Payload ID: 156
  Gene Symbol: AIM1
  Gene Name: absent in melanoma 1
  ENST ID: ENST00000633556
  CDS Start-End: 102-6497
gagaaaggcgggcgagctggcgctcaggtgtgttcttccatagggcccgggcggcagagaggaccgcgtcccggcagtcggagcgggaggaggacaagacgatgccgctgtccccgccagcccagggcgaccccggggagcccagcccgtgcaggccccctaagaagcacaccaccttccacctctggcgctccaaaaagaagcagcagccggcgccgcctgactgtggggtgttcgttccgcacccgctcccggcgcctgccggagaggccagagctttggatgtagtcgatggaaaatatgtggttcgagactcccaggaatttccactgcactgtggggaatcccagttcttccacaccaccagtgaggcgcttggttccttacttctagagtctggaatatttaaaaagtccagagcacaacctccagaagacaacagaaggaagccagttttggggaaacttggcactctattcactgcaggaaggagaagaaacagtagaaacgggttagagagtcccaccagatcaaatgccaaaccactctctcccaaagatgtggtagcctctcctaagctcccagagagagagagtgagaggagcagatctcagagcagccaactgaagcaaacggacacaagcgaggagggctccccgcgggagaatccccgagaggcagagggcgagctccccgagagcggtggccccgcagccccccctgacgccgagctgtcacctcgctggagcagcagtgcagcggctgtggctgtgcagcagtgccatgaaaatgattcaccccaattagaacctctggaggcagagggagagcctttcccagatgccaccaccactgccaagcagctgcattcctcgccgggaaattcctccaggcaagagaacgcagagacgcccgcccgcagtccgggggaggacgcttcaccaggtgctggccacgaacaggaggctttcctgggtgtgaggggtgcgccagggtcgcccacccaggagcggcccgcgggaggactaggcgaggcccctaacggagcccccagtgtgtgtgccgaagaaggctccctggggccccgcaacgcccgcagccagccccccaagggcgcgtctgatttgccaggtgagcctccggccgagggcgcagcgcacacggccagctccgcgcaggcagactgcacagcccgccccaagggtcacgcccaccctgctaaggtgctaactttggacatctacttgagtaagactgagggggcacaagtggacgagccggtcgtgattactcccagagcggaagattgcggtgactgggacgacatggagaagaggtccagcggccgtaggtcggggaggcggagggggtcgcagaaatccaccgactcccccggcgcggacgccgagctccctgagagcgctgccagggacgacgcggtgttcgacgacgaggtggcgccaaacgcggccagcgataacgcctcggcggaaaagaaagtgaaatctccgcgggcagccctcgacgggggcgttgcctccgctgcgagcccagagtccaagcccagccccggtaccaaagggcagctccgaggggagtcggaccggagcaaacagccacccccggcttcgtcccccacgaagaggaagggcaggagccgtgccctcgaggccgtgcccgccccgcccgccagcggcccccgggctcccgccaaggagtccccacccaagagggtgcccgatcccagcccagtcaccaagggcactgcggccgagagcggggaggaggcggcgcgggccatcccccgcgagctcccggtcaagagcagctcgctgctgccggagatcaagcccgagcacaagaggggcccgctccccaaccacttcaacggccgggcagagggaggtcgaagcagagagctgggcagagcggccggagcgcctggagcttctgacgccgacggcttgaagcccaggaaccatttcggcgtgggcaggtcgacagtgaccactaaagtgaccctccctgccaagcccaaacatgtggaactaaatcttaaaacccctaagaatcttgacagtttgggaaatgagcacaatccatttagccagccagttcacaaaggcaacactgccaccaaaatctccttatttgaaaacaaacggacaaacagtagcccaagacacactgacattcgaggccaaaggaatactcctgcctctagtaaaacgtttgttgggagggcaaagctgaatttagccaaaaaagccaaagaaatggagcaacctgaaaagaaagtaatgccaaacagtccccagaatggtgtgctggttaaggaaactgctatagaaaccaaagttaccgtctcggaagaagagattctgccagcaaccagaggaatgaatggagactcttctgagaatcaagctcttggtcctcagcctaaccaagatgataaagcagatgtacaaacagatgctggctgcctttcagaaccagtggcttctgctctgattcctgtcaaggatcataagctcttagagaaggaggactcagaggctgcagacagcaaaagccttgtacttgaaaatgtaaccgatacagcacaagacatccccaccactgtggataccaaagatttacctccaacggccatgccaaagccacagcatacattttctgactcacagtcccctgctgagtcatctcctgggccttctctttcactgtctgcacccgctcctggggatgttcccaaagacacatgtgttcaatcacccataagcagtttcccatgcactgatctaaaagtgtcagaaaaccataaaggatgtgttttgcctgtgtctcgtcagaacaatgagaaaatgccacttttagaacttggaggagaaacaacccctcctttgtccacagagcgtagtccagaagctgtgggaagtgagtgtccatccagagtcctcgtccaggtcaggtccttcgtgctccccgtggagagcacccaggatgtgagctcccaggtcatcccagagagctctgaagttagagaagtgcagttgccaacttgtcacagtaatgaacctgaagtggtttccgttgcaagttgtgctcccccacaagaggaagtactgggcaatgaacactctcattgcacagcagagctcgcggcaaaatctggcccacaagtcataccgccagcatcagagaaaactctgcctattcaggctcaaagtcagggcagcagaacacccctgatggctgaatccagtcccaccaactctcccagcagcggaaatcacttagccactcctcaaaggccagatcagactgttacaaatggccaggatagccctgccagccttttgaacatttctgctggtagtgatgatagtgtatttgattcttcttctgatatggaaaaattcactgaaattataaaacagatggatagcgcagtttgtatgcccatgaaaagaaagaaggccaggatgccaaactctcctgctcctcactttgccatgcctcctattcacgaagaccatttagaaaaggtgtttgatcccaaagtgtttacctttggtttggggaagaagaaggaaagtcagccagaaatgtcaccggctttacatttgatgcagaaccttgacacaaaatccaaactgagacccaaacgtgcatctgctgaacagagcgtcctcttcaagtccctgcacaccaacactaatgggaacagtgagcctctggtgatgccggaaatcaatgacaaagagaacagggacgtcacaaatggtggcattaagagatcgagactagaaaaaagtgcacttttctcaagcttgttatcttctttaccacaagacaaaatcttttctccttctgtgacatcagtcaacactatgaccacggctttcagtacttctcagaacggttccctatctcagtcttcagtgtcacagcccacgactgagggtgccccgccctgtggtttgaacaaagaacagtcaaatcttctgcccgacaactccttaaaggtcttcaatttcaactcgtcaagtacatcacactccagtttgaaaagtccaagccacatggaaaaatacccgcaaaaagagaaaaccaaagaagatctggattcacgaagcaacctacacttgccagaaactaaattttctgaattgtcaaaactgaagaatgatgatatggaaaaggctaatcatattgaaagtgttattaaatcaaacttgccaaactgtgcaaacagtgacaccgacttcatgggtcttttcaaatcaagccggtatgacccaagcatttctttttctggaatgtcattatcagacacaatgacacttagaggaagtgtccaaaataaactcaatccccgacctggaaaggtagtgatatatagtgaacccgacgtctctgagaagtgcattgaagttttcagtgacattcaggattgcagttcttggagcctctctccagtgatactcataaaagttgttagaggatgttggattttgtatgagcaaccaaattttgaagggcactccatccccttagaagaaggagaattggaactctctggtctctggggtatagaagacattttggaaaggcacgaagaagcagagtctgataagccagtggtgattggttccatcagacatgtggttcaggattacagagttagtcacattgacttatttactgaaccagaagggttaggaatcctaagttcctactttgatgatactgaagaaatgcagggatttggtgtaatgcagaagacttgttccatgaaagtacattggggcacgtggctgatttatgaagaacctggatttcagggtgttcctttcatcctggaacctggtgaataccctgacttgtccttctgggatacagaagaagcgtacattggatccatgcggcctctgaaaatgggtggccgtaaagttgaattccctacagatccaaaggtagttgtttatgaaaagcctttctttgaaggaaaatgtgtggaactagaaacaggaatgtgtagttttgtcatggagggaggtgaaacagaagaggcgactggagacgatcatttgccgtttacgtcagtggggtctatgaaagttctaagaggcatttgggttgcatatgagaaacctggatttaccggtcatcagtatttgctagaagaaggagaatacagggactggaaagcctggggaggttacaatggagagcttcagtctttacgacctatattaggtgatttttcaaatgctcacatgataatgtacagtgaaaaaaactttggatccaaaggttccagtattgatgtattgggaattgttgctaatttaaaggagactggatatggagtgaagacacagtctattaatgtactgagtggagtatgggtagcctatgaaaatcctgacttcacaggagaacagtatatactggataaaggattttataccagttttgaggactggggaggcaaaaattgtaagatctcttctgttcaacctatatgtttggattctttcactggcccaaggagacgaaatcagattcacttgttttcagaaccacagtttcaaggtcacagtcaaagttttgaagaaacaacaagtcaaattgatgattcattttctaccaagtcttgcagagtttcaggaggcagctgggttgtatatgatggagaaaatttcactggtaatcaatacgtgttggaagaaggccattatccttgtctgtctgcaatgggatgcccgcctggagcaactttcaagtctcttcgttttatagatgttgaattttctgaaccaacaattattctctttgaaagagaagacttcaaaggaaaaaagattgaacttaatgcagaaactgtcaatctccgatccctgggattcaacacacaaatacgctctgttcaggttattggtggcatatgggttacttatgaatatggcagttacagagggcgacagttcctattgtcacctgcagaagtacctaattggtatgaattcagtggctgtcgccaaataggttctctacgaccttttgttcagaagcgaatttatttcagacttcgaaacaaagcaacagggttattcatgtcaaccaatggaaacttagaggatctgaagcttctgaggatacaggtcatggaggatgtcggggccgatgatcagatttggatctatcaagaaggatgtatcaaatgcaggatagcagaagactgctgcctgacgattgtgggcagcctggtaacatctggctccaagctaggcctggccctggaccagaatgctgacagccagttctggagcttgaagtccgatggcaggatttacagcaagttgaagccaaatttagttttagacattaaagggggcacacagtatgatcaaaatcacattatcctcaacactgtcagcaaagagaagtttacacaagtgtgggaagccatggtcctatatacctgaacaaagaaggaagaagaatcttctggaggtccttccagccaccttatttcttaaaaaggacaatgctgatggaagaccagactggaaagtggatcgactcctccttcattgattctaaattcaaccttaaatcatgctgccatgactcagagaacttactcatcgtttcaaaagactatcatagctttaaaccaataatttgtcctcctttcatttcttgcctttcatttttggtagctgcttaaacaggttgcctaattagcagcttttgggtgattttgtaaaatgttatatcaagatttcaagactgtgtacattttaaattatttccaaagatagtgacaggagagaactggaacaaatttaccaactttgtggacctacaaagcccttacactttaaagggtaagacaaaggcttaagtttgaaaggtagagaactgtttagcatctgagaagaaatactttattaggcctgtaattttggttcttggccttaaacactttctggaacctttaaatatgctgcatagcacaatgggaaagccttaggtattcacacatttaaggaactctaaacaaaatactattttcctttagttcatattaaaaattaatacattttaaaaatttaatgtcaaagtctggtaacatttgttagtaggatttgagttattattttttgagacaggatctcaggctggagtgcagtggcacaatcacggctcactgcagcctctacctccccaggctcaggtgatcctcccacctcagcctcccaagtagctgggactataggcacacatcaccaagcccagccaaattttgttttttttttgtagagatggggtttcatcacgttgcccaggctgatctcgaacctctgggctcaagcaattcactcgcctcggcctcccaaaatgctgggattacaggcctgagccactgcgcccagccaggatttgaattattttaactcatccatgggctgccctagaatgtcacaaatgagggttgtttaatgcctttcttatagctgctactggaacactattatgacctaatttatgagccatccttactcatctacaagtgctgaagcaatgttacatacttttttgctaaactcagattttttagcctaatttcttgtcctcctatccacctgcatccacacatggcctgcatggggctgccttccctgcagtgttctgcagccatgcttcagggtatagctgttggtggacagcctcaggtcttgggggcactatagccactaaacgaggtgtgaaaggctcaagaggatgaccagcaattaattatccccagaaagtgaaggaaaagagacctttagggatgttgctggtcaagtcttgatttgaccggagtcaaatcaatcttcaagcaatcttggaatcctcaactgcagtaagcatttcaaaatgcaaacaaactgcttaacaactgacaagacaccagcccatacgctgctcttccaacagtgggttctagctttgaacaaaagtgctaaacatttccttgaatatattcttcctctttttgtcctcatcactcaatactggtgctcttgtcacaggtagaacagcttgtttcttttccatctattcaagtgtgtttctaattctaaaatgctgatcttctctggagtctatggtaggcaattatggtcactggaatagtttgtcttgttttaaaatattattggtgcatgtacaacagcatccaacatatctgtcttgttcctagatatatagctctgattttaggccttttgtgcataccattacaatatggtggggtaagacattctacagtagcctgtgctgaactgatctcttaaataaacttgcttctggttaactatgttgatgaaatctgagagtccattcagtagccctcatctcacccttcaaagagagtcagctagcagattagaaacaaatgtctgattaggatgaagcaggtttgaggggtgctggtataatagcaagaaagatttgctgaccactctctttccaaactccatagtttctgagtggaaacgaggatgagtgaggtcctggctcaagtattttactcccactaccacctgggagccctccaggaaaagagctgaggctgctccagatggaagtcaagagcagctggtatttacacctggaaaatcagatttttttttcttttgcaataactcggtagtaagaccagaccaacaattttagagaaaagcctacatctaacatacatgctaccaaacgagtgtctaacaggaataaaccaagcagaaatctcaaaacaggtctacatcaaaagttacaagcaagcatatcaggtgcaatactgaggatgagtatattaggaagtaaaaacacttaccgtaaatgaatattcgaagtgcacactgcaatgggttgattggagagatatctaaatgtaaacatttgacatcaaagtggcaagctttgggctccattggaaggctgcaatttccatggaaaagccctcagagaagcatgtttcaattgccgaaacaggcctaatccttatgcaagatgtaagggttttaaaaagttagaaactctgctctcacctttcaatattaagagcataaacaaatgaatcaccaggcagatttttatatatgacactaagagatttagaactttaagagctgtggtgaccacattatggtggaggaacaaaaaaggaaaccttggcagttagaaagctgctcagtgatgaattcaagaaggaaccagctttaaattatctcttcatgccaacatccatctatacactgaaagttttagtattgtacattaagacgatcaggcccagcagggtggttcacgcctgtaatcccagaactttgggagactgacatggtggatcacttaagcccaggagtttgagaccagcctgggcaacatggcaaaactgtctctactaaaaatacaaaaaaactagctgggtgtggtgatgcatacctgtagtcctacctacttgagaggctgaagcaggagaatcgcttaaggtcaaggctgcagtgagctgtgattgtgccactgcactccagcctgggtgacacagcgagaccctgtctctaaaacaaaaaagacaataaagtagtttaagctagtaaaacagaaggtgccacaacaacctgcaaagccagtgtgaaggaacagcttgaaaaaacttcgaatttctactgactacagacaaatccaagtgctgatatttttatatcaattactggccaaaatggtgtgtttattttttaaagcttgtatcatggaatgtataatctaatctggaaaaatgtttgaaagggatggctagaaaaaaatttgggctcacaggcactcaccaaataagaacgtcaacaatca

SEQ ID NO: 103391 - DNA, 5245 bp, Homo sapiens
  Payload ID: 157
  Gene Symbol: AIM1L
  Gene Name: absent in melanoma 1-like
  Uniprot ID: Q8N1P7
  ENST ID: ENST00000308182
  CDS Start-End: 151-5136
agctgagagcccaatcgcatcaggggagcacggcccagcagcaggagctccaggctggctggacacctgggtccccacgcagactgtgagtagagggagctggaccacagtgggacaaggacacctccagacaggttgccagggccccacatggaggaggcaggtgggcccatggcccgggccaaggcccgagtggtaagtgccacattgacatggcggcagcggccccccacccaggaagagatcaaacatggttttcacaaggtgtccctggtgtcaggggcccagatggaagccccgcagaaggagatgtttgagttcagccgtcgagaggaagtggaagtcaatggctttgcaacacaggaagaagagactgtgaattgccagggccctcgggatacagctggctccaagaacttccagagccatggacccatcttttccaagaagtacataccacctcccaaggagaaaaggcctgaggggaggctgaaggaggctgtggaccagagtgatggcagccgccaagctcccaggactgagcccccatgtgtgggagctatggccaggactgagcttttggttcccctgcctgggccccgagagccaagtccccacccaggtgtaggtctcaccagtggtagctcccggagcctcgaggaataccgagtgacacgcactgtgcggaccaccacagtggtgggaggtcatgtggaccggcggatgagcagctctgtgactgtgaggccagtgtcctcaggcgaggccctgccacggggccgtcaggtctcccgcatggtgccgccagtggtggtgggctccccaccaggctcgcccagccgcagccaggccgtgaaagtgctaagtaacctcgtgcctgctgggcacagcccccctgccagtcacctgcccaggcccacggctggcgggccaaggagcacaggtctgggcagcacagtgggggcagccttgaggcagctgcctgagaccgggacagcagagcttaaagacagctctgccctggcctctacaggcatcccagccagtgctcacctgcctaagaatcaggatgcccctgcagcctgtccggacagagaccagggcagagccccggatgccagggcctgtgagctctggcaggtgctgggagcccccagttccactgagctccctctccagacttctcagggtcaagcatcagtcccctcctctcccagactcgagacccatgtcccctctcctggcctaactcaccctgcaaagcagcctgtggtgcccactcaccccggggcccggctcactccccttgttctgccccctaaaaaaaaggacgggcccgtggacccccctgctgccaccgtcctgcccatggtgaggagcgagcatgtgacagtccctggacaacctcctgctccatccactacaagaaggaaggatgtccccagcccaggaggtctttctgctccatcgtccccaaggaataagtttgttcagaactctgaaaatgtccctgtcctcccctttacccagagggaggtcgtgaagggccccggtgctcctgctgcctcatctcccacccggaaggaggtggtgcaggggtccagtgcttctgctgcctcgtcccccacctggaaagaggtcgtgaagggccctggtgctcctgctgcctcatctcccacccagaaggaggtggtgcaggggtccagtgctcctgctgccttgttccccacctggaaagaggtcgtgaagggccccggtgctcctgatgcctcatttcccacctggaaagaggttgtgaagggccctggtgctcctgctgcctcatcccccacccagaaggaggtggtgcaggggtctggtgctcctgctgccttgtccaccaccccaaaagaggttgtgaagggccctggtgctcctgctgcctcatcgcccacccagaaagaggttgtgaagggcccctgtgctcctgctgcctcatctcccacccagaaggaggtggtgcaggggtctggtgctcctgctgccttgtcccccaagtcaactgaggttgtccagggcccaaaaggcagcagtagcatccaaaaagaggctgtccagggtattgcaggcagccttgccccgcccctcaccaaggaagagactgttcaaggcccaattgctcctgccacctcactccccaaacaggataagggggtccaggactctgaagggagccccatctcatctctcacccagaaagaggttgtgcaggaccctgatgctctccctgccccatcttcctcagtggacagggtgtcccccagcccaggaggcacccctgccccagtgccaacaggagcagaggccagcacggagtcccagcttgtctctgatcccaccgagggcaagacgtgcacagagacatcaagggaggaggatgaggtggccctggccgctgacctggagatattcctggatacgctgcggagcatggagccccctgagatcctccgcactcaccggctgccacgagcccctcgctcctcctacctgtccatgtacgccacgctgcctgccattgaggaggaccagctggggccatgggtgctgggccccggaccccaggaggtgccttcactggaagagaaagaggaggaggaggaggaggaaccagagaacccctatctgagtgacgatgagaagctccagcgcaggcaggagaaagctgggcccagcccctccagggacctccaccctgccagacccacccaggtctcctgctctcctctggagatgatgaagaagcatgtagcaggaaccaagggcccccactcagagctgggattggaactgcagggaggcagcaggcccacttcccgtcttggaggcagccttctgttcggcagtctggtgcctaccgccaaggaggcctccaccccggaaccgctgggcacaaaactatctgctctgctgccccatggggcaccggggctcaggaaggtgccaggacagttgcccctgctttgcagtgaaagatcatccccaacggagaagcttgcctgttccctgcccctggaggggtggagcccagccttaaagacccagggcaagctgaacaccaggcctggaaaggtgatcttcttctcagagtctggctgccaaggcagtggcagggaggtctggggagacatcgttgatgcctcaggctgggcccccgtagcctccataagggtagttcgaggctgctgggtgctgtacgaagagccagagttccggggtcagaagctggtcctgcctgaaggagacatggaactcagaaccccagggacaaagtggagtccccaaggcatcggctccctaaggagggttgtctgggactacagcaccccggaaatcagcctcttctctgaggagggcctcaagggggagcaagtgaagctaacagaggccttgaagaattcccagggtctggagaagcccctgcaggtggcatctgccaccgtctctgcaggactgtggctactgtaccccaaaccattattcgaagacactccctacatcctggaacctggagagtaccccacctcagaggcctggggcacatcggaccccagcgtgggctccctgaagcccatgagattgggctgcccaagtgtggagaagccaggggagcccagggctgtggtgtatgaggccccaggctttcagggccgcagctgggaagtgagccgagacatctacaaccttcagcagccagaggacagccagagcccccacctggcctctgtggggtccctgagagttctcggaggctgctgggtgggctacgagaaggagggcttccggggccaccagtatctgctggaggagggggaatacccagactggtcacactggggaggctatgacgagttgctgacctccctccgggtcatccggacggacttcggggacccggccgtcgtgctatttgaggccatggacttcgaggggcacggcgtggaggtgagcaaggcattgccggatgtggagctggtgcaacacggccccagcacacaggccatccacgtgctcagcggcgtgtgggtggcctaccaggaggtgggcttctccggggaacagtacgtgctggagaagggcgtgtatcgtaactgcgaggactggggcgctggcaacagcaccctcgcctcgctgcagccggtcctacaggtcggggagcacgatctgcacttcgtctcaaagattcagcttttctcccgccccgactttctgggcgaccacttctctttcgaagatgaccaggccgctctgcccgcctccttccgacctcagtcctgccgggtccacggcggcagctggatcctgtttgatgagacgaacttcgagggtgaccagcacattctctctgagggcgagttccccactctcacggccatgggctgcctcgcctccacagtcctgggctctctccagaaggtatccctgcacttttcagagccttccattttcctgtatggactcgagtgcttcgaggggaaggagatcgagctcagcagggaggtgcggagcctgcaagccgagggcttcaacaaccatgtgctgtctgtgcggatcaaggggggcatttgggtgctatgtgaacacagtgacttccggggccgccagtggctggtgggaagctgcgagatcaccaactggctgacctacagcggcacccagagggtgggctccctctaccccatcaagcagcgccgggtttatttccgcctctggaatgcagcactggggggattcctggcagtgccggaccatgtggaggacatgaaagcaggccgtgtggtggtcgccgacccccaagctggaggtagctgcatctggtactacgaggatgggctgctgaagaaccagatggcccccaccatgagcctacaggtgattggaccccctagcccaggctccaaggtggtgctgtgggccgagagccgcctgccgcgccagacgtggagcatcagtgaatcgggccacatctgcagccagatgttcgaaggccagatcctggacgtgaagggaggccggggctacgaccgggaccacgtggtgctatgggagccggatgaggacagggcatcccagatctggactatccacgtgctttgaaacttttcccctcaccctccagccctggaggcttttgctgggatgaatgtttttatagggtttttgttgtaacataagctattttctaatatgctgccaggtacccttg

SEQ ID NO: 103392 - DNA, 1353 bp, Homo sapiens
  Payload ID: 157
  Gene Symbol: AIM1L
  Gene Name: absent in melanoma 1-like
  ENST ID: ENST00000374207
  CDS Start-End: 117-1175
ccagcagcaggagctccaggctggctggacacctgggtccccacgcagactgtgagtagagggagctggaccacagtgggacaaggacacctccagacaggttgccagggccccacatggaggaggcaggtgggcccatggcccgggccaaggcccgagtggacgggcccgtggacccccctgctgccaccgtcctgcccatggtgaggagcgagcatgtgacagtccctggacaacctcctgctccatccactacaagaaggaaggatgtccccagcccaggagtggacagggtgtcccccagcccaggaggcacccctgccccagtgccaacaggagcagaggccagcacggagtcccagcttgtctctgatcccaccgagggcaagacgtgcacagagacatcaagggaggaggatgaggtggccctggccgctgacctggagatattcctggatacgctgcggagcatggagccccctgagatcctccgcactcaccggctgccacgagcccctcgctcctcctacctgtccatgtacgccacgctgcctgccattgaggaggaccagctggggccatgggtgctgggccccggaccccaggaggtgccttcactggaagagaaagaggaggaggaggaggaggaaccagagaacccctatctgagtgacgatgagaagctccagcgcaggcaggagaaagctgggcccagcccctccagggacctccaccctgccagacccacccaggtctcctgctctcctctggagatgatgaagaagcatgtagcaggaaccaagggcccccactcagagctgggattggaactgcagggaggcagcaggcccacttcccgtcttggaggcagccttctgttcggcagtctggtgcctaccgccaaggaggcctccaccccggaaccgctgggcacaaaactatctgctctgctgccccatggggcaccggggctcaggaaggtgccaggacagttgcccctgctttgcagtgaaagatcatccccaacggagaagcttgcctgttccctgcccctggaggggtggcccagccttaaagacccagggcaagctgaacaccaggcctggaaaggtgatcttcttctcagagtctggctgccaaggcagtggcagggaggtctggggagacatcgttgatgcctcaggctgggcccccgtagcctccataagggtagttcgaggctgctgggtgctgtacgaagagccagagttccggggtcagaagctggtcctgcctgaaggagacatggaactcagaaccccagggacaaagtggagtccccaaggcatcggctccctaaggagggttgtctgg

SEQ ID NO: 103393 - DNA, 886 bp, Homo sapiens
  Payload ID: 157
  Gene Symbol: AIM1L
  Gene Name: absent in melanoma 1-like
  ENST ID: ENST00000429942
  CDS Start-End: 1-886
ttcccagggtctggagaagcccctgcaggtggcatctgccaccgtctctgcaggactgtggctactgtaccccaaaccattattcgaagacactccctacatcctggaacctggagagtaccccacctcagaggcctggggcacatcggaccccagcgtgggctccctgaagcccatgagattggctgtggtgtatgaggccccaggctttcagggccgcagctgggaagtgagccgagacatctacaaccttcagcagccagaggacagccagagcccccacctggcctctgtggggtccctgagagttctcggaggctgctgggtgggctacgagaaggagggcttccggggccaccagtatctgctggaggagggggaatacccagactggtcacactggggaggctatgacgagttgctgacctccctccgggtcatccggacggacttcggggacccggccgtcgtgctatttgaggccatggacttcgaggggcacggcgtggaggtgagcaaggcattgccggatgtggagctggtgcaacacggccccagcacacaggccatccacgtgctcagcggcgtgtgggtggcctaccaggaggtgggcttctccggggaacagtacgtgctggagaagggcgtgtatcgtaactgcgaggactggggcgctggcaacagcaccctcgcctcgctgcagccggtcctacaggtcggggagcacgatctgcacttcgtctcaaagattcagcttttctcccgccccgactttctgggcgaccacttctctttcgaagatgaccaggccgctctgcccgcctccttccgacctcagtcctgccgggtccacggcggcagctggatcctgtttgatgagacgaac

SEQ ID NO: 103394 - DNA, 1548 bp, Homo sapiens
  Payload ID: 157
  Gene Symbol: AIM1L
  Gene Name: absent in melanoma 1-like
  ENST ID: ENST00000475866
  CDS Start-End: 151-1548
agctgagagcccaatcgcatcaggggagcacggcccagcagcaggagctccaggctggctggacacctgggtccccacgcagactgtgagtagagggagctggaccacagtgggacaaggacacctccagacaggttgccagggccccacatggaggaggcaggtgggcccatggcccgggccaaggcccgagtggtaagtgccacattgacatggcggcagcggccccccacccaggaagagatcaaacatggttttcacaaggtgtccctggtgtcaggggcccagatggaagccccgcagaaggagatgtttgagttcagccgtcgagaggaagtggaagtcaatggctttgcaacacaggaagaagagactgtgaattgccagggccctcgggatacagctggctccaagaacttccagagccatggacccatcttttccaagaagtacataccacctcccaaggagaaaaggcctgaggggaggctgaaggaggctgtggaccagagtgatggcagccgccaagctcccaggactgagcccccatgtgtgggagctatggccaggactgagcttttggttcccctgcctgggccccgagagccaagtccccacccaggtgtaggtctcaccagtggtagctcccggagcctcgaggaataccgagtgacacgcactgtgcggaccaccacagtggtgggaggtcatgtggaccggcggatgagcagctctgtgactgtgaggccagtgtcctcaggcgaggccctgccacggggccgtcaggtctcccgcatggtgccgccagtggtggtgggctccccaccaggctcgcccagccgcagccaggccgtgaaagtgctaagtaacctcgtgcctgctgggcacagcccccctgccagtcacctgcccaggcccacggctggcgggccaaggagcacaggtctgggcagcacagtgggggcagccttgaggcagctgcctgagaccgggacagcagagcttaaagacagctctgccctggcctctacaggcatcccagccagtgctcacctgcctaagaatcaggatgcccctgcagcctgtccggacagagaccagggcagagccccggatgccagggcctgtgagctctggcaggtgctgggagcccccagttccactgagctccctctccagacttctcagggtcaagcatcagtcccctcctctcccagactcgagacccatgtcccctctcctggcctaactcaccctgcaaagcagcctgtggtgcccactcaccccggggcccggctcactccccttgttctgccccctaaaaaaaaggacgggcccgtggacccccctgctgccaccgtcctgcccatggtgaggagcgagcatgtgacagtccctggacaacctcctgctccatccactacaagaaggaaggatgtccccagcccaggaggtctttctgctccatcgtccccaaggaataagtttgttcagaactctgaaaatgtccctgtcctcccctttacccagagggaggtcgtgaagggc

SEQ ID NO: 103395 - DNA, 2523 bp, Homo sapiens
  Payload ID: 157
  Gene Symbol: AIM1L
  Gene Name: absent in melanoma 1-like
  ENST ID: ENST00000527815
  CDS Start-End: 51-2414
gggacctccaccctgccagacccacccaggtctcctgctctcctctggagatgatgaagaagcatgtagcaggaaccaagggcccccactcagagctgggattggaactgcagggaggcagcaggcccacttcccgtcttggaggcagccttctgttcggcagtctggtgcctaccgccaaggaggcctccaccccggaaccgctgggcacaaaactatctgctctgctgccccatggggcaccggggctcaggaaggtgccaggacagttgcccctgctttgcagtgaaagatcatccccaacggagaagcttgcctgttccctgcccctggaggggtggagcccagccttaaagacccagggcaagctgaacaccaggcctggaaaggtgatcttcttctcagagtctggctgccaaggcagtggcagggaggtctggggagacatcgttgatgcctcaggctgggcccccgtagcctccataagggtagttcgaggctgctgggtgctgtacgaagagccagagttccggggtcagaagctggtcctgcctgaaggagacatggaactcagaaccccagggacaaagtggagtccccaaggcatcggctccctaaggagggttgtctgggactacagcaccccggaaatcagcctcttctctgaggagggcctcaagggggagcaagtgaagctaacagaggccttgaagaattcccagggtctggagaagcccctgcaggtggcatctgccaccgtctctgcaggactgtggctactgtaccccaaaccattattcgaagacactccctacatcctggaacctggagagtaccccacctcagaggcctggggcacatcggaccccagcgtgggctccctgaagcccatgagattgggctgcccaagtgtggagaagccaggggagcccagggctgtggtgtatgaggccccaggctttcagggccgcagctgggaagtgagccgagacatctacaaccttcagcagccagaggacagccagagcccccacctggcctctgtggggtccctgagagttctcggaggctgctgggtgggctacgagaaggagggcttccggggccaccagtatctgctggaggagggggaatacccagactggtcacactggggaggctatgacgagttgctgacctccctccgggtcatccggacggacttcggggacccggccgtcgtgctatttgaggccatggacttcgaggggcacggcgtggaggtgagcaaggcattgccggatgtggagctggtgcaacacggccccagcacacaggccatccacgtgctcagcggcgtgtgggtggcctaccaggaggtgggcttctccggggaacagtacgtgctggagaagggcgtgtatcgtaactgcgaggactggggcgctggcaacagcaccctcgcctcgctgcagccggtcctacaggtcggggagcacgatctgcacttcgtctcaaagattcagcttttctcccgccccgactttctgggcgaccacttctctttcgaagatgaccaggccgctctgcccgcctccttccgacctcagtcctgccgggtccacggcggcagctggatcctgtttgatgagacgaacttcgagggtgaccagcacattctctctgagggcgagttccccactctcacggccatgggctgcctcgcctccacagtcctgggctctctccagaaggtatccctgcacttttcagagccttccattttcctgtatggactcgagtgcttcgaggggaaggagatcgagctcagcagggaggtgcggagcctgcaagccgagggcttcaacaaccatgtgctgtctgtgcggatcaaggggggcatttgggtgctatgtgaacacagtgacttccggggccgccagtggctggtgggaagctgcgagatcaccaactggctgacctacagcggcacccagagggtgggctccctctaccccatcaagcagcgccgggtttatttccgcctctggaatgcagcactggggggattcctggcagtgccggaccatgtggaggacatgaaagcaggccgtgtggtggtcgccgacccccaagctggaggtagctgcatctggtactacgaggatgggctgctgaagaaccagatggcccccaccatgagcctacaggtgattggaccccctagcccaggctccaaggtggtgctgtgggccgagagccgcctgccgcgccagacgtggagcatcagtgaatcgggccacatctgcagccagatgttcgaaggccagatcctggacgtgaagggaggccggggctacgaccgggaccacgtggtgctatgggagccggatgaggacagggcatcccagatctggactatccacgtgctttgaaacttttcccctcaccctccagccctggaggcttttgctgggatgaatgtttttatagggtttttgttgtaacataagctattttctaatatgctgccaggtacccttg

SEQ ID NO: 103396 - DNA, 594 bp, Homo sapiens
  Payload ID: 158
  Gene Symbol: AIM2
  Gene Name: absent in melanoma 2
  ENST ID: ENST00000368129
  CDS Start-End: 94-594
tgcacttgcactctaaggaagctgaggtgggggaggcgggaaagtccacagaggagtttaaagcagccatgccaaaagcctgaacagaaacagatggtggcccagcaggaatctatcagagaagggtttcagaagcgctgtttgccagttatggtactgaaagcaaagaagcccttcacgtttgagacccaagaaggcaagcaggagatgtttcatgctacagtggctacagaaaaggaattcttctttgtaaaagtttttaatacactgctgaaagataaattcattccaaagagaataattataatagcaagatattatcggcacagtggtttcttagaggtaaatagcgcctcacgtgtgttagatgctgaatctgaccaaaaggttaatgtcccgctgaacattatcagaaaagctggtgaaaccccgaagatcaacacgcttcaaactcagccccttggaacaattgtgaatggtttgtttgtagtccagaaggtaacagaaaagaagaaaaacatattatttgacctaagtgacaacactgggaaaatggaagtactgggggttagaaacgaggacacaatgaaatgt

SEQ ID NO: 103397 - DNA, 1529 bp, Homo sapiens
  Payload ID: 158
  Gene Symbol: AIM2
  Gene Name: absent in melanoma 2
  Uniprot ID: O14862
  ENST ID: ENST00000368130
  CDS Start-End: 290-1321
atagacattttcttctgtggctgctagtgagaacccaaaccagctcagccaattagagctccagttgtcactcctacccacactgggcctgggggtgaagggaagtgtttattaggggtacatgtgaagccgtccagaagtgtcagagtctttgtagctttgaaagtcacctaggttatttgggcatgctctcctgagtcctctgctagttaagctctctgaaaagaaggtggcagacccggtttgctgatcgccccagggatcaggaggctgatcccaaagttgtcagatggagagtaaatacaaggagatactcttgctaacaggcctggataacatcactgatgaggaactggataggtttaagttctttctttcagacgagtttaatattgccacaggcaaactacatactgcaaacagaatacaagtagctaccttgatgattcaaaatgctggggcggtgtctgcagtgatgaagaccattcgtatttttcagaagttgaattatatgcttttggcaaaacgtcttcaggaggagaaggagaaagttgataagcaatacaaatcggtaacaaaaccaaagccactaagtcaagctgaaatgagtcctgctgcatctgcagccatcagaaatgatgtcgcaaagcaacgtgctgcaccaaaagtctctcctcatgttaagcctgaacagaaacagatggtggcccagcaggaatctatcagagaagggtttcagaagcgctgtttgccagttatggtactgaaagcaaagaagcccttcacgtttgagacccaagaaggcaagcaggagatgtttcatgctacagtggctacagaaaaggaattcttctttgtaaaagtttttaatacactgctgaaagataaattcattccaaagagaataattataatagcaagatattatcggcacagtggtttcttagaggtaaatagcgcctcacgtgtgttagatgctgaatctgaccaaaaggttaatgtcccgctgaacattatcagaaaagctggtgaaaccccgaagatcaacacgcttcaaactcagccccttggaacaattgtgaatggtttgtttgtagtccagaaggtaacagaaaagaagaaaaacatattatttgacctaagtgacaacactgggaaaatggaagtactgggggttagaaacgaggacacaatgaaatgtaaggaaggagataaggttcgacttacattcttcacactgtcaaaaaatggagaaaaactacagctgacatctggagttcatagcaccataaaggttattaaggccaaaaaaaaaacatagagaagtaaaaaggaccaattcaagccaactggtctaagcagcatttaattgaagaatatgtgatacagcctcttcaatcagattgtaagttacctgaaagctgcagttcacaggctcctctctccaccaaattaggatagaataattgctggataaacaaattcagaatatcaacagatgatcacaataaacatctgtttctcattca

SEQ ID NO: 103398 - DNA, 1481 bp, Homo sapiens
  Payload ID: 158
  Gene Symbol: AIM2
  Gene Name: absent in melanoma 2
  ENST ID: ENST00000612470
  CDS Start-End: 244-1311
agccaattagagctccagttgtcactcctacccacactgggcctgggggtgaagggaagtgtttattaggggtacatgtgaagccgtccagaagtgtcagagtctttgtagctttgaaagtcacctaggttatttgggcatgctctcctgagtcctctgctagttaagctctctgaaaagaaggtggcagacccggtttgctgatcgccccagggatcaggaggctgatcccaaagttgtcagatggagagtaaatacaaggagatactcttgctaacaggcctggataacatcactgatgaggaactggataggtttaagttctttctttcagacgagtttaatattgccacaggcaaactacatactgcaaacagaatacaagtagctaccttgatgattcaaaatgctggggcggtgtctgcagtgatgaagaccattcgtatttttcagaagttgaattatatgcttttggcaaaacgtcttcaggaggagaaggagaaagttgataagcaatacaaatcggtaacaaaaccaaagccactaagtcaagctgaaatgagtcctgctgcatctgcagccatcagaaatgatgtcgcaaagcaacgtgctgcaccaaaagtctctcctcatgttaagcctgaacagaaacagatggtggcccagcaggaatctatcagagaagggtttcagaagcgctgtttgccagttatggtactgaaagcaaagaagcccttcacgtttgagacccaagaaggcaagcaggagatgtttcatgctacagtggctacagaaaaggaattcttctttgtaaaagtttttaatacactgctgaaagataaattcattccaaagagaataattataatagcaagatattatcggcacagtggtttcttagaggtaaatagcgcctcacgtgtgttagatgctgaatctgaccaaaaggttaatgtcccgctgaacattatcagaaaagctggtgaaaccccgaagatcaacacgcttcaaactcagccccttggaacaattgtgaatggtttgtttgtagtccagaaggtaacagaaaagaagaaaaacatattatttgacctaagtgacaacactgggaaaatggaagtactgggggttagaaacgaggacacaatgaaatgtaaggaaggagataaggttcgacttacattcttcacactgtcaaaaaatggagaaaaactacagctgacatctggagttcatagcaccataaaggttattaaggccaaaaaaaaacatagagaagtaaaaaggaccaattcaagccaactggtctaagcagcatttaattgaagaatatgtgatacagcctcttcaatcagattgtaagttacctgaaagctgcagttcacaggctcctctctccaccaaattaggatagaataattgctggataaacaaattcagaatatcaacagatgatcacaataaacatctgtttctcattc

SEQ ID NO: 103399 - DNA, 1515 bp, Homo sapiens
  Payload ID: 159
  Gene Symbol:
  Gene Name: AC002310.11
  ENST ID: ENST00000569360
  CDS Start-End: 174-1166
tttgaagacatcgtccagttctgaccatggactcgcagccatcggcccttagtttccatcccctctagtgggccttcgggggctctactgacgtccctccttcccttggtaccgggccggggaagtgttctcgggcgcgggaggttccgcatgcccaggcctggccaggggagatgaccgatccgtcgctggggctgacagtccccatggcgccgcctctggccccgctccctccccgggacccaaacggggcgggatccgagtggagaaagcccggggccgtgagcttcgccgacgtggccgtgtacttctcccgggaggagtggggctgcctgcggcccgcgcagagggccctgtaccgggacgtgatgcgggagacctacggccacctgggcgcgctcggagtcggaggcagcaagccggcgctcatctcctgggtggaggagaaggccgaactgtgggatccggctgcccaggatccggaggtggcgaagtgtccgacagaagcggacccagattccagaaacaaggaagaggaaagacaaagggaagggacgggagccctggagaagcccgaccctgtggccgccgggtctcctgggctgaaggctccccaagccccctttgccgggttggagcagctgtccaaggcccggcgccggagtcgcccccgcttttttgcccacccccctgtcccccgagctgaccagcgtcacggctgctacgtgtgcgggaagagcttcgcctggcgctccacactggtggagcacatttacagccacaggggcgagaagcccttccactgcgcagactgcggcaagggcttcggccacgcttcctccctgagcaaacaccgggccatccatcgtggggagcggccccaccgctgtcccgagtgtggtcgggccttcatgcgccgcacggcgctgacttctcacctgcgcgttcacactggcgagaagccctaccgctgcccgcagtgtggccgctgcttcggcctgaagaccggcatggccaagcaccaatgggtccatcggcccgggggcgaggggcgtaggggccggcgccctggggggctgtctgtgaccctgactcctgtccgcggggacctggacccgcctgtgggcttccagctgtatccagagatattccaggaatgtgggtgacggcctaaaaagtgaccatctagacattgtgggcggcccgagatgggctcaggggcccgaacctctgcagcggcctgcagggaggtcccagaatccaccgcaagagctggcctggggtgcggacagtctgatcttgggctctcagcagcctcttctgccagcaccttgctccccgctgccctgggctctccaaggccccctttgctgaggcagggctgaggcaacatgagtgagaatgaggaagaggaaatttctcagcaagaaggcagtggggactatgaagtcgaagagataccatttgggcttgaaccccagagccctgggtttgagccacaaagcccagagtttg

SEQ ID NO: 103400 - DNA, 377 bp, Homo sapiens
  Payload ID: 160
  Gene Symbol:
  Gene Name: AC002310.13
  ENST ID: ENST00000568114
  CDS Start-End: 98-377
gcccgggccggggaggctttctcgggcgcaggaggttccgcaggcccaggccaggccaggggaggcagccgatccgtcgtcggggttgacagttaccatggcgccgcctctggccccgctccctccccgggacccaaacggggccggacccgagtggagggagccgggggctgtgagcttcgcggacgtggccgtgtacttctgccgggaggagtggggctgcttgcggccagcgcagagggccctgtaccgggacgtgatgcgggagacctacggccacctgagcgctctcggagtcggaggcagcaagccggcgctcatctcctgggtggaggagaaggccgaactgtgggatccggctgcccaggatccggagg

SEQ ID NO: 103401 - DNA, 1037 bp, Homo sapiens
  Payload ID: 161
  Gene Symbol:
  Gene Name: AC002398.9
  ENST ID: ENST00000591613
  CDS Start-End: 120-287
gccggaggaagtgagctctcctggggcgtggttgttcgtgatccttgcatctgttacttagggtcaaggcttgggtcttgccccgcagacccttgggacgacccggccccagcgcagctatgaacctggagcgagtgtccaatgaggagaaattgaacctgtgccggaagtactacctgggggggtttgctttcctgccttttctctggttggtcaacatcttctggttcttccgagaggccttccttgtcccagcctacacagaacagagccaaatcaaaggctagctggagatggccaaagcccggaaccaactggatgctgtcttgcagtgtctgctggagaagagtcacatggacagggagcgtctggatgaggaagctgggaaaacaccctcagacacccacaataaggactgctccatcgcagccactggcaaaaggccatctgcccgcttcccccaccagcggaggaagaagaggagggagatggatgatgggctggctgagggagggccgcagcgatccaacacatatgtgatcaagctgttcgaccggagcgtggacttggcccagttcagcgagaacacgccactgtacccaatctgccgcgcctggatgcgcaacagcccctctgtgcgcgagcgtgaatgctctcccagctcacccctgcccccgctgcctgaggatgaggagggctcagaggtaaccaacagcaagagtcgtgatgtgtacaagctgccgccacccacacccccggggccacccggagatgcctgcagatcccgcatcccatctccactgcagcctgagatgcagggcacccctgacgatgagccctctgagcccgagccctcaccctccacactcatctatcgcaacatgcagcgctggaaacgcatccgccagaggtggaaggaggcctctcatcggaaccagcttcgttactcagaaagcatgaagatcctacgagagatgtacgaacgacagtgatgttcccaggtccccccacaccagtaaacatcccccagctccaca

SEQ ID NO: 103402 - DNA, 685 bp, Homo sapiens
  Payload ID: 162
  Gene Symbol:
  Gene Name: AC002985.3
  ENST ID: ENST00000596918
  CDS Start-End: 1-254
tccaggaagtgaaggaagcagccaggctggccagggagaaatctcaggatggcggggagctcaccagtccagccctggggctcgcctcccaccaggtgcccccgagccctctcgtcagtgccaacggccccggcgaggaaaaactgttccgcagccagagcgctgatgcccccggccccacagagcgcgagcggctaaagaagatgttgtctgaggggtggctgagctggaggctcaggcagcttcagaggtgacccccaccggtgagaaggaggggctgggccagggccagtcgctggaacagctggaagctctggtgcaaaccaaggaccaggagattcagaccctgaagagtcagactggggggccccgcgaggccctggaggctgccgagcgtgaggagactcagcagaaggtgcagctatcaagcccagagagagacgtggagagggacgtcttcctgtatagagcgtacctggcgcagaggaagttcggtgtggtcctggatgagatcaagccctcctcggcccctgagctccaggccgtgcgcatgtttgctgactacctcgcccacgagagtcggagggacagcatcgtggccgagctggaccgagagatgagcaggagcgtggacgtgaccaacaccaccttcctgctcatggccgcctccatctatctccacgac

SEQ ID NO: 103403 - DNA, 584 bp, Homo sapiens
  Payload ID: 162
  Gene Symbol:
  Gene Name: AC002985.3
  ENST ID: ENST00000593484
  CDS Start-End: 1-254
tccaggaagtgaaggaagcagccaggctggccagggagaaatctcaggatggcggggagctcaccagtccagccctggggctcgcctcccaccaggtgcccccgagccctctcgtcagtgccaacggccccggcgaggaaaaactgttccgcagccagagcgctgatgcccccggccccacagagcgcgagcggctaaagaagatgttgtctgaggggtggctgagctggaggctcaggcagcttcagaggtgacccccaccggtgagaaggaggggctgggccagggccagtcgctggaacagctggaagctctggtgcaaaccaaggaccaggagattcagaccctgaagagtcagactggggggccccgcgaggccctggaggctgccgagcgtgaggagactcagcagaaggtgcagctatcaagcccagagagagacgtggagagggacgtcttcctgtatagagcgtacctggcgcagggacagcatcgtggccgagctggaccgagagatgagcaggagcgtggacgtgaccaacaccaccttcctgctcatggccgcctccatctatctccacgac

SEQ ID NO: 103404 - DNA, 456 bp, Homo sapiens
  Payload ID: 163
  Gene Symbol:
  Gene Name: AC003002.4
  ENST ID: ENST00000597658
  CDS Start-End: 151-456
agtgacacaggcacaactgacagtggcagaagctcagctgacaaggactggggacggcggtgtccttgtcttgcctttgtcgcccccgcccctctcttccctggctggacttgcggagtccccgccgaagaacccgagggtcccctggcgatggcagaaatgaaccctgcacagggtcatgtggtttttgaagacgtggccatatatttctcccaggaggagtgggggcatctcgatgaggctcagagattgctgtaccgtgatgtgatgctggagaatttggcccttttgtcctcactaggttcttggcatggagctgaggatgaggaggcaccttcacagcaaggtttttctgtaggagtgtcagaggttacagcttcaaagccctgtctgtccagccagaaggtccaccctagtgagacatgtggcccacccttgaaagacattctgtgcctg

SEQ ID NO: 103405 - DNA, 536 bp, Homo sapiens
  Payload ID: 164
  Gene Symbol:
  Gene Name: AC003002.6
  ENST ID: ENST00000596617
  CDS Start-End: 217-536
gttttggttctgtgtggtgtttcaccaacttcggcctatggctctgtctgacgtcaccgaagtgacggaacggaaaagcgcgagaagcggctcggttcccaccacggagaggcgggagtgagtcaactgacaagcgctggggacagtggcgtccttgtcttgcctttgtcgctcccgccccgctcttccctggctgggctggcggaggccttgctgatgaacctgactgagggtcccctggcgatggcagaaatggaccctacacagggccgtgtggtctttgaggacgtggccatatatttctcccaggaggagtgggggcaccttgatgaggctcagagattgctgtaccgtgatgtgatgctggagaatttggcccttttgtcctcactagggttcatagcagtggcagcaatgcttatggatgctggacaggattatatggtttttgaggacgtggccatacatttctcccaggaggagtggggaattcttaatgacgttcagagacacctgcacagcgatgtgatgctgga

SEQ ID NO: 103406 - DNA, 630 bp, Homo sapiens
  Payload ID: 164
  Gene Symbol:
  Gene Name: AC003002.6
  ENST ID: ENST00000596400
  CDS Start-End: 93-630
aactgacaagcgctggggacagtggcgtccttgtcttgcctttgtcgctcccgccccgctcttccctggctgggctggcggaggccttgctgatgaacctgactgagggtcccctggcgatggcagaaatggaccctacacaggattatatggtttttgaggacgtggccatacatttctcccaggaggagtggggaattcttaatgacgttcagagacacctgcacagcgatgtgatgctggagaactttgcacttttgtcctcagtaggttgttggcatggagccaaggatgaggaggcaccttccaagcaatgtgtttctgtaggagtgtcacaggtcacaactttaaagccagctttgtccacccagaaggcccagccctgtgagacatgtagctcacttctgaaggacattctacacctggctgagcatgacggaacacaccccaagcgtacagccaagctttacctgcaccaaaaggagcatcttagagagaagctcaccagaagtgatgaagggaggccttcgtttgtgaatgacagtgttcacctggcaaagaggaacctcacatgcatgcagggtggcaaggattttactggtgattcagatcttcaacaacaggctcttc

SEQ ID NO: 103407 - DNA, 582 bp, Homo sapiens
  Payload ID: 165
  Gene Symbol:
  Gene Name: AC003005.4
  ENST ID: ENST00000601674
  CDS Start-End: 234-413
acgcaatgggcgggacttccggcgtctcgtttggtattcactttcgcgactcaggtgaactaacctgcgagaagctggttgtgcgctgaggcgaccagcgccggaaggcacggtggcgactcacgctgttctcgccgctcagaggcgggtctgaggctcggtggcggcgcccagggtggcccgggccctttcctcggtcattgtctcccctccagctctactcacaggctccgatggcggcggccgccctgagggaccccgctcagggctatgtgacctttgaggatgtggctgtctacttctcccaggaggaatggagattgcttgatgacgctcagaggctcctctaccgcaatgtgatgctggagaactttacacttctggcctctctggcagggctatgtgacctttgaggacgtggctgtctacttctcccaggaggaatggagattgcttgatgacgctcagaggctcctctaccgcaatgtgatgctggagaactttacacttctggcctctctgggacttgcatcttccaagacccatgaaataacccagctggagtcatgggaggagcccttc

SEQ ID NO: 103408 - DNA, 565 bp, Homo sapiens
  Payload ID: 165
  Gene Symbol:
  Gene Name: AC003005.4
  ENST ID: ENST00000599674
  CDS Start-End: 199-375
attcactttcgcgactcaggtgaactaacctgcgagaagctggttgtgcgctgaggcgaccagcgccggaaggcacggtggcgactcacgctgttctcgccgctcagaggcgggtctgaggctcggtggcggcgcccagggtggcccgggccctttcctcggtcattgtctcccctccagctctactcacaggctccgatggcggcggccgccctgagggaccccgctcagggctatgtgacctttgaggatgtggctgtctacttctcccaggaggaatggagattgcttgatgacgctcagaggctcctctaccgcaatgtgatgctggagaactttacacttctggcctctctggggctatgtgacctttgaggacgtggctgtctacttctcccaggaggaatggagattgcttgatgacgctcagaggctcctctaccgcaatgtgatgctggagaactttacacttctggcctctctgggacttgcatcttccaagacccatgaaataacccagctggagtcatgggaggagcccttcatgcctgcttgggaagttgtg

SEQ ID NO: 103409 - DNA, 612 bp, Homo sapiens
  Payload ID: 166
  Gene Symbol:
  Gene Name: AC003006.7
  ENST ID: ENST00000594684
  CDS Start-End: 168-612
ctgcagtggaggtcgcgactgagggacgggacagagaagtcgcgaaagtgggccagaggttctgcgacaccacctcgggtgagctgcgccaggcccgggatagggactgttgtgttcgaatgcccgccccggtcggccgccgctccccgcctagtccacggagctcaatggcggcagtcgcgctgagggactcggctcagggcactgtgacctttgaagatgtggctgtgaacttttcccaggaggaatggagtctccttagtgaggctcagagatgcctttatcatgacgtgatgctggagaacctgacacttatatcttctctaggttgttggtatggagcaaaagacgagacaccttctaagcagaccctttctatacaacaggagtccccactcaggacacattggacaggtgtatgtaccaagaaggtccacctctggggaatgtgtggccctctcctgggagatatcttacaccagggaacacaacacaatcagaaattgaatgggtttggggcatatgaaaaaaaattggatgacgatgcaaaccatcatcaagaccagaagcagcacattggagagaaatcgtacagaagcaatgccaagggaa

SEQ ID NO: 103410 - DNA, 521 bp, Homo sapiens
  Payload ID: 167
  Gene Symbol:
  Gene Name: AC004076.7
  ENST ID: ENST00000597410
  CDS Start-End: 1-218
ctcagggtcccctggcgatggcagaaatggaccctacacagagacaggatctcactctgtcccctaagctggagtacagtggcatgatcatagctcactgccacctggaacccctgggctcaagtgatcctcctgcctcagcctctcaagtagctgggactacaggccgaaagaatgagggtcgtgatcaactcagtatgccactggaggctatatgagtaaacagcaaactgtttctcatgaaagcaggatgttggcaaactgacaaactgcgtctgccacccagaaggaatgctgaaggcagtcacgacccaggcacaagtgtttcttgtgattaggcataattgaagcctgttaacaataatgtgaacttgtgatcaattaagcagctgaccagtcgttacctcctcctccctttcatcctacccaataaatgtggagggctgtggaagctcaggggctgcctttgctcactagaagcagggagctctcttcttccccagttcgccttctttaaaaca

SEQ ID NO: 103411 - DNA, 664 bp, Homo sapiens
  Payload ID: 168
  Gene Symbol:
  Gene Name: AC004076.9
  ENST ID: ENST00000596831
  CDS Start-End: 195-593
gtttccagaacgcaatgtcagacctgaggtgacagaaaagggaaaacgtgagagagtgtcttcttccctgaagagaggtgggcctgaggcttgacagtggcgctgcctgagtgacctagccgctgggctgggccctggacagctgatcccaggttcctgcacttgtcgccacccttccgtagtccacaggcctgatggcggcggctgagccgatgggcccggcacaggttcccatgaactcagaagtaattgtggaccctatacaggggcaggtgaactttgaggacgtgttcgtgtacttctcccaggaggagtgggtgctccttgatgaggctcagaggctcctgtaccgtgatgtgatgctggagaactttgcacttatggcctctctggggatacctcagacaatggcagcttttggattgaaatatttgctgaatgacactggatacacaagcagcaagtccaacacaatcacagcaacagactctcctgcagaccttcccaggaagccagagccacacacaccatcatggtcctggaagaagcaagccatgagtatcaggacagtactgtggcatcctacaggctgagctgtacaaccatctctgccctgtactggagcaaagtaatctgaagctacagcaagtcctaagttcagtgc

SEQ ID NO: 103412 - DNA, 375 bp, Homo sapiens
  Payload ID: 169
  Gene Symbol:
  Gene Name: AC004158.1
  ENST ID: ENST00000623725
  CDS Start-End: 1-375
atgactcttaacgagcatgctgccttcaagcatctgtttaacaaagcacatcttgcacctcccttaatccatttaaccctgagtggacacagcacatgtttcagagagcacagggttggggataaggtcacagatcaacaggatcccaaggcagaagaatttttcttagtacagaacaaaatgaaaagtctcccatgtctacttctatccacacagacccggcaaccatccgatttctcaattttttccccacccttcccgcctttctattccacaaaaccgccattgtcatcatggcccatccccaatgagccgctgggcacgcctcccagacggggtcgtggccgggcagaggggctcctcacttcccagtag

SEQ ID NO: 103413 - DNA, 1732 bp, Homo sapiens
  Payload ID: 170
  Gene Symbol:
  Gene Name: AC004231.7
  ENST ID: ENST00000576522
  CDS Start-End: 158-1342
aaaattagctgaagcattaggaaaggaaactatgctgtatgccaagcccccacccacaattaatggtataaaaggactgcagaggaaggagagactcaaacctgcccacatccacctccagcagcttacctgcttttccattacctgttccagcaccatgtcttacagttgttgcctgcccagcctgggctgccgcaccagctgctcctcccggccctgcgtgccccccagctgccacggctacaccctgcctggggcctgcaacatccccgccaatgtgagcaactgcaactggttctgtgagggctccttcaatggcagcgagaaggagactatgcagttcctgaacgaccgcctggccagctacctggagaaggtgcgtcagctggagcgggacaacgcggagctggagaaactcatccaggagcggtcccagcagcaggagcccttgctgtgccccagctaccagtcgtacttcaagaccattgaggagctccagcagaagattctgtgtgccaaggctgagaatgccaggctggtggtgaacattgacaatgccaagctggcctctgacgacttcagaagcaagtaccagacggagcagtccctgaggctgttggtggagtcggacatcaacagcatacgcaggatcctggatgagctgaccctctgcaagtctgacctggagtcccaggtggagtccctgagggaggagctgatctgcttgaagaagaaccatgaggaggaggttaacaccctgcgctcccagcttggagaccgcctcaacgtggaggtggacactgcccccactgtggacctgaaccaggtcctgaacgagaccaggagtcagtatgaggctctggtggaaactaaccgcagggaagtggagcaatggttcgccacgcagaccgaggagctgaacaagcaggtggtatccagctcagagcagctgcagtcctgccaggcggagatcatcgagctgagacgcacagtcaacgccctggagatcgagctgcaggcccagcacaacctgcgagactctctggaaaacacgctgacggagagcgaggcccactacagctcccagctgtcccaggtgcagagcctgatcaccaacgtggagtctcagctggcagagatccgctgtgacctggagcggcagaaccaggagtaccaggtgctgctggacgtgcgtgcccggctggagtgtgagatcaacacgtaccggagcctcctggagagtgaggactgcaagctcccctgcaacccatgcgccaccaccaatgctagtggcaactcctgtggaccctgtggcacctctcaaaagggttgctgtaattgaaaagcttgtatcctctttgaagacatctacaaagccatttagatcaaccacaggaaggatcctcaagtcctgacttttctggagctcagctgacatcaagaaacctcatcttgcctctatgttatttctagaatgctgaaaagctttcctgacccaagcaaagacacacatcatcaacttccaatgtctggacaactccttcctgttgagggtcgagcctgtttgtttctaaagatgttcagctccctgtaatctgagctccagttactacttaaggtgtttcctgaacgtactactgcatttcctgttttccttttttctttggcattctctggaatgcaaggaggagacttcatttacttcccaataaacttcatttctctggcataa

SEQ ID NO: 103414 - DNA, 740 bp, Homo sapiens
  Payload ID: 171
  Gene Symbol:
  Gene Name: AC004556.1
  ENST ID: ENST00000612848
  CDS Start-End: 92-553
aagcgagggggcgctgtgccaggcggcggccgtgcggggcgggcgcgctgctccttccgcctcgcggaccccggaagcgcgcgtggccgccatggcgcggaatgtggtgtaccccctgtaccggctgggtggcccacaacttcgggtgttccgaaccaacttcttcattcagctggtgcggcccggtgtggcccagcccgaggacaccgtgcagttccggatccccatggaaatgacaagggtggacctcaggaattacctcgagggcatctataacgtgcccgtggctgctgtgcggacacgggtgcagcatggctctaacaagagaagagatcacagaaacgtgaggatcaagaagccggactacaaggtcgcctacgtgcagctggcccatggacagaccttcacgttcccagatctgtttcccgagaaagacgagagccctgaaggcagcactgccgacgacctctacagcatgctcgaggaggagaggcagcagaggcagagcagcgacccgcggcggggcggcgtccccagctggttcgggctgtgacggggtggccagcagggacgcgccccaggtgggcagctgtggcagagcagcgacccgcggcggggcggcatccccagctggttcgggccgtgacggggcggccagcagggacgcgccccaggtgggcagctgtggcagagcagtcccgacacctaaataaaagtcttgctgcaggagaaagagccgg

SEQ ID NO: 103415 - DNA, 2242 bp, Homo sapiens
  Payload ID: 172
  Gene Symbol:
  Gene Name: AC004754.3
  ENST ID: ENST00000600536
  CDS Start-End: 142-1737
aggtccacctgggcttgcgaaggcacagattccccgtccacagctcacgaccagatgcaccagcaggagtccacatcgaggacgtcctccgggcactcccacgaccagtgaccaggagttaaactttgggatgtgcccgtgatgttggaccacaaggacttagaggccgaaatccaccccttgaaaaatgaagaaagaaaatcgcaggaaaatctgggaaatccatcaaaaaatgaggataacgtgaaaagcgcgcctccacagtcccggctctcccggtgccgagcggcggcgttttttctttcattgtttctctgcctttttgtggtgttcgtcgtctcattcgtcatcccgtgtccagaccggccggcgtcacagcgaatgtggaggatagactacagtgccgctgttatctatgactttctggctgtggatgatataaacggggacaggatccaagatgttctttttctttataaaaacaccaacagcagcaacaatttcagccgatcctgtgtggacgaaggcttttcctctccctgcacctttgcagctgctgtgtcgggggccaacggcagcacgctctgggagagacctgtggcccaagacgtggccctcgtggagtgtgctgtgccccagccaagaggcagtgaggcaccttctgcctgcatcctggtgggcagacccagttctttcattgcagtcaacttgttcacaggggaaaccctgtggaaccacagcagcagcttcagcgggaatgcgtccatcctgagccctctgctgcaggtgcctgatgtggacggcgatggggccccagacctgctggttctcacccaggagcgggaggaggttagtggccacctctactccggcagcaccgggcaccagattggcctcagaggcagccttggtgtggacggggaaagtggcttcctccttcacgtcaccaggacaggtgcccactacatcctctttccctgcgcaagctccctctgcggctgctctgtgaagggtctctacgagaaggtgaccgggagcggcggcccgttcaagagtgacccgcactgggagagcatgctcaatgccaccacccgcaggatgctttcccacagctctggagcagtgcgctacctgatgcatgtcccagggaacgccggtgcagatgtgcttcttgtgggctcagaggccttcgtgctgctggacgggcaggagctgacgcctcgctggacacccaaggcagcccatgtcctgagaaaacccatcttcggccgctacaaaccagacaccttggctgtagccgttgaaaacggaactggcaccgacagacagatcctgtttctggaccttggcactggagccgtcctgtgtagcctagccctcccgagcctccctgggggtccactgtccgccagcctgccgaccgcagaccaccgctcagccttcttcttctggggcctccacgagctggggagcaccagcgagacggagaccggggaggcccggcacagcctgtacatgttccaccccaccctgccgcgcgtgctgctggagctggccaatgtctctacccacattgtcgcctttgacggctcacactgggcgacagcggagaggctcttggacggggcagagctcgcgccgagacctgcatgtccgcgtcttgtgacgggtgtgtgggaagccgcccgcctgtgcatcttgcttccgggtattcgctggctgatttactggttttagagatggggatgggcacccagtgctggactgaagaccagagaaggtggagctccctgtggccttggtctcacctctcttcagcgggatcccagcctctgccaggagggccttgtacatgtcagacttcaggaaccttgggtaggagtcctacaagagacagcgtccagcccctgacccttctgcctcctcacctctcagccagctccacccgaaggagcagccaaacattgctggagcctcctccagccacagagtctccggcggacagggtgctggaggcagccgcctcggacctgcccagaccaaggcagacgcagggagacctgggctcccgtctgcctgggccatgtcgcagcaaaaaatggcaagagccctggtggccacgtgtagaggaataaaccgcggcacctcctcagccattagcgggaaccaggaatggctccgtgtgccccacagagtgagggcagggttgtggagtcaaataaaaaaacaaggtaggccacgc

SEQ ID NO: 103416 - DNA, 375 bp, Homo sapiens
  Payload ID: 173
  Gene Symbol:
  Gene Name: AC004813.1
  ENST ID: ENST00000625200
  CDS Start-End: 1-375
atgactcttaaggagcatgctgccttcaagcatctgtttaacaaagcacatcttgcaccgcccttaatccatttaaccctgagtggacacagcacatgtttcagagagcacagggttggggataaggtcacagatcaacaggatcccaaggcagaggaatttttcttagtgcagaacaaaatgaaaagtctcccatgtctacttctttctacacagacacggcaaccatccgatttctcaatcttttccccacctttcccgcctttctattccacaaagccgccattgtcatcctggcccgttctcaatgagctgttgggcacacctcccagacggggtggtggccgggcagaggggctactcacttcccagtag

SEQ ID NO: 103417 - DNA, 189 bp, Homo sapiens
  Payload ID: 174
  Gene Symbol:
  Gene Name: AC004824.2
  ENST ID: ENST00000624583
  CDS Start-End: 1-189
acaggcgctcgccactacgcccagctaatttttgtatttttaatagagatggggtttcaccgtgttggccaggctggtctcaaactcctgacctcaggtgatccacccgcctcggcctcccaaagtgctgggattacaggtgtgagccactgtgcccggccaggccaatttattatattaagatatctt

SEQ ID NO: 103418 - DNA, 189 bp, Homo sapiens; identical to SEQ ID NO: 103417
  Payload ID: 175
  Gene Symbol:
  Gene Name: AC004824.3
  ENST ID: ENST00000627865
  CDS Start-End: 1-189

SEQ ID NO: 103419 - DNA, 954 bp, Homo sapiens
  Payload ID: 176
  Gene Symbol:
  Gene Name: AC004853.1
  ENST ID: ENST00000623829
  CDS Start-End: 1-954
atgggaacagataaccagacttgggtgagtgaatttattctcctcggcctgtccagtgactgggacactcgggtctccctgtttgtcctgttcttggtcatgtatgtggtgaccgtgctggggaactgtctcattgtccttctgatcagactggacagccgactccacactcccatgtatttctttctcaccaacctctcccttgtcgatgtctcctatgccacaagtgtagtccctcagctgctggcacattttcttgcagaacataaagccatcccattccagagctgtgcagcccagttatttttctccctggccttgggtgggattgagtttgttctcctggcggtgatggcctatgaccgctatgtggctgtgtgtgatgccctgcgatactcggccatcatgcatggagggctgtgtgctaggttggccatcacatcctgggtcagtggcttcatcagctctcctgtgcagactgctatcacctttcagctgcccatgtgcagaaacaagtttattgatcacatatcctgtgaactcctagctgtggtcaggctggcttgtgtggacacctcctccaatgaggtcaccatcatggtgtctagcattgttcttctgatgacacccttctgcctggttcttttgtcctacatccagatcatctccaccatcctaaagatccagtccagagaaggaagaaagaaagctttccacacgtgtgcctctcacctcacagtggttgccctgtgctatggtgtggccattttcacttacatccagccccactccagtccctctgtccttcaggagaagttgttctctgtcttttatgccattttaacaccaatgctgaaccccatgatttacagcctaaggaataaagaggtgaagggggcctggcagaaactattatggaaattctctgggttaacatcaaagctggcaacttga

SEQ ID NO: 103420 - DNA, 273 bp, Homo sapiens
  Payload ID: 177
  Gene Symbol:
  Gene Name: AC004953.1
  ENST ID: ENST00000624170
  CDS Start-End: 1-273
atgttgctcaggctaacctcaaactcctgggctcaaacgatcctcccgcctcagcctcccaaagtgctgggattacaggttccaggaaactcatgggacaggggtgaggggagtgtaggagctcaggtacggaggatggtggacagtagggatcagcagagcttctcggacctcaatgctctgtcgcccaggctggagtgcagtggcatgatctcagctcactgcaacctctgcctccagggttcaagcgattctcttgtctcagcctcccaa

SEQ ID NO: 103421 - DNA, 39 bp, Homo sapiens
  Payload ID: 178
  Gene Symbol:
  Gene Name: AC005042.1
  ENST ID: ENST00000626331
  CDS Start-End: 1-39
ctgcctccaccttcacagagccttctcgttgaggaaggg

SEQ ID NO: 103422 - DNA, 1594 bp, Homo sapiens
  Payload ID: 179
  Gene Symbol:
  Gene Name: AC005477.1
  ENST ID: ENST00000624897
  CDS Start-End: 10-258
agagtctaaatgttaatttccaaaatagatgtgcaagtagagtgttacataatttcagaggaggaggccagttctcccagcctcagaggtgagaatgggcttgtggaagagtggtctttgaactcagttttaaaatatgtgcaggattgctttatgtggaaagcagagaggaagaacataccaggtgatgagatgtttcagcaagggcacagagctgaggaaagtaacagcaaccggaactggttagcttggacataggatgcattacaaggagtaaatggagataggattttgggaagagaggctggctggagccagatgttagtgttgaattagacaatttaatcaagaaaaacttctgtgccaagagttgcaagattgagatctctttgggattatgactgttgccccattgtgctgaatggattgttatcaagatagagcggaggctctaggagagagatttctgtgtctgtgtgaaaggtaaggagggaaaggagagacactaatccagcctgtgaaatcaccttcagaattaagagaaactgataagaggaattaaagtctggattaaaaatgacttggaaactgaaggaatataggcggcaagtagagggtcaaagatgacggggtttttgacgttgggtaaatgaaaatcattggtgctattaattcaaattgggatatttggaaaaagaatacattttaaaggaagaaaatggcacataagtttattttagtacatgctgaatttgacataattgcttcttattgtacacctttttgatgtttgcatgtttgtgaaaatttaaactaactctcttgtatgttaataaggaaataagttaatgttcatttcactaactacttgagtttctactcagttctgtgcattctgagaggctctgtgtattacttatatgggcaatgtggaactagatattcctggatgatcaatatggtgaatttttctcttttccttgtaaaaatagagttctcaaattattctggctttgagtgtaagattctgtaattctttgctttgcaagagaatgtctagataacccatctctaagaatcatgcttattaaattgcgataaagaaaaaaataggttaatgggactcagcaattagtgaaacatacagaataatagacattgagtcattgttactttcttaacccacccccaaactgggagaccccgtgccaggctggtaggaacatgggctttggagtgagacttaggttaaaatgccaactttaccactctttagcagtatgactgtaagttagttctttaacttccatgagccacaattttttcatctgtaaaaagaaaaaaaaatgtgggaggaaggtaattgtgaagatcactttagataaatcgaatgaggcatcttatatcctacttagaccacaatgtggtccgtaatgaatatctctttttcttttcatgtttaggtcttgtagagtcagtgacacttggagaggaaataaatgataaaatctctaaatgttggtgctgttaataagttgtctagagcaaatttatacagtgagtttttttttaagacacaggaaaacaataaaaa

SEQ ID NO: 103423 - DNA, 409 bp, Homo sapiens
  Payload ID: 180
  Gene Symbol:
  Gene Name: AC005480.1
  ENST ID: ENST00000624550
  CDS Start-End: 28-105
cgccattttcttggaaacctctgcatcatgagagctaagtggaggaaaaagcgaatgtgcagtctgaagcacaaaagaagaaagatgaggcagaggtccaagtaaaccgctagcttgttgcaccgtggaggccacacaggagcagaaacatggaatgccagatgctggggatgctggtacaagttgtgggactgcatgctattgtgtagagcttgtctcaatggatccagaacttcaccgccctctgatcgctgatcacctctgagacccaccttgctcataaccaaaactgcccatgttggtcctctgccctggacctgggacattctggactatttctgtgtttacttgtggccgagtataacaaccatacgataaatcatctcttctgctgtcttagctgaagaat

SEQ ID NO: 103424 - DNA, 550 bp, Homo sapiens
  Payload ID: 181
  Gene Symbol:
  Gene Name: AC005779.2
  ENST ID: ENST00000593083
  CDS Start-End: 1-84
atcgtggctggctgccgcctgctgccggacatccgcggcgtgccagggaccgagcctgagaaagacccggggccgcgggcctagccatgattctacttcccaacctgactgcaatttggggagcggcttcacagcaggaccacaggagtcattgtggccaacttcgctggaggcttggagatctttggggccattaaggcagagctgcagggcctagagattgagatgctggtgaacaatgtggcatgctgtatgcgcagggacgcttgaggaagctgctcgactgtgagaatgtcgccagagtgaaacagagtcctagcccacctggcacctcttcctccaactctttactgccctctgttggaaaactcgcgtaatatacaaagtcgagacgggatttcaccatgttgcccagactggtctgtaactcctggcctcaagtgattcacccgcctcagcctccctaaatgctggggattacagacgtgaaccactgcacacggcctccattgagtctctctctgtggccaccactgctccaggcccatgg

SEQ ID NO: 103425 - DNA, 1002 bp, Homo sapiens
  Payload ID: 182
  Gene Symbol:
  Gene Name: AC005943.2
  ENST ID: ENST00000585937
  CDS Start-End: 37-207
tggacagggtcatcctgagggtgcgactccgccgcgatggtgacccggttcctgggcccacgctaccgggagctggtcaagaactgggtcccgacggcctacacatggggcgctgtgggcgccgtggggctggtgtgggccaccgattggcggctgatcctggactgggtaccttacatcaatggcaagtttaagaaggataattaattacacaaacccttcacagactgctctgcccgagcgggaagaagttccgcagcaagccgcagctggcgcgctacctgggcggctccatggacctgagcaccttcgacttccgcacgggcaagatgctgatgagcaagatgaacaagagccgccagcgcgtgcgctacgactcctccaaccaggtcaagggcaagcccgacctgaacacggcgctgcccgtgcgccagacggcgtccatcttcaagcagccggtgaccaagattaccaaccaccccagcaacaaggtcaagagcgacccgcagaaggcggtggaccagccgcgccagctcttctgggagaagaagctgagcggcctgaacgccttcgacattgctgaggagctggtcaagaccatggacctccccaagggcctgcagggggtgggacctggctgcacggatgagacgctgctgtcggccatcgccagcgccctgcacactagcaccatgcccatcacgggacagctctcggccgccgtggagaagaaccccggcgtatggctcaacaccacgcagcccctgtgcaaagccttcatggtgaccgacgaggacatcaggaagcaggaagagctggtgcagcaggtgcggaagcggctggaggaggcgctgatggccgacatgctggcgcacgtggaggagctggcccgtgacggggaggcgccgctggacaaggcctgcgctgaggacgacgacgaggaagacgaggaggaggaggaggaggagcccgacccggacccggagatggagcacgtctagg

SEQ ID NO: 103426 - DNA, 375 bp, Homo sapiens
  Payload ID: 183
  Gene Symbol:
  Gene Name: AC006026.2
  ENST ID: ENST00000623135
  CDS Start-End: 1-375
atgactcttaacgagcatgctgccttcaagcatctgtttaacaaagcacatcttgcaccgcccttaatccatttaaccctgagtggacacagcacatgtttcagagagcacagggttggagataaggtcacagatcaacaggatcccaaggcagaagaatttttcttagtacagaacaaaatgaaaagtctcccatgcccacttctatccacacagacccggcaaccatccgatttctcaattttttccccacccttcccgcctttctattccacaaaaccgccattgtcatcatggcccatccccaatgagtcgctaggcacacctcccagacggggtcgtggccgggcagaggggctcctcacttcccagtag

SEQ ID NO: 103427 - DNA, 501 bp, Homo sapiens
  Payload ID: 184
  Gene Symbol:
  Gene Name: AC006328.4
  ENST ID: ENST00000623198
  CDS Start-End: 13-411
agaacggaccagatgggtccaacagtgctgggtcaaggcgaggaggggcagccggaagcgggcgcatgctctggactcctgcagccgccgaaacggccaatcgtgtttaaggagaaactaacaatgaaaacggactcgttgatggaggaaaagttggaatgcagcctctggtgctgtttgagcgatccctctatcccgggtcgctgctgtgttctggaaaggcgcattgtaccctggatgcagcaggaatcctattcatcttcttcaccgataaggtctgtggactctgatgagccaaatctgacatcagttctggaacgtctagaagatactaaggacaacagcagttcggtgaggaaagaaaccaagctattttctctttttctcataaacattatatttagaaattaaatgttaagtgataatattatataaaaacatgattaaaaactataaacttagaggaattaaagtctgggtattttaagtcctccaaatctt

SEQ ID NO: 103428 - DNA, 406 bp, Homo sapiens
  Payload ID: 185
  Gene Symbol:
  Gene Name: AC006386.1
  ENST ID: ENST00000624491
  CDS Start-End: 28-105
cgccattttcttggaaacctctgcgccatgagagccaagtggaggaagaagcgaacgctcaggctgaagcgccaaagaagaaagatgaggcagaagtccaagtaaaccgctagcttgttgcaccgtggaggccacaggagcagaaacatggaacaccagacgctggggatgctggtacaagttgtgggactacatgctactgcctagagcttgtctcaatggatctagaacttcatcgccctctgatcgccgatcacctctgagacccaacttgctcataaacaaaactgcccatgtcggtcctctgccctggacctgtgacattctggactatttctgtgtttatttgtggccgagtgtaacaaccatataataaatcacctcttccgctgttttagctggaaaa

SEQ ID NO: 103429 - DNA, 120 bp, Homo sapiens
  Payload ID: 186
  Gene Symbol:
  Gene Name: AC006445.1
  ENST ID: ENST00000627924
  CDS Start-End: 1-120
ccggcgcccgcacccgcgccgcccgccccgcccgcgccggggccagccccggggcccggcggcggcggcggcggcggcgccggaggaggcggctgcggctgtgggttggtggccatggtg

SEQ ID NO: 103430 - DNA, 366 bp, Homo sapiens
  Payload ID: 187
  Gene Symbol:
  Gene Name: AC006449.1
  ENST ID: ENST00000616654
  CDS Start-End: 1-366
atgagagatgtgggggggaagaggagaagagggctgcacccgttcatacccagcctgggccccgtcttcaaatctaacctaaccgccacagtagtccagtctggggaatgcaagcggcttgggaaagttggagaacagccacttggagatgagaaccccagcctttggtttgggctgagggagggaagaagtgttctgggtggggtgtcttggtttcaatgcacagaatcacttggacctctcactcttcaacatggcaacctcggggtagacttacttctcttcccatccagacaaaagttaagtttcgctctaagtgggccagccttgggcaagggcgtgggtgtgaatgagcaactcttctaa

SEQ ID NO: 103431 - DNA, 366 bp, Homo sapiens; identical to SEQ ID NO: 103430
  Payload ID: 188
  Gene Symbol:
  Gene Name: AC006449.2
  ENST ID: ENST00000623658
  CDS Start-End: 1-366

SEQ ID NO: 103432 - DNA, 634 bp, Homo sapiens
  Payload ID: 189
  Gene Symbol:
  Gene Name: AC006486.9
  ENST ID: ENST00000594664
  CDS Start-End: 134-634
aggggagaggctctgagaggcgaggccgggtgaggcggcgagggcggcccgacgggcgcgggacgggacggggcagcgagggcgccgggagccgcggcccggaatcggggcgcttcgccccgggccccccagcatgaagaccccggcggacacaggtgacagcgggaaggtgaccacagtcgtagccactctaggccaaggcccagagcgctcccaagaagtggcttacacggacatcaaagtgattggcaatggctcatttggggtcgtgtaccaggcacggctggcagagaccagggaactagtcgccatcaagaaggttctccaggacaagaggttcaagaaccgagagctgcagatcatgcgtaagctggaccactgcaatattgtgaggctgagatactttttctactccagtggcgagaagaaagacgagctttacctaaatctggtgctggaatatgtgcccgagacagtgtaccgggtggcccgccacttcaccaaggccaagttgaccatccctatcctctatgtcaaggtgtacatgtaccagctcttccgcagcttggcctacatccactcccagggcgtgtgtcaccgcgacatcaagccccagaacctgctggtggaccct

SEQ ID NO: 103433 - DNA, 543 bp, Homo sapiens
  Payload ID: 190
  Gene Symbol:
  Gene Name: AC006538.4
  ENST ID: ENST00000586572
  CDS Start-End: 227-543
agccgcgccgagcggggcctctccgggccgcgtctgtggggtcgagactgcgcggccgttgggcgtgcagcggcgccagtcggcggacgaggggcccccgggagttgctggactgagacatgagcctccaactgtgtggttgggctcggtagcacatcgtgggacttgggtgtgcgcccacagatggtttggccctgcagtgaccagagcagcccaagccgccaccatggtgaaattgctagtggccaaaatcctgtgcatggtgggcgtgttcttcttcatgctgctcggctccctgctccccgtgaagatcatcgagacagattttgagaaggcccatcgctcgaaaaagatcctctctctctgcaacacctttggaggaggggtgtttctggccacgtgcttcaacgctctgctgcccgctgtgagggaaaaggctcggtctggggttcttgcagctggcaccagccctcccggccccggccgcccacccgccgcggggaagatgccggaacagagtaacgattaccgcgtggtggtgtt

SEQ ID NO: 103434 - DNA, 1285 bp, Homo sapiens
  Payload ID: 191
  Gene Symbol:
  Gene Name: AC006994.3
  ENST ID: ENST00000623861
  CDS Start-End: 598-921
agactctatactctaatttctcatttaaaagaaattggactcttacaaaataaacatgatatgaacccagaatttaacttactattttcttactgttatcccaaagacattacatgatattgaacactttgaggtaattatggtactgggggagcataattgttcctactaatagaaacaaaatactaaggatttttctagaaactcttaagagccatttacctggctaaggatttttctagaaactgtcctttcaagagccatttacctggaataaaagtgatgtgtatgataaacagttggctatacagacccaagatgaaattcaaaatatgacttctgaaaattctgaattcaaaatcaagtttttgatactttaggatcagctagatgatcatcataaatttgtctcctttccacttcaattttttttcatcttcaccaatctacactatattcaagccaacttaccatttcccttactccgttttccctgcaacttccctaagctgttagtgttattgtactactcttctttatgccacttaggcttgaattcttggcccaatttctctcacttctgcatgaagtcaccaaatgccagtgattctgcttctaacatatttcagacatcatttctgtccattcccactaccagaaagaaactctgtgttagtttttcttttacctttattgactttttataatagcatttatggcgtgttgaattgtggccccccaaaaatatgtccaagtcttaaccctggtgcctataaatgtgaccttatttgggaaaagagtctcacagatgaaattaagttaaagatcttaccctggattaaccaggtagatgctaaatcgaataaaaaagtgtctgtacaggaagagaagaggagaatcacagagaagaaagccatgtgaagatggtaacagacactggagtctgtaaccccaagtgtaatgcgacgggttctccaccaggttacttaagggtgtatgtccactgcttgagccctgaagactgggtggtgagccaaggtcatggtgctcagccaaggaacaccatgtgctgtgttccctgagaacacaaacatttgggagagtacctggggacataccaagaaaaacactcatcacacacagagaagaaaagccagaaaattagcttaaaagcagcttgaagatgggtggggtaagggggtgtgtggggcaaatctccagagttgtcctgctaccacctaggaatgccctgtatgttaagtcctaataaactcacctactcatc

SEQ ID NO: 103435 - DNA, 4170 bp, Homo sapiens
  Payload ID: 192
  Gene Symbol:
  Gene Name: AC007040.11
  ENST ID: ENST00000606025
  CDS Start-End: 580-1173
atgatttacattatctgctcaaatttccgacaagaacacacctcgcctttatcacagagcgtggcacatattaggaattcaataattttgtccctatcacctgcgatagcaagagacagacttgtccgcaacctgccgggaggcaggttctggggaggttgctggggcgcggtcgggcggccctgtccggccctggaccacctccaggctggtacgggagtgcacagggagggactggaggctgcactccgagccccagtatgggcgcttggtcgtctccgcccctgggcaccgtcccgcctccctctggctgcagcggtctgcattcattcccctcagtggagcgggggatcctggcggggcagcggcggttggccctcctctccggcgggcggcgctagcgcgagcctggccccgggcagcgctagggccgggctcctctcggcggcggcgcaccgtcgtcctgtcgtccgcggggcggggacgcggcggcggcggcggcggtggcggctgtgtgtcgccggagccgaagcgcgcaggcccgtcccggtggccggggagcgggcgggtgggggcgccatgtggttcatgtacctgctgagctggctgtcgctcttcatccaggtggccttcatcacgctggctgtcgcggctggactctattacctggcagaactgatagaagaatacacagtggccaccagcaggatcataaaatacatgatctggttctccaccgctgtactgattggcctctacgtctttgagcgcttccccaccagcatgattggagtgggcctattcaccaacctcgtctactttggcctcctccagaccttccccttcatcatgctgacctcgcctaacttcatcctgtcgtgtggactagtggtggtgaatcattacctagcatttcagttttttgcagaagaatattatcccttctcagaggtcctggcctatttcactttctgcctgtggataattccgtttgcgttttttgtgtcactttcggccggggagaacgtcctgccctctaccatgcagccaggaggacttggactaggaagatcaactgggcacggtgattcttgcacagatttttataaggatcctccaagtgtaacaaccatttggaaaactccgggccttgaggacagccagagaagataagttcaacttgcactttgccagagcaggggatctccctcagctccctgccttcaaacctaccttacagacctgcctggcctgcacctgagccaccctcttcttccttcctattcccactaaggaggtgtccctgcttccttcatagtgggtccttcccctgcaccgggaaacaggccctagagatgactccatggggtgaaggaccagagcctccttgcctctctctctgtctctctctccctctcttgtcttcccatgaagctctgatgtttccagtacaaaataaacctcgctcagtcccagtccttctccagttcctcccctcacaagcatggccccccactgctggctttccttccccaccttccaccctctccttggccttctccactctggcttcagtggcctccgatggctacactcagagcctgggtgcactgtcctttggaagcttccctctggggccgcctgtcagcctcctctgaagactcacactcctcgctctcagacctttgggtgctggaggacttcgaggtttggcctggctctccacttcttcctctcctttcctctgagatctgccttcttccttccctccctgcttcctttcttcaagcatatctactgcatggatgccttctatgtactaagctaggcaaatgaaagtgacaaatgaaaatgtgaagtgcctacaggctaaaagaaggatacagagcaaataacataattacaaactgcagtgggtgctcctaagggaaagatcaggatgggtgaacgagagtgggagggaagaccagactgggtgcgcttggaggaagcatcttatgggaagggccgtttgagctgagccttcagggtcaaggggtgccagcccccagggagctggggaaagggcacttctggcagaggagagaaaggactcatccagggccttcgtggaacagaaagaggggcagtgggctggcatgcacaggctcgcttcaggtgcagtaagacctgtcacctccaggagggcaagacatcatctgtggtgctcatcgttgtgtcccacttcatggaatagtgctgggaatatggtacacactcaagaaatatttggacagctacagtggctcacacctgtaatcccagcactctgggaggctgaggtgggtggatcacttgagcccaggagttcgagaccagcctgggcaatatggtgaagcctcgtctctacagaaaaatttaaaaattagctgggcatggtggaacgtgcctgtggtcccagctctcaggaggctgaggtgggaggatcacctgagcccagggaggttgaggctgcggtgagctctgatcatgctattattgcactccagcctgggtgacagagtaagatcctgtctcaaaaaaaaaaaaaaaaaagaaaaagaaaaagaaaaaagaaaaaaagaagaaaaagaaatctttgtggatggattatgaaaggtgttaactgaccccatctgctccttctcatacttcccacatcagaaccattgtgtgccccctcccgaccttcccaagcctccaaaccaaatgagagtcccattgaccagcctaaagggttgcacccctagcaccagccatacttcctgagaaggcagagagtagaagagaaagaggatgtactgggctaaggggctgttgggcataggaagactcctcaacgagaaagggtaggagacagaggcttgggcattacccttcccatcaattaaaaaaaactccaaacagccacagcactcccacacccacatggtgtttggatcagattgtctggattgctagtggattgtgcaagcaaagggatgcagggcaggcaggagagaccctcatttttataagcccccgggagagctggcatcttgcatgccacacctgccaaagggctgcgctgggggaagaaagcagtgatgtaaagatgcagggtgggtgggctggatagggaggtgggggtgtgggaggggatggggcccaaggaccagaaaagtccagggaatcatttctaattccactgcctcaggagacaagtctttcaacttcctcccttccttcacagctgctcccccacttcacagcccctgtcatgtagaatccccattagccctgacatccagcaactccacctgggagtgggggcagcagcagagtgggggacagaggattaggggatccacacagcccttccctcaggaggaagggctgggctggaaggggcctagaggcagctgcaaagtgcttgctgcaggtcctctgggagtcagatgccttccccggccaggccgctcgggtgaccggggtgagatatcgaagctcaacatcttagcacatcagcctcagctgtgagttgccttcctgggcttctcgcagcctccaggcctggctctgggtgaacacatcgcttcatggcctggacccatcattgcagataatccacttaggcggctgtttctgttcagcattggactatgcccatccttcaaggccttgcccttgactgactactgcagcccactgggtcctctccccactgctgtcccacggtactacagactgggaccctagagggatgtctctcccgtcagatgtcttagagctctgcctctcccctgttaagccagcctgatcttttcttctaggctgtttggtttggacacagccaaaatgggggctgagcaacagaggtgtccttgactgcaagccggtccttttgtttgtacactgccgcccctacctccgtgtgtcccttgcatggagtggcaaaacgaggcccagaaagtgggctagtttctggcaggacgcaccacagttcaagacggtatcctgcagcgctcagcgattatggcccactctgcaaccctgggatgttcgccttgaccctggagagggaagcgggtgcattgccacaggcagagggctggatcagaagacccaaagggcgctccttccatgggccttccagagactttgcagacactc

SEQ ID NO: 103436 - DNA, 423 bp, Homo sapiens
  Payload ID: 192
  Gene Symbol:
  Gene Name: AC007040.11
  ENST ID: ENST00000453130
  CDS Start-End: 1-148
catgtacctgctgagctggctgtcgctcttcatccaggtggccttcatcacgctggctgtcgcggctggactctattacctggcagaactgatagaagaatacacagtggccaccagcaggatcataaaatacatgatctggtcctagctactcgggaggctgaggcaggaaaatcgcttgaacccgggagaagaaggatgcagtgagcagagatcgtgccattgcacttcagcctggcgacagagcaagactccgtctcaaaaagaaaaaaaaaaagtgatcattttcatgaatgctgcctctaaggtccctcctgctgacaatggccagggcagtgcggaggctcctctttggaaattgtcttcagagctgatgcagactcttttgaaagcagccacagacattggggatggagtctggtg

SEQ ID NO: 103437 - DNA, 375 bp, Homo sapiens
  Payload ID: 193
  Gene Symbol:
  Gene Name: AC007163.2
  ENST ID: ENST00000624970
  CDS Start-End: 1-375
atgactcttaacgagcatgctgccttcaagcatctgtttaacaaagcacatcttgcaccgcccttaatccatttaaccctgagtggacacagcacatgtttcagagagcacagggttggggataaggtcacagatcaacaggatcccaaggcagaagaatttttcttagtacagaacaaaatgaaaagtctcccatgtctacttctatccacacagacccggcaaccatgcgatttctcaattttttccccacccttcccgcctttctattccacaaaaccgccattgtcatcatggcccatccccaatgagccgctgggcacacctcccagacggggtggtggccgggcagaggggctcctcacttcccagtag

SEQ ID NO: 103438 - DNA, 2404 bp, Homo sapiens
  Payload ID: 194
  Gene Symbol:
  Gene Name: AC007325.1
  ENST ID: ENST00000617983
  CDS Start-End: 428-1714
ggcggctggacgaggacgctccgagcccagctctcgagagttcaagcaaccgacggttccccactgctcccaggagcggttacctgggcactctgtgcccctccttcctgttcgggcccaggccgaggacctgccagtagggctcagttgcctggagcccgttcagcccatcccccagttcactttgcctgtgggatctccccgttgctcctgcccgtggactgagtggcaggccatcctacaagcacccggacacttgacatcagtggtgtcaagacaactctaagaaggttttccgtgatcctgcaagccctgcgttccttcctgggatcctgccttcaatttgattgcacaggtaccacagcaagccagtgctgtgtgctccgagttccagggcgtcctccagctcagccactgcactgagaacatggactctctgtggggcccaggagccgggagtcacccctttggggtccacaacacccggctgtccccagacttgtgtccagggaagatagtgttgagggccctcaaggagagcggggcagggatgcctgagcaggacaaggaccctagagtccaagagaatcctggtgatcagagaagggtccccgaggtcaccggggatgcaccgtctgcatttcggcccctgcgggacaatggaggcctctctccctttgtgcccgggcccgggcctctgcagacagacctccatgcccagaggtcagaaatcagatataaccagacatcccagacctcctggacgagctcctgcaccaaccgaaatgccatctccagctcctacagctccacgggaggcttgccggggctaaagcggaggagggggccagcctcatcccactgccagctgaccctcagttcctcaaagacagtgagtgaggacaggcctcaggctgtctcttcaggtcacacccagtgtgaaaaggcagcagatatagcaccagggcagacactcaccctcaggaatgactcctccacatccgaggcctctaggcccagtacacacaagtttcccctgctgccacgcaggcgaggggagcctttgatgctgccacctcccgtagagctggggtaccgggtcactgttgaagaccttgaccgggagaaggaggcggcattccagcgcatcaacagtgcactgcaggttgaggacaaggccatctcggactgcagaccctcacggccttcccacactttgtcctcacttgcaacagggacttctggtctgcctgccgtttctaaagcacccagtatggatgcacagcaggagacacacaagtcccaagactgcctgggcctactggcccccctagcatctgctgcagaggtcccctctacagctcccgtgtctgggaagaagcacagaccaccaggccccctgttctcctcctcagatccccttcctgccacctcttcccactcccgggactcagcccaggtcacctcgctgattcctgcccccttcccagctgcaagcatggatgctggcatgggaagaacaaggcctggcacttctgctcctgcagctgctgcagcagctcctcccccctccacattgaaccccacgttggggtcactactggagtggatggaggcccttcacatttctgggcctcagccacagctgcagcaggtgcccagaggtcagaaccagagatcccagacctcccggaccagctcgtgccccaaacgaaatgccatctcaagcccctaccgctctacgggaggcctcccggaacgaaagcagaggagggggccagcctcatcccactgccagctgaccctcagttcctgaaacacagtgagtgaggacggacctcaggctgtctcttcgggtcacacccagtgtgaaaagatggcagatacagcaccagggcagacactcgcccccaggggtggctcccccagatcccagtcctctaggccctgtagatgcaagtttcccctgctgccacgcaggcaaggggagcctttgatgctgccacctcccttagagctggggtaccgggtcactgctgaagacctggaccaggagaaggaggcggctttccagcgcatcaagagtgcactgcaggttgaggacaaggccatttagtactgcagaccctcacggccttcccacactttgtcctcacttgcaacaggggcttctggtctgcctgccatttctaaagcacccagtatggatgcacagcaggagagacacaagtcccaagactgcctgggcctagtggtcccccagcatctgctgcacaggcctgtagtcccagctactcaggaggctgaggcaggagaaggacataaacccgggaggcagagcttgcagtgagctgagattgcgccactgcactccagcctgggtgacagagcgagactccgtctc

SEQ ID NO: 103439 - DNA, 2405 bp, Homo sapiens
  Payload ID: 195
  Gene Symbol:
  Gene Name: AC007325.2
  ENST ID: ENST00000621424
  CDS Start-End: 205-2007
ggtctcactctgttgctgtcttcacggagagcaggagcagaggctttgagaagccagtgggccttggcctcagccctgccggcagagggtccccaccatgcagctgaagtgccagggtgcttgtgaagtctaagcccttgtctggcatttgtcaggaatataggcgcacacttaagcggcccgggcgggtaccgccgtcccgccatggctctgaggcgcgccctgcccgcgctgcgcccctgcattccccgcttcgtcccgctgtccacggcgccggcctcccgcgagcagcccgcagcgggcccagcggccgtgccaggaggtgggtcggccacggcagtgcggccgccggtgcccgccgtggacttcggcaacgcgcaggaggcgtaccgcagccggcgaacctgggagctggcgcggagcctgctggtgctgcgcttgtgcgcctggcccgcgctgctggcgcgccacgagcagctgctgtatgtttccaggaaacttctaggacagaggctattcaacaagctcatgaagatgaccttctatgggcattttgtagccggggaggaccaggagtccatccagcccctgcttcggcactacagggccttcggtgtcagcgccatcctggactatggagtggaggaggacctgagccccgaggaggcagagcacaaggagatggagtcctgcacctcagctgcggagagggatggcagtggcacgaataagcgggacaagcaataccaggcccactgggccttcggggaccgcaggaatggtgtcatcagtgcccgcacctacttctacgccaatgaggccaagtgcgacagccacatggagacattcttgcgctgcatcgaagcctcaggtagagtcagcgatgacggcttcatagccattaagctcacagcactggggagaccccagtttctgctgcagttctcagaggtgctggccaagtggaggtgcttctttcaccaaatggctgtggagcaagggcaggcgggcctggctgccatggacaccaagctggaggtggcggtgctgcaggaaagtgtcgcaaagttgggcatcgcatccagggctgagattgaggactggttcacggcagagaccctgggagtgtctggcaccatggacctgctggactggagcagcctcatcgacagcaggaccaagctgtccaagcacttggtagtccccaacgcacagacaggacagctggagcccctgctgtcccggttcactgaggaggaggagctacagatgaccaggatgctacagcggatggatgtcctggccaagaaagccacagagatgggcgtgcggctgatggtggatgccgagcagacctacttccagccggccatcagccgcctgacgctggagatgcagcggaagttcaatgtggagaagccgctcatcttcaacacataccagtgctacctcaaggatgcctatgacaatgtgaccctggacgtggagctggctcgccgtgagggctggtgttttggggccaagctggtgcggggcgcatacctggcccaggagcgagcccgtgcggcagagatcggctatgaggaccccatcaaccccacgtacgaggccaccaacgccatgtaccacaggtgcctggactacgtgttggaggagctgaagcacaacgccaaggccaaggtgatggtggcctcccacaatgaggacacagtgcgcttcgcactgcgcaggatggaggagctgggcctgcatcctgctgaccaccaggtgtactttggacagctgctaggcatgtgtgaccagatcagcttcccgctgggccaggccggctaccccgtgtacaagtacgtgccctatggccccgtgatggaggtgctgccctacttgtcccgccgtgccctggagaacagcagcctcatgaagggcacccatcgggagcggcagttgctgtggctggagctcttgaggcggctccgaactggcaacctcttccatcgccctgcctagcacccgccagcacaccctcagcctccagcaccccccgcccccgcccaggccatcaccacagctgcagccaaccccatcctcacacagattcaccttttttcaccccacacttgcagagctgctggaggtgaggtcaggtgcctcccagccctgcccagagtatgggcactcaggtgtgggccgaacctgatacctgcctgggacagccactggaaacttttgggaactctcctcgaatgtgtgggcccaaggcccccacctctgtgacccccatgtccttggacctagaggattgtccaccttctgccaaggccagcccacacagcccgagccccttggggagcagtggccgggctggggaggcctgcctggtcaataaaccactgttcctgcagctg

SEQ ID NO: 103440 - DNA, 1990 bp, Homo sapiens
  Payload ID: 195
  Gene Symbol:
  Gene Name: AC007325.2
  ENST ID: ENST00000615165
  CDS Start-End: 114-1592
gctgaagtgccagggtgcttgtgaagtctaagcccttgtctggcatttgtcaggaatataggctgctgtatgtttccaggaaacttctaggacagaggctattcaacaagctcatgaagatgaccttctatgggcattttgtagccggggaggaccaggagtccatccagcccctgcttcggcactacagggccttcggtgtcagcgccatcctggactatggagtggaggaggacctgagccccgaggaggcagagcacaaggagatggagtcctgcacctcagctgcggagagggatggcagtggcacgaataagcgggacaagcaataccaggcccactgggccttcggggaccgcaggaatggtgtcatcagtgcccgcacctacttctacgccaatgaggccaagtgcgacagccacatggagacattcttgcgctgcatcgaagcctcaggtagagtcagcgatgacggcttcatagccattaagctcacagcactggggagaccccagtttctgctgcagttctcagaggtgctggccaagtggaggtgcttctttcaccaaatggctgtggagcaagggcaggcgggcctggctgccatggacaccaagctggaggtggcggtgctgcaggaaagtgtcgcaaagttgggcatcgcatccagggctgagattgaggactggttcacggcagagaccctgggagtgtctggcaccatggacctgctggactggagcagcctcatcgacagcaggaccaagctgtccaagcacttggtagtccccaacgcacagacaggacagctggagcccctgctgtcccggttcactgaggaggaggagctacagatgaccaggatgctacagcggatggatgtcctggccaagaaagccacagagatgggcgtgcggctgatggtggatgccgagcagacctacttccagccggccatcagccgcctgacgctggagatgcagcggaagttcaatgtggagaagccgctcatcttcaacacataccagtgctacctcaaggatgcctatgacaatgtgaccctggacgtggagctggctcgccgtgagggctggtgttttggggccaagctggtgcggggcgcatacctggcccaggagcgagcccgtgcggcagagatcggctatgaggaccccatcaaccccacgtacgaggccaccaacgccatgtaccacaggtgcctggactacgtgttggaggagctgaagcacaacgccaaggccaaggtgatggtggcctcccacaatgaggacacagtgcgcttcgcactgcgcaggatggaggagctgggcctgcatcctgctgaccaccaggtgtactttggacagctgctaggcatgtgtgaccagatcagcttcccgctgggccaggccggctaccccgtgtacaagtacgtgccctatggccccgtgatggaggtgctgccctacttgtcccgccgtgccctggagaacagcagcctcatgaagggcacccatcgggagcggcagttgctgtggctggagctcttgaggcggctccgaactggcaacctcttccatcgccctgcctagcacccgccagcacaccctcagcctccagcaccccccgcccccgcccaggccatcaccacagctgcagccaaccccatcctcacacagattcaccttttttcaccccacacttgcagagctgctggaggtgaggtcaggtgcctcccagccctgcccagagtatgggcactcaggtgtgggccgaacctgatacctgcctgggacagccactggaaacttttgggaactctcctcgaatgtgtgggcccaaggcccccacctctgtgacccccatgtccttggacctagaggattgtccaccttctgccaaggccagcccacacagcccgagccccttggggagcagtggccgggctggggaggcctgcctggtcaataaaccactgttcctgcagctg

SEQ ID NO: 103441 - DNA, 1213 bp, Homo sapiens
  Payload ID: 196
  Gene Symbol:
  Gene Name: AC007325.4
  ENST ID: ENST00000613204
  CDS Start-End: 153-815
cgcgaggcgcgccgcgatcggggactgtcctaagacgggcggggcgcgctgcgctagggactgtcataaaaggggcgggacgcgccgcggtcgggatgacgtgagctgggggcgctcgtcgctgcagccggcggctagcgggcgtccgcgccatggagcgctacgcgggcgccttggaggaggtggcggacggtgcccggcagcaggagcgacactaccagctgctgtcggcgttacagagcctggtgaaggagttgcccagctcattccagcagcgcttgtcctacaccacgctgagcgacctggccctggcgcttctcgacggcaccgtgttcgaaatcgtgcaggggctactggagatccagcacctcaccgaaaagagcctgtacaaccagcgcctgcgcctacagaacgagcatcgagtgctcaggcaggcgctgcggcagaagcaccaggaagcccagcaggcctgccggccccataacctgcctgtgcttcaggcggctcagcagcgagaactagaggcggtggagcaccggatccgtgaggagcagcgggcgatggaccagaagatcgtcctggagctggaccggaaggtggctgaccagcagagcacactggagaaggcgggggtggctggcttctacgtgaccaccaacccacaggagctgatgctgcagatgaacctgctggaactcatccggaagctgcagcagaggggctgctgggcagggaaggcagccctggggctaggaggtccctggcagttgcctgctgcccagtgtgaccagaaaggcagccctgtcccaccatagccacaggcagcagaagtctgggcagagttcatcttcttgacctttggccactgccttcccagctgcccgcagggggttccccctgctgaggagagaccaggtggaccccagctgcctgtcacccttcatctgggacttgctgtcaaaccctaggatagtctcataaaggggaggctgggccagcctgctgctgtctgcttcagggccaggcagagagtgaggctgggggttctcacaccttactccaccgggcacatcccaacctgcactggggcccactcgagtgcttgttctggtctcagccgctcccttggcagctgcagcccccatgcagaagaggctcccaggcccaagctctgtgtgacccagagaaataaagatgcctcagtgtggcccgc

SEQ ID NO: 103442 - DNA, 228 bp, Homo sapiens
  Payload ID: 197
  Gene Symbol:
  Gene Name: AC007326.1
  ENST ID: ENST00000623496
  CDS Start-End: 1-228
atgaacccatcggagatgcaaagaaaagggcctccgcggagatggtatctgcaggtgtacccaacagctccgaagagacagcgaccatcgagaacgggccatgatgacgatggcggttttgtcgaaaagaaaagggggaaatgtggggaaaagcaagagagatcagattgttactgtgtctgtgtagaaagaagtagacataggagactccattttgttatgtgctaa

SEQ ID NO: 103443 - DNA, 78 bp, Homo sapiens
  Payload ID: 198
  Gene Symbol:
  Gene Name: AC007557.5
  ENST ID: ENST00000623926
  CDS Start-End: 1-78
tctgccaaggagaagctgagatcacagggaataagaagagataaaagtagggctgcatcccagggtgttagaaaaggg

SEQ ID NO: 103444 - DNA, 871 bp, Homo sapiens
  Payload ID: 199
  Gene Symbol:
  Gene Name: AC007906.1
  ENST ID: ENST00000624244
  CDS Start-End: 124-696
tgtcgatttgatcttcttttttgagagtcttgatcttttaatgtatgctgtggcatctgttctgcatcagatatttcatctgaagactcattctttcttttttgtttcttacccaatgtaataatgagtttgccaatttttgtcttctcttttaacttagaacatgtttttgtttttttgctgtctttgtcctttggcttggatttcatccttctacctttcttttcctcttttccttcaactgaagcagtaggaaagttttcagggctcattactcgtggaatattgcgttccccacgctcctttgcttttgctatggcctctgatattatacgattagccttttcttgcttgctttctgattccaccttttttctctgcttcttctcagacatgaccctcacctgggtattctgcaacttagtatatgtcccagaaccatcgctcttcttggaagatggaggccttcctcttggcctcttcactgaagacatttttggcgtcagacaaaggcttgccctctgctttttcaccaccccaggcagtgctcaagaaaaaagcattgaaagaagattcctaaatggcctatttagcaagctgcaaccaagagatgcacaaccctccacaaatacacattttgatttatcaacacatttctgccttggcaagtttatatctactgttcatcctatttaggtatgaaaaaggctgtaaacactcctaaaaagctgagtttcctcaatagctgtaagcagatagccagattccaacaaagcacagaaagaaatgaatgcacaaagcatcaaaatgcatcagcatgaatattagagatgtcgttaaaaatactgactccttctgcggaagtaggcca

SEQ ID NO: 103445 - DNA, 1622 bp, Homo sapiens
  Payload ID: 200
  Gene Symbol:
  Gene Name: AC008074.1
  ENST ID: ENST00000623932
  CDS Start-End: 577-987
ttttttttttttttttttaattagagcaggtatgcttttgatggtagggaagggatggaaaaaaggaaaagcaatagaaactgtccaattcacatcagttatccgtctgctttttcttgagagcttgtggaaggtgttaacgtggctgggaacatcaacaccttggcatgcatgaatgttaagtcaggaaggccagcgatcaccttgatagcttcttcacttaggtgctcttctcttttcggtttcctactggtagatgtgcttgtcttctctactgtagacatgagtcttgcaaatgcatcagtcactttgaggcttgaggtggagatttccagcttagaagttgttaactcatacaactccggatccacaccttggattgtggtgctgctgctagagctactgtcatccacgggcccaaagaaatcaaggttcagaagagtggaacctccactagcttctaaagggttagtaaggccactgctactccagtcaaactggacgggtggtagagactcctggaactgatcagatgtacatgtgttcatatctggtgacatggtggctgtctgaccgatggaagctattttttctgcagcagaaagtggtttcagtggttccttggtgggctctaacatacccaatcctgctgcatacatgggcactataacaggctgcttcttattgcccgtgaagagaatgtttcgggtgtctattcccaaggaggacaaaagcttcttgttgctatgggagccgccccactggtatctcaagccatgtgcatcatggatatcctgtagctcagtccacacatctagcaattccccactttcaggtaaggcctctctcgtttttattggcaaagtgcttgtttccagcaagtgcttcagggaagtaacttcctcttcagcatcagggacaagtatggaaggaaaacatgcttcgaaaattcgctccaggcggtttaaaaaattagtaaatacctgaactgaagtggctgattcctgtaaatggccactagcaactgctcctttggaagttgctgaaggtacactgtgcgttttgggggttcctggagtatcaatattttcatctgtcctatgtgactgccaggcttcctttcgatgatgagattcagtagcctgctggtctccaaaagcagcccaagaacaactatctttttgttcatcctcaaaagcattccaatctacaacttggctaggaccagctgaactgaagtctgcaaaatcatcagagtcttgaaaaccattgcagtcatcctgaatatttggcacagaatcaaaatgtccaatctcaccttcttgcccatttttaagttttgcaacaggttcagtgcctgttccactagattttcttgccaattgacattcttctgataaattatcagaagtctgttttaggtctgactttgttaatattgtctcctcttggcaagaaacagcatttatatccccaaattctccaaagtcatcacctggttcactaaaatgtggaaagtgctctgaagactcttcaaaagtggcatcactcattgaatcttgagtaccagtaacaaaaggtggagttgagccactggcagagccaaagtcaccaaaatcacc

SEQ ID NO: 103446 - DNA, 2904 bp, Homo sapiens
  Payload ID: 201
  Gene Symbol:
  Gene Name: AC008522.1
  ENST ID: ENST00000624710
  CDS Start-End: 2251-2772
ttttcctcgcttgtactactcaattataaaacaaattattaacgatagcttctgaatttggtacatggcatcataggtgaacaaaaaaagccacagttcagagctgatggtcagtccgtctctagtccagcttctataaaaggaaggcgggtttaggtttcaactctctatagttgaatctccatgagtaagaaggagatgccttccttattttcccagactgcccaagattattctctcatcaacacaaggtagaggtttgccacctctacatgaattcacaactccactctgtgactgggtggcacatcagttcgctaagaagttaaactttacaaaatgacgtcctcttcctcttgccggtatgggcctctggcagtgtcactgatcaataggacatggcaaaagtaactacctggagaactaaaactaagcataatcttggcctgaactactacggtaaagatagtatcttttatttctgtttatgtaaacttatcaacaaattattaaagcagaaactctatcacttcttggaactaaagatttacatctagctataacaatagaaacctacctatcctggagttaactttctcagattactgctcctgacttttgctgttcttttccttttgcaagggggtgccaacaatggatggaagaggcaaggagatcttactttataggaatttctccaagttacaacgagcaactgaccaaatcatattcaactacaggtgttgagagagagagtacctgacttcagaccacctgggaagcacaatgcttagttaacaagaatatctggattaagcagtgccgaagtggccgcacaccgagtcaggccaaggaagctcttctgtcattgccgcccaactctgttccactttgcatgcagacatatcaaagactgtgatgaagatcatggtggacaaggaagaatgaaaaactttgtgatgggatctgggcctctacattagagaaagaacctaacaaaccccagttctttggattcgtaaggtgaggctgaggagggcttactggagttggagacagggagagctgtgtttctgggctcaaagccaagaaacggttaagaagaggggcttgcatcagtcatatagattaaaaagagcaaggcatgataattactaaatttatagtttcatgttttaacacagaagagtcagagggaaaactgacaatttaaaacggggcatgggatgagaaaaagtctaggagttactgagatgcctggtacttatctacaaaacttccatcactagacccttttgacctacgagaatagcagtttctatggttcaacctaatacactgtatgggctcaaatatataacaattagaattgagagtaatcagaataccaataatacccccccttctgaaaaagtaacagctcttagatgaagagagcttcttaagatcagcgtttaagagtcaaagcacctgtaagggagagttaacgaccctttcaaatcaagtgagggcagaagggtgagggcatagttcaaaggaacgaggcagctccaccggaaggtggcgagtaaaagctgcacaccgtggcaaatcagtagcaatgggaaagggcaggaaggtacagccaagaatagctacaaacaactggtcaccttcaaaggaaacgctgcatatggatgtctgtgtatatgtactatacatatcaaccaagcacacacataaatatttaatatataaaaaataaagtgctttctaacaggtccctgggcagggacattataaaacatttcacagaactgcaaaacaaaattgatacaatcaaagaacactacatccaacatatgtgaaaacagccaaacacagtatgtacaatctggtgggtgtcccaggacaaacatcctgtcatatacatggtatatacatatatactcttttactcaatatattatgacaatatatattttaaaattttgttatagacaaaaaataaaaaaccaaaacaaaagacaacccctacaaaaacacgataaggatcaagcaggtgagtcctagactgacagacaaatcactgcctccacggggagtcccattgccactgctggggaaaatgtgccagcgttccttccttgggtgcagggcctccacatcctccaaggcactgtgggctgcggcagtaaagttggcatcaccagtggtgagcaggtcgaagacacaggactggaaatagatgtccttcactggcatcttctcatggcattgagtgttggcagtctccagtgtgtagccaggccaggcctgcaccaaggaggtgcgaggcaggctgtgtcccaggatggcagacacctggccctgcccgtcatcgatgcgttcactcagggggcagccgttcacgcacagctgcaggtcctggctctcctcgtaggacatggccaggtcttcaggcatacggatggcaagggtcaggtagcgacccacctgccgcacaaacactgtggtccctatatagcgggcgtgcatctccacatagtggccactctccctttccacgatacgcaggctcttggcatcgctgtccccaccactggtggtgccatccacaaaggcggccggcaggtcatctgtcacagcttggtagactttctgatctgtacactcatggtgggctttgaagataatagtgatctgtgggaaggagcatgtacaaggtttaacagaatgggaaggaagcagaacggggtaaccctctgtagcaagagctccccgccattttgaagctgaatggcttaaggcggaatctccaaaatggacccaactgcttgcacctcaaaaatggatatcactttcagaaaatattttttaaagtcctatatatttagaactaaagtttaaataaatctgtgcatc

SEQ ID NO: 103447 - DNA, 48 bp, Homo sapiens
  Payload ID: 202
  Gene Symbol:
  Gene Name: AC008622.1
  ENST ID: ENST00000624320
  CDS Start-End: 1-48
gagagtaggggtggcccagttagaatagctgggattacaggcgtgtgc

SEQ ID NO: 103448 - DNA, 69 bp, Homo sapiens
  Payload ID: 203
  Gene Symbol:
  Gene Name: AC008641.1
  ENST ID: ENST00000624359
  CDS Start-End: 1-69
atgagtaggcttgtcagagggagctcactacttacctacttggtagtagcccttgttttgcaatcgaga

SEQ ID NO: 103449 - DNA, 384 bp, Homo sapiens
  Payload ID: 204
  Gene Symbol:
  Gene Name: AC008686.1
  ENST ID: ENST00000624302
  CDS Start-End: 1-384
tggctcacacctgtaatcccagcacttggggaagctgaagtgggaggattgcttgagtccaggagttcaagacgaagctgtgccatgattgcgccactgcactccagtctgggcgacagagccagacctcgtctcaaaaaaaaaaaaaaaaaaaaaaagaggaaaaaaaggagtttgattttgagaccatgtctcactctgtcacccaggctgacatgcaatggcaccatcttggctcactgcaacctccgcctcccaggttcaagtgattctcctgcctcagcctcccaagtggctgggattacaggcactcaccaccatacccggctaatttttgtatttttagtagagtcaccctgttggtcagctattgtgagcagtgct

SEQ ID NO: 103450 - DNA, 93 bp, Homo sapiens
  Payload ID: 205
  Gene Symbol:
  Gene Name: AC008759.1
  ENST ID: ENST00000624191
  CDS Start-End: 1-93
aaaaaaattctaggccgggcgcagtggctcatgcctgtaatcccagcactttgggaggctgagggtcttgctctgtcgcccaggctggagtgc

SEQ ID NO: 103451 - DNA, 375 bp, Homo sapiens
  Payload ID: 206
  Gene Symbol:
  Gene Name: AC008810.1
  ENST ID: ENST00000624753
  CDS Start-End: 1-375
atgactcttaacgagcatgctgccttcaagcatctgtttaacaaagcacatcttgcaccgcccttaatccatttaaccctgagtggacacagcacatgtttcagagagcacagggttggggataaggtcacagatcaacaggatcccaaggcagaagaatttttcttagtacagaacaaaatgaaaagtctcccatgtctacttctatccacacagacccggcaaccatccgatttctcaattttttccccacccttcccgcctttctattccacaaaaccgccattgtcatcatggcccatccccaatgagccgctgggcacacctcccagacggggtcgtggccgggcagaggggctcctcacttcccagtag

SEQ ID NO: 103452 - DNA, 72 bp, Homo sapiens
  Payload ID: 207
  Gene Symbol:
  Gene Name: AC008914.1
  ENST ID: ENST00000624860
  CDS Start-End: 1-72
cgttgtgcctgggcaacaagagcaaaactccatctcaaaaaaaaaaaaaaaaaaacccaaaaaacaaacaaa

SEQ ID NO: 103453 - DNA, 375 bp, Homo sapiens
  Payload ID: 208
  Gene Symbol:
  Gene Name: AC009022.1
  ENST ID: ENST00000624290
  CDS Start-End: 1-375
atgactcttaacgagcacgctgccttcaagcatctgtttaacaaagcacatcttgcaccgcccttaatccatttaaccctgagtggacacagcacatgtttcagagagcacagggttggggataaggtcacagatcaacaggatcccaaggcagaagaatttttcttagtacagaacaaaatgaaaagtctcccatgtctacttctatccacacagacccggcaaccatccgatttctcaattttttccccacccttcccgcctttctattccacaaaaccgccattgtcatcatggcccatccccaatgagccgctgggcacacctcccagacggggtcgtggccgggcagaggggctcctcacttcccagtag

SEQ ID NO: 103454 - DNA, 381 bp, Homo sapiens
  Payload ID: 209
  Gene Symbol:
  Gene Name: AC009060.2
  ENST ID: ENST00000624108
  CDS Start-End: 1-381
ttggtgatgactcttaacgagcatgctgccttcaagcatctgtttaacaaagcacatcttgcaccgcccttaatccatttaaccctgagtggacacagcacatgtttcagagagcacagggttgggggtaaggtcacagatcaacaggatcccaaggcagaagaatttttcttagtgcagaacaaaatgaaaagtctcccatgtctacttctttctacacagacacggcaaccatccgatttctcaatcttttccccacctttcccgcctttctattccacaaagccgccattgtcatcctggcccgttctcaatgagctgttgggcacacctcccagacggggtggtggccaggcaggggggctcctcacttcccagtag

SEQ ID NO: 103455 - DNA, 381 bp, Homo sapiens
  Payload ID: 210
  Gene Symbol:
  Gene Name: AC009060.3
  ENST ID: ENST00000625001
  CDS Start-End: 1-381
atggtgatgactcttaacgagcatgctgccttcaagcatctgtttaacaaagcacatcttgcaccgcccttaatccatttaaccctgagtggacacagcacatgtttcagagagcacagggttggggataaggtcatagatcaacaggatcccaaggcagaagaatttttcttagtacagaacaaaatgaaaagtctcccatgtctacttctttctacacagacacggcaaccatccgatttctcaatcttttccccacctttcccccttttctattccacaaaaccgccattgtcatcatggcccgttctcaatgagctgttgggtacacctcccagacggggtggtggccgggcagaggggctcctcacttcccagtag

SEQ ID NO: 103456 - DNA, 537 bp, Homo sapiens
  Payload ID: 211
  Gene Symbol:
  Gene Name: AC009065.4
  ENST ID: ENST00000623013
  CDS Start-End: 1-537
gagctttctagccagaaaaccggagggaatcttgacaggcacacagcatccaaaccaacagcacttctgcagccggggcccggctggcagaggggtgctgcctgctgcctgcaaatcctgccagagtcaagggtttgctttcctactggtcttcctttggctagaaaagtgacaaaactgagctgggtggggtataagttacaggggcgagagcttcagtggcctgtttatcgggaggagttggagctggagcggctcctgtggcggcggcggcccggggaccgtgatctccggcgcacgggggacctgcgcctcggggagcgggaccttctcctcatccgtgggggagacctgcgccacataggcggtggtggcaacattctcctgggagggctgaatctcctggggggtggcctaggccagggggccagcacggcggtggcagtgatctcctggccatcaatttgtcctcctccatccatgtgcttcagcgccttctcggcttcatctggattctcaaactctacgtacgcatag

SEQ ID NO: 103457 - DNA, 78 bp, Homo sapiens
  Payload ID: 212
  Gene Symbol:
  Gene Name: AC009121.2
  ENST ID: ENST00000629750
  CDS Start-End: 1-78
agctgctccgccagcaccttgagtggcggcgacctcggaagccgcacccccgcggggccgcctgagaacgagtccgca

SEQ ID NO: 103458 - DNA, 610 bp, Homo sapiens
  Payload ID: 213
  Gene Symbol:
  Gene Name: AC009133.22
  ENST ID: ENST00000449759
  CDS Start-End: 117-610
gacctggccccagtgctgcgtccttatcagccgagccgtcccacccccagcctggggcctctgggagccttggtcctgagcagccaacacaccagcccagacagctgcaagtcaccatggacgctgaaggcctggcgctgctgctgccgcccgtcaccctggcagccctggtggacagctggctccgagaggactgcccagggctcaactacgcagccttggtcagcggggcaggcccctcgcaggcggcgctgtgggccaaatcccctggggtactggcagggcagcctttcttcgatgccatatttacccaactcaactgccaagtctcctggttcctccccgagggatcgaagctggtgccggtggccagagtggccgaggtccggggccctgcccactgcctgctgctgggggaacgggtggccctcaacacgctggcccgctgcagtggcattgccagtgctgccgccgctgcagtggaggccgccaggggggccggctggactgggcacgtggcaggcacgaggaagaccacgccaggcttccggctggtggagaagtatgggctcctggtgggcggggccgcctcgcaccgctacgacctggg

SEQ ID NO: 103459 - DNA, 2252 bp, Homo sapiens
  Payload ID: 214
  Gene Symbol:
  Gene Name: AC009133.23
  ENST ID: ENST00000609618
  CDS Start-End: 129-1208
cgggctgcggctgctgcaaaagccagcagcggcagcgggagctgtccggaggccggcgtcgagggtttgccgctgtctctgctattccatcctccccataggggctctctcccctctcccatctcaagatggcagccagcagctctgagatctctgagatgaagggggttgaggagagtcccaaggttccaggcgaagggcctggccattctgaagctgaaactggccctccccaggtcctagcaggggtaccagaccagccagaggccccgcagccaggtccaaacaccactgcggcccctgtggactcagggcccaaggctgggctggctccagaaaccacagagaccccggctggggcctcagaaacagcccaggccacagacctcagcttaagcccaggaggggaatcaaaggccaactgcagccccgaagacccatgccaagaaacagtgtccaaaccagaagtgagcaaagaggccactgcagaccaggggtccaggctggagtctgcagccccacctgaaccagccccagagcctgctccccaaccagacccccggccagattcccagcctacccccaagccagcccttcaaccagagctccctacccaggaggaccccacccctgagattctgtctgagagtgtaggggaaaagcaagagaatggggcagtggtgcccctgcaggctggtgatggggaagagggcccagcccctgagcctcactcaccaccctcaaaaaaatcccccccagccaatggggcccccccccgagtgctgcagcagctggttgaggaggatcgaatgagaagggcacacagtgggcatccaggatctccccgaggtagcctgagccgccaccccagctcccagttggcaggtcctggggtggaggggggtgaaggcacccagaaacctcgggactacatcatccttgccatcctgtcctgcttctgccccatgtggcctgtcaacatcgtggccttcgcttatgctgtcatgcctgcagcagggggacgtggacggggcccagcgtctgggccgggtagccaagctcttaagcatcgtggcgctggtggggggagtcctcatcatcatcgcctcctgcgtcatcaacttaggcgggtccctgccctagtggcctatgtcccttgctcggggccatggagacactgcggccagtacggcggcgcctctgtctgaagaaggggaagtgacctccggcctccaggctctggccgtggaggataccggaggcccctctgcctcggccggtaaggccgaggacgagggggaaggaggccgagaggagaccgagcgtgaggggtccgggggcgaggaggcgcagggagaagtccccagcgctgggggagaagagcctgccgaggaggactccgaggactggtgcgtgccctgcagcgacgaggaggtggagctgcctgcggatgggcagccctggatgcccccgccctccgaaatccagcggctctatgaactgctggctgcccacggtactctggagctgcaagccgagatcctgccccgccggcctcccacgccggaggcccagagcgaagaggagagatccgatgaggagccggaggccaaagaagaggaagaggaaaaaccacacatgcccacggaatttgattttgatgatgagccagtgacaccaaaggactccctgattgaccggagacgcaccccaggaagctcagcccggagccagaaacgggaggcccgcctggacaaggtgctgtcggacatgaagagacacaagaagctggaggagcagatccttcgtaccgggagggacctcttcagcctggactcggaggaccccagccccgccagccccccactccgatcctccgggagtagtctcttccctcggcagcggaaatactgattcccactgctcctgcctctagggtgcagtgtccgtacctgctggagcctgggccctccttccccagcccagacattgagaaacttgggaagaagagagaaacctcaagctcccaaacagcacgttgcgggaaagaggaagagagagtgtgagtgtgtgtgtgtgttttttctattgaacacctgtagagtgtgtgtgtgtgttttctattgaacacctatagagagagtgtgtgtgttttctattgaacatctatatagagagagtgtgtgagtgtgtgttttctattgaacacctattcagagacctggactgaattttctgagtctgaaataaaa

SEQ ID NO: 103460 - DNA, 369 bp, Homo sapiens
  Payload ID: 215
  Gene Symbol:
  Gene Name: AC009286.1
  ENST ID: ENST00000630493
  CDS Start-End: 1-369
atggcctggactcctctcctcctcctgctcctctctcactgcacaggttccctctcgcagcctgtgctgactcagccaacctccctctcagcatctcctggagcatcagccagattcacctgcaccttgcgcagtggcatcaatgttggtacctacaggatatactggtaccagcagaagccagggagtcttccccggtatctcctgaggtacaaatcagactcagataagcagcagggctctggagtccccagccgcttctctggatccaaagatgcttcaaccaatgcaggccttttactcatctctgggctccagtctgaagatgaggctgactattactgtgccatttggtacagcagcacttct

SEQ ID NO: 103461 - DNA, 3521 bp, Homo sapiens
  Payload ID: 216
  Gene Symbol:
  Gene Name: AC009336.19
  ENST ID: ENST00000468418
  CDS Start-End: 550-990
ggcggcctttgtatggcagaatccctgctcccgccggctgcaggcagggcgggcaggcaggaaccctcctcgcctggggcactctgcccaactcagaggcgagttcacccacccacctttcattgctctgtaccccaataggaggattcattctcccttgagctgtgcctacttggtgtcggggggcgggggttgcattcagctgggggtgagtggaagggccacggaaggttggcaaaatcagtggcagacaaaagctgggattacctgaggggaatggggtgctggggactggaactacattaatatctggcaggggctctcaaatgtgccatagcaagctacttgattacacgtatgttatttagttaaatttgtgaaaattatgagatgctcaccaacccggtgataaacttgctccctcgccattggctggcctggtcacatggctgcccaactttattcagttgacagcaagtaggagggccctatggaaggagaaaaaaagacaacacgagaaaaattagtattttctaccttctgaaattaatggtcatgagttcgtatatggtgaactccaagtatgtggaccccaagttccctccgtgcgaggagtatttgcagggcggctacctaggcgagcagggcgccgactactacggcggcggcgcgcagggcgcagacttccagcccccggggctctacccacggcccgacttcggtgagcagcctttcggaggcagcggccccgggcctggctcggcgctgcctgcgcggggtcacggacaagagccaggcggccccggcggtcactacgccgctccaggagagccttgcccagctcccccggcgcctccgccggcgcccctgcctggcgcccgggcctacagtcagtccgaccccaagcagccgccctccgggacggcactcaagcagccggccgtggtctacccctggatgaagaaggtgcacgtgaattcgggtatctgacaaggcgccgtcggattgaaatcgctcacaccctgtgtctgtcggagcgccagatcaagatctggttccagaaccggaggatgaagtggaaaaaagatcataagctgcccaacactaaaggcaggtcatcgtcctcatcttcctcctcatcttgctcctcctcagtcgcccccagccagcatttacagccgatggccaaagaccaccacacggacctgacgaccttatagaagtggggaccctgggcccatctctccctgcgcaccaggctgagccgaagctgcgggggcaggccgggcctgctgtcacctcgctgggctctaaggtcacctggagcctgggggccggcccagctctctcaggattcagcagacattggaggtggcagtgaaggatacagtggtagtcaatgttatttgagcagggtcagcaggccctggagcttcctgagtgcacaatgcagaaggctgcttactatgaaaacccaggactgtttggaggctatggctacagcaaaactacggacacttacggctacagcaccccccaccagccctacccaccccctgctgctgccagctccctggacactgactatccaggttctgcctgctccatccagagctctgcccctctgagagccccagcccacaaaggagctgaactcaatggcagctgcatgcggccgggcactgggaacagccagggtgggggtggtggcagccagcctcctggtctgaactcagagcagcagccaccacaaccccctcctccaccaccgaccctgcccccatcttcacccaccaatcctggaggtggagtgcctgccaagaagcccaaaggtgggcccaatgcttctagctcctcagccaccatcagcaagcagatcttcccctggatgaaagagtctcgacagaactccaagcagaagaacagctgtgccactgcaggagagagctgcgaggacaagagcccgccaggcccagcatccaagcgggtacgcacggcatacacgagcgcgcagctggtggaattggaaaaggaattccacttcaaccgctacttgtgccggccgcgccgcgtggagatggccaacctgctgaatctcacggaacgccagatcaagatctggttccagaaccggcgcatgaagtacaagaaggaccagaaggccaagggcatcctgcactcgccggctagccagtcccctgagcgcagcccaccgctcggcggcgccgctggccacgtggcctactccggccagctgccgccagtgcccggcctggcctacgacgcgccctcgccgcctgctttcgccaaatcacagcccaatatgtacggcctggccgcctacacggcgccactcagcagctgcctgccacaacagaagcgctacgcagcgccggagttcgagccccatcccatggcgagcaacggcggcggcttcgccagcgccaacttgcagggcagcccggtgtacgtgggcggcaacttcgtcgagtccatggcgcccgcgtccgggcctgtcttcaacctgggccacctctcgcacccgtcgtcggccagcgtggactacagttgcgccgcgcagattccaggcaaccaccaccatggaccttgcgaccctcatcccacctacacagatctctcggcccaccactcgtctcagggacgactgccggaggctcccaaactgacgcatctgtagcggccgccgccagcccgaactcgcggcaaaattacctctcttgctgtagtggtggggtagagggtggggcccgcggggcagttcgggaacccccttccccgctcttgccctgccgccgcctcccgggtctcaggcctccagcggcggaggcgcaggcgaccgggcctcccctccatgggcgtcctttgggtgactcgccataaatcagccgcaaggatccttccctgtaaatttgacagtgccacatactgcggaccaagggactccaatctggtaatggtgtcccaaaggtaagtctgagacccatcagcggcgcgccctgcagagggaccagagcttggagagtcttgggcctggcccgcgtctagcttagtttcagagaccttaatttatattctccttcctgtgccgtaaggattgcatcggactaaactatctgtatttattatttgaagcgagtcatttcgttccctgattatttatccttgtctgaatgtatttatgtgtatatttgtagatttatccagccgagcttaggaattcgcttccaggccgtgggggccacatttcacctccttagtccccctggtctgaactagttgagagagtagttttgaacagtcgtaaccgtggctggtgtttgtagttgacataaaggattaagaccgcaaattgtccttcatgggtagagtcaggaagcccggtggcgtggcacaacacactttggtcatttctcaaaaaccacagtcctcaccacagtttattgatttcaaattgtctggtactattggaacaaatatttagaataaaaaaatttcccagt

SEQ ID NO: 103462 - DNA, 384 bp, Homo sapiens
  Payload ID: 217
  Gene Symbol:
  Gene Name: AC009491.1
  ENST ID: ENST00000624237
  CDS Start-End: 1-384
atgcacctccacagacatcttctctgccaagccacagggacttgtggcaacggtgacattcatgctgtctccgtggtctgttcccacaggaggaggtgtttagactctgaggaggttactgagatctgctcttctgacttcattcctggaagagactgtgtgggagaatcaggtcccatgattggaatgttgtctcgctcacaggggctcttggggaaaggcaggcagcatgacaaaggcaagtcaaaagtagagcagagttcttataccttgaactggcctcccatgggtgcaggtgaaggtgcaggaccccatccacctctcaccagcttatatcctcacctttatctgatgatatggctactcaaactctctgtcctaaaa

SEQ ID NO: 103463 - DNA, 384 bp, Homo sapiens
  Payload ID: 218
  Gene Symbol:
  Gene Name: AC009491.2
  ENST ID: ENST00000623558
  CDS Start-End: 1-384
atgcacctccttggaggtctccttctccagcaatctgcagagacttggccccttctggctgtctctgttgtcgggtctcactggaggaggaggtgttttgactgtgaggtcatcactagaaactgctcttctgactctattcctgaaagaggcagtgtgcaagaaataggtcccatggggattggaatactgtctgtttcacagggtctctctcagataggcaggaaacatgacaaaggcaagtccaaattggagaagtactctcacacctcaaactggcctctcacacatgcaggtgaaggagtgggaccccatccacccctcaccagattgcatcttcaaccctatctgacctttttgctgcttatactctctgtccctgaa

SEQ ID NO: 103464 - DNA, 945 bp, Homo sapiens
  Payload ID: 219
  Gene Symbol:
  Gene Name: AC009758.1
  ENST ID: ENST00000623472
  CDS Start-End: 1-945
atgcctactgtaaaccacagtggcactagccacacagtcttccacttgctgggcatccctggcctacaggaccagcacatgtggatttctatcccattcttcatttcctatgtcaccgcccttcttgggaacagcctgctcatcttcattatcctcacaaagcgcagcctccatgaacccatgtacctcttcctctgcatgctggctggagcagacattgtcctctccacgtgcaccattcctcaggccttagctatcttctggttccgtgctggggacatctccctggatcgttgcatcactcagctcttcttcatccattccaccttcatctctgagtcagggatcttgctggtgatggcctttgaccactatattgccatatgctacccactgaggtacaccaccattcttacaaatgctctgatcaagaaaatttgtgtgactgtctctctgagaagttatggtacaattttccctatcatatttcttttaaaaagattgactttctgccagaataatattattccacacaccttttgtgaacacattggcctagccaaatatgcatgtaatgacattcgaataaacatttggtatgggttttccattctaatgtcgacggtggtcttagatgttgtactaatttttatttcctatatgctgattctccatgctgtcttccacatgccttctccagatgcttgccacaaagctctcaacacatttggctcccatgtctgcatcatcatcctcttttatgggtctggcatcttcacaatccttacccagaggtttggacgccacattccaccttgtatccacatcccgttggctaatgtctgcattctggctccacctatgctgaatcccattatttatgggatcaaaaccaagcaaatccaggaacaggtggttcagtttttgtttataaaacagaaataa

SEQ ID NO: 103465 - DNA, 1668 bp, Homo sapiens
  Payload ID: 220
  Gene Symbol:
  Gene Name: AC009950.1
  ENST ID: ENST00000540870
  CDS Start-End: 1-1668
atggggaggggcttcaggatgttcaccatgacaagagccatggaagaggctctttttcagcacttcatgcaccagaagctggggatcgcctatgccatacacaagccatttcccttctttgaaggcctcctagacaactccatcatcactaagagaatgtacatggaatctctggaagcctgtagaaatttgatccctgtatccagagtggtgcacaacattctcacccaactggagaggacttttaacctgtctcttctggtgacattgttcagtcaaattaacctgcgtgaatatcccaatctggtgacgatttacagaagcttcaaacgtgttggtgcttcctatgaatggcagagcagagacacaccaatcctacttgaagccccaactggcctagcagaaggaagctccctccataccccactggcgctgcccccaccacaaccccctcaaccaagctgttcaccctgtgcgccaagagtcagtgagcctggaacatcctcccagcaaagcgatgagatcctgagtgagtcgcccagcccatctgaccctgtcctgcctctccctgcactcatccaggaaggaagaagcacttcagtgaccaatgacaagttaacatccaaaatgaatgcggaagaagactcagaagagatgcccagcctcctcactagcactgtgcaagtggccagtgacaacctgatcccccaaataagagataaagaagaccctcaagagatgccccactctcccttgggctctatgccagagataagagataattctccagaaccaaatgacccagaagagccccaggaggtgtccagcacaccttcagacaagaaaggaaagaaaagaaaaagatgtatctggtcaactccaaaaaggagacataagaaaaaaagcctcccaggagggacagcctcatctagacacggaatccaaaagaagctcaaaagggtggatcaggttcctcaaaagaaagatgactcaacttgtaactccacggtagagacaagggcccaaaaggcgagaactgaatgtgcccgaaagtcgagatcagaggagatcattgatggcacttcagaaatgaatgaaggaaagaggtcccagaagacgcctagtacaccacgaagggtcacacaaggggcagcctcacctgggcatggcatccaagagaagctccaagtggtggataaggtgactcaaaggaaagacgactcaacctggaactcagaggtcatgatgagggtccaaaaggcaagaactaaatgtgcccgaaagtccagattgaaagaaaagaaaaaggagaaagatatctgttcaagctcaaaaaggagatttcagaaaaatattcaccgaagaggaaaacccaaaagtgacactgtggattttcactgttctaagctccccgtgacctgtggtgaggcgaaagggattttatataagaagaaaatgaaacacggatcctcagtgaagtgcattcggaatgaggatggaacttggttaacaccaaatgaatttgaagtcgaaggaaaaggaaggaacgcaaagaactggaaacggaatatacgttgtgaaggaatgaccctaggagagctgctgaagagtggacttttgctctgtcctccaagaataaatctcaagagagagttaaatagcaagtga

SEQ ID NO: 103466 - DNA, 99 bp, Homo sapiens
  Payload ID: 221
  Gene Symbol:
  Gene Name: AC009977.1
  ENST ID: ENST00000623231
  CDS Start-End: 1-99
aaacataaaaaaaaggtgatagaaagatggagtctcgctctgttgcccaggctggagtgcagtggggcaatcttggctcactgcaagctccgcctccca

SEQ ID NO: 103467 - DNA, 69 bp, Homo sapiens
  Payload ID: 222
  Gene Symbol:
  Gene Name: AC010184.1
  ENST ID: ENST00000629935
  CDS Start-End: 1-69
agagcagcagccccggcccacgccgccccgtcgagatcttgccccgcaggctctgcaacactcgaacct

SEQ ID NO: 103468 - DNA, 599 bp, Homo sapiens
  Payload ID: 223
  Gene Symbol:
  Gene Name: AC010287.1
  ENST ID: ENST00000623879
  CDS Start-End: 77-439
actaactacaaaggggaacaaggaaacctcttgggagataatgaaaatattctgcatcagccaggcatggtagtttatgcctataatcccatcactgtgggaggcaggaagatcacttgaggccaggagttccaaaatattctgtatcttgattgtggtggtagttacacaactgtataaatttgtcaaaattcaaagaactatacacctaaagggaagacttctactgtacgaagtatacctcataaataaccaaccaaaaaacctctgttctcattttagttttcctaccacttatattaaaaaagagaggctttggctgggcccagtggctcacacctataatcccagcactctgggaggccgaggtgggtggatcacccgaggtcaggagttcaagaccagcctggccaacatggtggaaccctgtctctactaaaaatacaaaaattagctgggtgcagtggcacgcgtctgtaatcccagctacttgagaggctgaggcaggagaatcgcttgaactcaggaggcggaaggtgcagtgggcccagattgcaccactgcactctagcctgggggacagagcaagactccatctc

SEQ ID NO: 103469 - DNA, 375 bp, Homo sapiens
  Payload ID: 224
  Gene Symbol:
  Gene Name: AC010412.1
  ENST ID: ENST00000624832
  CDS Start-End: 1-375
atgactcttaacgagcatgctgccttcaagcatctgtttaacaaagcacatcttgcaccgcccttaatccattcaaccctgagtggacacagcacatgtttcagagagcacagggttgggggcaaggtcacagatcaacaggatcccaaggcagaagaatttttcttagtacagaacaaaatgaaaagtctcccatgtctacctcttcctacacagacacagcaaccatccgatttctcaatcttttctccacctttccccattttctattccacaaaactgccattgtcatcatggcccgttctcaatgagctgttgagtacacctcccagacggggtggtggccgggcagaggggctcctcacttcccagtag

SEQ ID NO: 103470 - DNA, 3677 bp, Homo sapiens
  Payload ID: 225
  Gene Symbol:
  Gene Name: AC010547.9
  ENST ID: ENST00000561908
  CDS Start-End: 504-788
agcggtgcgcttctggcctgttttgagtccgcgctcaaaggtgccaaagtgcaaggacccacagttgggcggagcttgggttgggagtgagacagcatagcagtccaggctggtcctttgagcgcagctcaaagaaggggacggggagggcgtcactatacaattgtggccgggtgggacctgggctgtttgctcttggaggctgtacagctgcaagctttgccgctcacgaactggagctggagaaagagccccccaaggatgggaggatgacagaagtgtctgcagatggcactgcctgggcaccaggagaggtctctgaggatccccgggtggaaactcctcccgggagtaaaaccacacaaccactgagaagaccgctccggcatcctagagagtacgcgtgtgagcctgggtgcaaggccaaagtagtgacgcacttccgttcacgcaccgctttctgtttttcctgagcctttgcctgctaagagggagaccaggtcatggcagccatgcctctgaaagctcaataccaggagatggtgaccttcgaggatgtggctgtgcacttcaccaagacagaatggactggcctttctcctgcccagagggccctgtacagaagtgtgatgttggagaattttgggaacctgactgctttggggtacccagttcccaaacctgcactgatctcacttttggagagaggggacatggcttggggcctggaagcacaggatgatcccccagcagagaggaccaaaaacgtctgtaaagttattctctagctgaggatgatgatgttgaacaagatagatacagtgtctgttccctgcagccaccagagaagacagacatataaataaactatcaccattaagggtaacagtcaccgtgggccagacccgagctagccgacagggatgcggccacagctggccgggcgtgaccaccaccgaggcgcagcgaccttgctcctagagaggcccggccgcctggtgacgcacttccggcagcgccggggagcagtccgctacggagctccagcccttctctgagacggggaccaggggatggcagccatgcacctgacagcctggccccagggacttcacggatcccctgaagctcatccatggacttccatggactacagaagtcggtgacctttgaggacgtggctgtgtacttcacccaggcggaatgggatggcctgtcccctgcacagaggaccctgtacagggatgtgatgctggagaattatgggaatgtggcctccctgggatttccacttctcaaacctgctgtgatctcacaactggagggaggaagtgagctggggggctcatctccactggctgcaggaacaggcctccagggcctccagactgtagatattcagactgacaatgatttgacaaaggaaatgtatgaaggaaaagagaatgtatcatttgaacttcaaagagacttttcccaggaaacagacttttcagaagcctctcttctagagaaacaacaggaagtccactcagcaggaaatataaagaaggagaagagcaacaccattgatggaacagtgaaagatgagacaagccccgtggaggagtgtttttttagtcaaagttcaaactcatatcagtgtcataccatcactggagagcagccctctgggtgtacaggattggggaaatccatcagctttgatacaaaactcgtgaagcatgaaataattaattctgaggaaagacctttcaaatgtgaagaattagtagagccctttaggtgtgactctcaacttattcaacatcaagagaacaacactgaggaaaagccttatcagtgttcggagtgtggcaaagctttcagcattaatgagaaattaatttggcatcagagacttcacagtggggagaaacccttcaaatgtgtggagtgtgggaaaagcttcagctacagttcccattatatcacacatcagacaatccacagtggggagaagccctatcagtgtaagatgtgtgggaaggccttcagtgttaatggaagcctaagtaggcatcagagaatccatacgggagagaagccctatcagtgcaaggaatgtggaaatggcttcagctgtagttctgcatatattacacatcagagagtccacactggagagaaaccttacgagtgtaatgactgtgggaaagcgttcaatgttaatgcaaaattaattcaacatcagagaatccatactggagagaaaccttatgaatgtaatgaatgtggaaaaggcttcaggtgcagctcccagcttaggcagcatcagagcatccacacaggagaaaagccctatcagtgtaaagagtgtggaaaaggcttcaataataatacaaaactcattcagcatcagagaatccacacaggtgagaaaccctatgaatgcactgaatgtggaaaagccttcagtgtcaaagggaagttaatccaacaccagagaattcacacaggcgagaaaccctatgagtgtaatgaatgcgggaaagccttcagatgtaactcccaatttcggcagcatctgagaattcacactggggagaagccctatgagtgtaatgagtgtggaaaggccttcagcgttaatgggaaactaatgcggcatcagagaattcacactggggagaaaccttttgaatgtaatgagtgtgggagatgctttacttctaaaagaaacctacttgatcatcaccgaatccatactggagaaaagccctatcaatgtaaggaatgtgggaaagccttcagtatcaatgccaaactaactaggcatcagaggatacatactggggagaaacctttcaaatgtatggaatgtgagaaagcattcagctgtagttctaactatattgtgcaccagagaatccatacaggagagaaaccctttcagtgtaaggagtgtggaaaagccttccatgttaatgcccatttaattcggcatcagagaagccacactggggagaaacccttcagatgtgtggaatgtggcaaaggcttcagctttagttctgactacattatacatcagacagtccacacttggaagaaaccctatatgtgtagtgtgtgtgggaaagcattcaggtttagcttccagctcagtcagcatcagagtgtccatagtgaaggaaaatcctaataatgagaaagatatagaaaactcttaaggttaatgccaaaatggatcaagtatcatcagattcatccattgaaaaacctccaagagggcatgaatatggcagagtcttcatatggaaacagtttttattctattcagtttaaatcaggaaaggatgaccagttaaagagaaacatccaaaaatagctttgttttgtaccaacaggaattagaaaatataatgaaaagatttcgttcccagcagcatcaagaaaagtagattttctagaaataaacagttatggaggacttgtatggagaaatttaagtcttcactgagggccactttacaaaggaaatttgaataaatggagagagagagaagccttgttgttggataggaaaacccgtactaaagatactctacctacattaatttatttgtttaatttttgacaacaagcatgtattacttttgaaaagatgaaaaataaagatttatttaaaaaaggaa

SEQ ID NO: 103471 - DNA, 4227 bp, Homo sapiens
  Payload ID: 226
  Gene Symbol:
  Gene Name: AC010642.1
  ENST ID: ENST00000591325
  CDS Start-End: 117-530
gtcgccggtgcggccgccattgtccggcgttcggcgagtcgggtggtccctttggctggagtgcctctctggtctggggatcacctcaggcgctgtccttcactgggcgatccagcatggaccccgaggacgaaggggtagcgggagtgatgtctgtggggccgccggcggcccggcttcaggtaacaataacaacaataacgacggcggcgggctccgggcaagcgtctcccgcgcagactgaccctttcacctcgcggcgcgatgagagcggcaccgctgttaatgcccttgacacgtggggaaactcagacgcgggtcggggcgtggtgaccgtcctggctggtcagagagggggccgggattccaaccaggcgcctggcccccgaatgcgcatgctccacgcggctctgtcctccccagggctggggtcggtcattcccgagagaatcgagcaggcccatctcctgcgttctgctccgccccgccgacacccttgcccattccaggaaggtctgtcctcgtgttgactgataacagtaattgtagcgttggccgggtgcccagatggcaagaatcatcgaatagagatgctttaacgcgtggagtcagcggacacccaccgggaccccagcaccgcggagcccctgccctggggcttgggcacaacctcttgggggcaatgatgggtcaccacgcactgagtgtgatgagagtgaccaccagggtcgtcccctgcgagactgtgggagaactgcagtgcagggcggtcagtgtttgcagggccatctggccatcagagctccactttctagacaaagtggttgcggcctgtgttctccataaagctgcctcgcgtggcaggaaacaacaataattatccttcctcaagctctgcaactttgaaattatacttttttttattttttgtcgttggtttgttcatggggatttgcattatttcagatttggtacacaaagtgagacttgataatcttaggttgcaggttttcagatgtgtgttgctccaaatttgcatgaaatgctaccacgttttattttgttcttgctgtggatgggggacaaggaatgagtcgtaagaaaggcttgagagaaagtgtattagttacctgttgctgtgtaactcaaaacttcgtgacctggaacaacaataaatatctcacgagttctgacaggagtaatggaatgtcctagctggtggttctggttcaggcccatgaagttacagtgaagatgtcagcatagctgttgtcacctgagacctgagtctggaggatccacctccaggatggctcactcacatgtctgttgataggagacctcagttgttctccatgtaggcctctctttggaactgctagggatccttgcaacatggcatctggcttcccacagaacaagtgatccaggagagggcaaggtagaaactgtaacaccttccatgacctggattcagaattcacactcttgtcacttccacggtgtcttactggttacaaagtcaaccttgttgagtgttggaggggaccacaccagggctggaggtcattggcagaggtggtgggggagcatcttggagactgtccatcacaggagacaaggaccagaatggagagcttcaaggaaccagtgaccttccgggatgtggctgtggactttacccaggaggaatgggggcagctggaccctacccagaggatcctctaccgtgacgtgatgctggagacctttggtcacctgctctccataggtcctgagcttccgaagcctgaagtcatctcccagctggagcaagggaccgagctatgggtggctgagagaggaaccacccagggctgccatccagcctgggagcctcgatctgaaagccaagcatcacgcaaggaagagggcctgcctgaagaggagccatcccatgtcacgggaagggaaggattcccgacagatgctccttatcccaccacgttagggaaagacagggagtgtcagagccagagtctggcactcaaggagcagaataacttgaagcagttggaatttggcctcaaggaagcaccagttcaagatcaaggctacaaaactctcagactcagggaaaactgcgtcctgagttcaagcccaaatccattcccagagatctctagaggggagtatttgtatacttacgactcacagattacagactcagaacataactccagcttagtcagtcagcagacaggctccccaggaaaacagcccggtgaaaacagtgactgtcacagagattccagtcaggccattccaattacggaactcacaaaaagccaggtgcaggacaaaccctacaaatgtactgactgtgggaagtcgtttaaccataacgcacacctcaccgtgcacaagaggattcatacgggagaaagaccttatatgtgcaaggagtgtgggaaagccttcagccagaactcctccctcgtccagcatgagcgcatccacactggagacaagccctacaagtgtgccgaatgtgggaagtctttctgccatagtacacaccttaccgtccatcggaggattcacactggggagaagccctatgagtgtcaggactgtgggagggccttcaaccagaactcctccctggggcggcacaagaggacacacactggggagaagccatacacctgcagtgtgtgtgggaaatccttctctcggaccacttgccttttcctgcacctgagaactcacaccgaggagaggccctacgagtgtaaccactgcgggaagggcttcaggcacagctcatccctggcccagcaccagcggaagcacgcgggggagaagccctttgagtgccgccagaggctgatctttgagcagacgccagctctcacaaagcatgaatggacagaagccctgggctgtgacccacctttgagtcaagatgagaggactcaccgaagcgacagacccttcaaatgtaatcagtgtgggaagtgtttcattcagagctctcacctcatccggcaccagataactcacaccagagaggagcagccccatgggcgaagccggcggcgtgaacaatcctcgagcaggaactcacacctggttcagcatcaacacccgaactccagaaagagctctgcaggcggagcaaaggcagggcagccggaaagcagagccctggctttgtttgacatccaaaaaatcatgcaagagaaaaaccctgtgcacgttattggggtggaagagccttctgtgggtgcttccatgttatttgacatcagagaatccacataggagagaaactttgctgatgacttttaaccacaagtaaaaaatgtgaagcaaccgtgacaagtggtgcccgaccagggacctgaacgaggaaggtctgccagagcagagaaagtgaaactgatcagacgaactacgaacccctggacgggagagtctgccggcggagaatataaggagatggacaaaccgtgtgggtgccctccaggtgtgtgtgaccatggaacgggagaccggagggatccatggtattcaaccgtgggcctgttacctccagtacgagccatgagccagcggaatctgaatgcaaagacagaacaagggccgaccggagtcacaatgacatccaaccccataacatggggacagatcaagaaaacgacacaagaagctgagaaactactggagcgccagggtcaggcaaaaacccctgactccatgttcttggccatgctagctgtagtgtcctgtgcgtctataggatcgggtgaaccaccaaccggcaattgaaagctgcacagcctgaaattacctttattcaattaatgcaaaaacaaaaggggagatgttggaggccgaaggaatgagggtcgtgaccaactcagtataccactggaggctctgtgagcaaacagcaaactgttctcatgaaagcaggatgttggcgaactgacaaactctgtctgccgccagaaggaatgctgggggcagtcatgtcccaggtcccgtgctccttgaggttatccacaggaacatccagaacctgttgaacaaagaaaggaatcatgtgggcctgtgttaaatcaaatagctgaccgacagttatcccttcctccctattcactctacctaataaatatgaagggctgtaaaagctcaggtccctgttccctaatatcaaggagccccctgaccccttctttc

SEQ ID NO: 103472 - DNA, 515 bp, Homo sapiens
  Payload ID: 227
  Gene Symbol:
  Gene Name: AC010646.3
  ENST ID: ENST00000594059
  CDS Start-End: 377-515
aaacagcagtggcggacatagcagcggaggtggcagcagcggggacgaggaagagtggtatcagggccttcctgctgtccctggtggcaccagtggcattgatggtggccaggtgggcagagcctgggacccagagaagttagcccaggaactggcagcatcgctcaccaggacactggacctgcaggagcagctgcagtctctgcgcagggagctggaacaggtggctcagaaggggcgagccagacggtctcagagtgccgagctgaacagggatttatgcaaagcccacaggtccaaccgtgactgccagatcgaccagcaccaccggaaccagtgccagtactgccgtctcaagaagtgcttccgggtgggcatgaggaaggaggcggtgcagcgcggccgcatcccgcactcgctgcctggtgccgtggccgcctcctcgggcagccccccgggctcggcgctggcggcagtggcgagcggcggagacctcttcccggggcagccggtgt

SEQ ID NO: 103473 - DNA, 66 bp, Homo sapiens
  Payload ID: 228
  Gene Symbol:
  Gene Name: AC010655.1
  ENST ID: ENST00000624208
  CDS Start-End: 1-66
agtcatttattcaacaactatttattaaatgtcaagatgaccttgggctcagtatttgcatcagtt

SEQ ID NO: 103474 - DNA, 1468 bp, Homo sapiens
  Payload ID: 229
  Gene Symbol:
  Gene Name: AC011043.2
  ENST ID: ENST00000611619
  CDS Start-End: 97-459
tactcactatcagaagttctctgttttgaaaaaagaataactgatgtgataaatttatgtaatttaacaattaatctacctcacgtgcttgtaggtatgtattcatttcctaccaccgtagtggaagagagactatccctatcaatacacctggtaacattcccaacagtaagccgtgagattctgcttgaaatcacctctcagacaaataaaaaacagtcctgggaaatgtacgacactcattctgctaaagaaataggcatcatagctggggaacagattcaaaagacccaggctgttccctacatatgtttcctcctcagacatcagttaatcagtcaatcaagtcaagtgagagtggaggccatgtattccctcttattcttgggcactctcctccaaggaggaaaaggccaggaggtcctgttagaggatgcactcagagcccgggctccctaaggtatgagagttctaaccagcaggtgtagacttttcaggagtgaggaatgaggcaggcattccaaacctggagcttcatcaccttttgtttcatctcaagacaattctgaggggctgttttggagcgtgtctggaaggtgaacgttgaagaagagtgtgggctttgatgtgactcagatgagatctttcatggggaggcaggaattcaatgcccagaatctgggctggtgtctttgaggtcagtaggttgcctctttgtatccaagtccattgttactaaattggaggctggagattctaaatggcttccagaccatctctctgattctctttgggagattgggtctgaaaaagacaatgtcagtatttttgggaaattctagaaagtctgcttggaaacctgggaagacctcttgcctagtgcctaaatattcaatgtgcagctctagccatgtagatgcttggtaggtatagagctgggttttcatttatatcagcaaaacctatgtcagagttgaagaagtagtcaagacaaagtgtcttggtcgcaggccggggaacatcttaaaagcaaacttctagcctgatgactcttggcaatgagtgttgggtcctggctaaagtgccttgaatgcagcatgaggccaatccatgaatccaacttccaatggagaaatgttaatattttttcagtttgaatcaatcagggtgaaattaccttgctattggtttgcttactttttattatttcatataaaatctaagacaaaatacattaaatgcttattgatatatgtatttattcttcacctggctcataatatttgcctaattttaaactttcttctattttgtaggtttcaacttatttcattgtaagatattgttaaatctaatacgggcattgtcacttttacaaataattttattttatttcatgtatttcctattcactttttacatttaaattatggaccatttcatcatataaaaagctccatttctattt

SEQ ID NO: 103475 - DNA, 216 bp, Homo sapiens
  Payload ID: 230
  Gene Symbol:
  Gene Name: AC011155.1
  ENST ID: ENST00000623202
  CDS Start-End: 51-176
gcacaaagcacttcttgttacagagagaaatgttttgattcattatttcaggaaaggatgccaaggaaaaaaagcagctgacttacaacagcagttcgtacatttcctggactgttgggatgtatcatgtattccatttacattgcacctgcctcaggcacaggatatcactacgtaagagcaaacatattggcaagtaacaatatggtgtatgtg

SEQ ID NO: 103476 - DNA, 498 bp, Homo sapiens
  Payload ID: 231
  Gene Symbol:
  Gene Name: AC011295.1
  ENST ID: ENST00000610645
  CDS Start-End: 13-408
agaacggaccagatgggtccagcagtgctgggtcaaggcgaggaggggcagccggaagcgcgcgcatgctctggactcctgcagccgccgaaacggccaatcgtgtttaaggagaaactaacaatgaaaacggactcgttgatggaggaaaagttggaatgcagcctctggtgctgtttgagcgatccctctaccccgggtcgctgctgtgttctggaaaggcgcattgtaccctggatgcagcaggaatcctattcatcttcttcaccgatatggtctgtggactctgatgagccaaatctgacatcagttctggaacgtctagaagatactaaggacaacagttcggtaaggaaagaaaccaagctattttctcttttcctcatgaacattatatttagaaattaaatgttaaatgataatattatataaaaacatgattaataactataatcttagaggaattaaagtctgggtattttaagtcctccaaatctt

SEQ ID NO: 103477 - DNA, 48 bp, Homo sapiens
  Payload ID: 232
  Gene Symbol:
  Gene Name: AC011380.1
  ENST ID: ENST00000626887
  CDS Start-End: 1-48
aactcacaatcaggtactcgggaggctgagactgggagaaggaaaaaa

SEQ ID NO: 103478 - DNA, 578 bp, Homo sapiens
  Payload ID: 233
  Gene Symbol:
  Gene Name: AC011513.3
  ENST ID: ENST00000598976
  CDS Start-End: 121-578
aagagactcagggcagagggaggaaggacagcagaccagacagtcacagcagccttgacaaaacgttcctggaactcaagctcttctccacagaggaggacagagcagacagcagagaccatggagtctccctcggcccctccccacagatggtgcatcccctggcagaggctcctgctcacagcctcacttctaaccttctggaacccgcccaccactgccaagctcactattgaatccacgccgttcaatgtcgcagaggggaaggaggtgcttctacttgtccacaatctgccccagcatctttttggctacagctggtacaaaggtgaaagagtggatggcaaccgtcaaattataggatatgtaataggaactcaacaagctaccccagggcccgcatacagtggtcgagagataatataccccaatgcatccctgctgatccagaacatcatccagaatgacacaggattctacaccctacacgtcataaagtcagatcttgtgaatgaagaagcaactggccagttccgggtatacccggagctgcccaagccctccatctccagcaacaa

SEQ ID NO: 103479 - DNA, 277 bp, Homo sapiens
  Payload ID: 233
  Gene Symbol:
  Gene Name: AC011513.3
  ENST ID: ENST00000435837
  CDS Start-End: 76-277
acagcagccttgacaaaacgttcctggaactcaagctcttctccacagaggaggacagagcagacagcagagaccatggagtctccctcggcccctccccacagatggtgcatcccctggcagaggctcctgctcacagcctcacttctaaccttctggaacccacccaccactgccaagctcactattgaatccacgccgttcaatgtcgcagaggggaaggaggttcttctactcgcccacaacctgccccagaatcgtattggttacagctggt

SEQ ID NO: 103480 - DNA, 397 bp, Homo sapiens
  Payload ID: 234
  Gene Symbol:
  Gene Name: AC011530.4
  ENST ID: ENST00000596586
  CDS Start-End: 1-397
ccccttgtgtgcaagaagatcgcccaggagcggctcacagtcctcctgttcctggaggactgcatcatcactgcctgccaggagggcctcatctgcacctgggcccggccgggcaaggcgttcacagacgaggagaccgaggcccagacaggggaaggaagttggcccaggtcacccagcaagtcagtggtagaggagctgggcgcctccgaactggcccaggacaagtacgtggccgacttcttgcagtgggcggagcccatcgtggtgaggcttaaggaggtccgactgcagagggacgacttcgagattctgaaggtgatcggacgcggggcgttcagcgaggtagcggtagtgaagatgaagcagacgggccaggtgtatgccatgaagatca

SEQ ID NO: 103481 - DNA, 321 bp, Homo sapiens
  Payload ID: 234
  Gene Symbol:
  Gene Name: AC011530.4
  ENST ID: ENST00000595946
  CDS Start-End: 1-321
ccccttgtgtgcaagaagatcgcccaggagcggctcacagtcctcctgttcctggaggactgcatcatcactgcctgccaggagggcctcatctgcacctgggcccggccgggcaaggcggagctgggcgcctccgaactggcccaggacaagtacgtggccgacttcttgcagtgggcggagcccatcgtggtgaggcttaaggaggtccgactgcagagggacgacttcgagattctgaaggtgatcggacgcggggcgttcagcgaggtagcggtagtgaagatgaagcagacgggccaggtgtatgccatgaagatc

SEQ ID NO: 103482 - DNA, 558 bp, Homo sapiens
  Payload ID: 234
  Gene Symbol:
  Gene Name: AC011530.4
  ENST ID: ENST00000593999
  CDS Start-End: 1-398
cgggtgtggcggcagagcctggcacaccattcagcattggccgcttcgccacgctcacactgcaggagcggcgggaccggggggcagagaaggagcacaagcgctaccacagcctgggcaacatcagccggggtggcagtggcggcagtggcagtggtggggagaagcccagcggccctgttccccgcagccgcctggaccccgccaaggtgctgggcactgcgctgtgcccgcgcatccacgaggtgcccctgctggagccccttgtgtgcaagaagatcgcccaggagcggctcacagtcctcctgttcctggaggactgcatcatcactgcctgccaggagggcctcatctgcacctgggcccggccgggcaaggcgcggagcccatcgtggtgaggcttaaggaggtccgactgcagagggacgacttcgagattctgaaggtgatcggacgcggggcgttcagcgaggtagcggtagtgaagatgaagcagacgggccaggtgtatgccatgaagatcatgaacaagtgggacatgctgaagaggggcgaggt

SEQ ID NO: 103483 - DNA, 432 bp, Homo sapiens
  Payload ID: 234
  Gene Symbol:
  Gene Name: AC011530.4
  ENST ID: ENST00000597712
  CDS Start-End: 1-171
ccccttgtgtgcaagaagatcgcccaggagcggctcacagtcctcctgttcctggaggactgcatcatcactgcctgccaggagggcctcatctgcacctgggcccggccgggcaaggcgccccaaatccagggttttccaaagtgtggttcaagaaccacctgcatctgaatctagaggtactggatacaaccccacgtctgggccgttacccaggacattctacatgagaacgtgggggtggggccctggctgcacctgaactgtcacctggagtcagggtggaagcggagcccatcgtggtgaggcttaaggaggtccgactgcagagggacgacttcgagattctgaaggtgatcggacgcggggcgttcagcgaggtagcggtagtgaagatgaagcagacgggccaggtgtatgccatgaagatca

SEQ ID NO: 103484 - DNA, 1468 bp, Homo sapiens; identical to SEQ ID NO: 103474
  Payload ID: 235
  Gene Symbol:
  Gene Name: AC011841.1
  ENST ID: ENST00000621382
  CDS Start-End: 97-459

SEQ ID NO: 103485 - DNA, 406 bp, Homo sapiens; identical to SEQ ID NO: 103428
  Payload ID: 236
  Gene Symbol:
  Gene Name: AC012005.3
  ENST ID: ENST00000624575
  CDS Start-End: 28-105

SEQ ID NO: 103486 - DNA, 501 bp, Homo sapiens; identical to SEQ ID NO: 103427
  Payload ID: 237
  Gene Symbol:
  Gene Name: AC012005.4
  ENST ID: ENST00000624333
  CDS Start-End: 13-411

SEQ ID NO: 103487 - DNA, 711 bp, Homo sapiens
  Payload ID: 238
  Gene Symbol:
  Gene Name: AC012314.2
  ENST ID: ENST00000617291
  CDS Start-End: 57-641
ctctttctcagtgaccgggtggtttgcttaggcgcagacggggaagcggagccaacatgccagtggcccggagctgggtttgtcgcaaaacttatgtgaccccgcggagacccttcgagaaatctcgtctcgaccaagagctgaagctgatcggcgagtatgggctccggaacaaacgtgaggtctggagggtcaaatttaccctggccaagatccgcaaggccgcccgggaactgctgacgcttgatgagaaggacccacggcgtctgttcgaaggcaacgccctgctgcggcggctggtccgcattggggtgctggatgagggcaagatgaagctggattacatcctgggcctgaagatagaggatttcttagagagacgcctgcagacccaggtcttcaagctgggcttggccaagtccatccaccacgctcgcgtgctgatccgccagcgccatatcagggtccgcaagcaggtggtgaacatcccgtccttcattgtccgcctggattcccagaagcacatcgacttctctctgcgctctccctacgggggtggccgcccgggccgcgtgaagaggaagaatgccaagaagggccagggtggggctggggctggagacgacgaggaggaggattaagtccacctgtccctcctgggctgctggattgtctcgttttcctgccaaataaacaggatcagcgctttac

SEQ ID NO: 103488 - DNA, 476 bp, Homo sapiens
  Payload ID: 238
  Gene Symbol:
  Gene Name: AC012314.2
  ENST ID: ENST00000629607
  CDS Start-End: 57-476
ctctttctcagtgaccgggtggtttgcttaggcgcagacggggaagcggagccaacatgccagtggcccggagctgggtttgtcgcaaaacttatgtgaccccgcggagacccttcgagaaatctcgtctcgaccaagagctgaagctgatcggcgagtatgggctccggaacaaacgtgaggtctggagggtcaaatttaccctggccaagatccgcaaggccgcccgggaactgctgacgcttgatgagaaggacccacggcgtctgttcgaaggcaacgccctgctgcggcggctggtccgcattggggtgctggatgagggcaagatgaagctggattacatcctgggcctgaagatagaggatttcttagagagacgcctgcagacccaggtcttcaagctgggcttggccaagtccatccaccacgctcgcgtgctgatccgccagcgccatatcagccctcggaggtga

SEQ ID NO: 103489 - DNA, 711 bp, Homo sapiens; identical to SEQ ID NO: 103487
  Payload ID: 239
  Gene Symbol:
  Gene Name: AC012314.3
  ENST ID: ENST00000616928
  CDS Start-End: 57-641

SEQ ID NO: 103490 - DNA, 476 bp, Homo sapiens; identical to SEQ ID NO: 103488
  Payload ID: 239
  Gene Symbol:
  Gene Name: AC012314.3
  ENST ID: ENST00000626065
  CDS Start-End: 57-476

SEQ ID NO: 103491 - DNA, 711 bp, Homo sapiens; identical to SEQ ID NO: 103487
  Payload ID: 240
  Gene Symbol:
  Gene Name: AC012314.5
  ENST ID: ENST00000618751
  CDS Start-End: 57-641

SEQ ID NO: 103492 - DNA, 476 bp, Homo sapiens; identical to SEQ ID NO: 103488
  Payload ID: 240
  Gene Symbol:
  Gene Name: AC012314.5
  ENST ID: ENST00000630768
  CDS Start-End: 57-476

SEQ ID NO: 103493 - DNA, 711 bp, Homo sapiens; identical to SEQ ID NO: 103487
  Payload ID: 241
  Gene Symbol:
  Gene Name: AC012314.6
  ENST ID: ENST00000620720
  CDS Start-End: 57-641

SEQ ID NO: 103494 - DNA, 476 bp, Homo sapiens; identical to SEQ ID NO: 103488
  Payload ID: 241
  Gene Symbol:
  Gene Name: AC012314.6
  ENST ID: ENST00000625297
  CDS Start-End: 57-476

SEQ ID NO: 103495 - DNA, 711 bp, Homo sapiens; identical to SEQ ID NO: 103487
  Payload ID: 242
  Gene Symbol:
  Gene Name: AC012314.7
  ENST ID: ENST00000616839
  CDS Start-End: 57-641

SEQ ID NO: 103496 - DNA, 476 bp, Homo sapiens; identical to SEQ ID NO: 103488
  Payload ID: 242
  Gene Symbol:
  Gene Name: AC012314.7
  ENST ID: ENST00000627525
  CDS Start-End: 57-476

SEQ ID NO: 103497 - DNA, 711 bp, Homo sapiens; identical to SEQ ID NO: 103487
  Payload ID: 243
  Gene Symbol:
  Gene Name: AC012314.9
  ENST ID: ENST00000610953
  CDS Start-End: 57-641

SEQ ID NO: 103498 - DNA, 476 bp, Homo sapiens; identical to SEQ ID NO: 103488
  Payload ID: 243
  Gene Symbol:
  Gene Name: AC012314.9
  ENST ID: ENST00000630852
  CDS Start-End: 57-476

SEQ ID NO: 103499 - DNA, 42 bp, Homo sapiens
  Payload ID: 244
  Gene Symbol:
  Gene Name: AC012363.2
  ENST ID: ENST00000631153
  CDS Start-End: 1-42
ttgtcaggtaatgaaagcaaagggcattcatcattgtcactc

SEQ ID NO: 103500 - DNA, 1653 bp, Homo sapiens
  Payload ID: 245
  Gene Symbol:
  Gene Name: AC013269.5
  ENST ID: ENST00000409259
  CDS Start-End: 197-646
gggaagcaggggcagagcgctcaggccagggccggcgggggcactgcgcactggccgcctccctcctctggccaatcctcctgccgctgcgcgtctagtccacctcgtccctctctgcaggtccactaacccatctgattaccggatcctgcttgggtatgaccagcaaagccatcccacagagcacagcaagcagatgacagtgaataagatcatggtgcacgctgactataacgagttgcaccgcatggggagtgacatcaccctgctgcagctgcaccatcatgtggaattcagctcccacatcctccccgcctgccttccggaaccaaccacgtggctggcccctgacagctcctgctggatatctggttggggaatggtcaccgaggatgtcttcctgcctgagcccttccaacttcaggaggcagaggtcggtgtcatggacaacactgtctgcggatcctttttccagccccagtaccccggccagccaagcagcagtgactacaccatccacgaggacatgctgtgcgctggggacctcataacaggaaaggccatttgccgatgcggggaactgaggcccagagaggaagtgtatcacccaagcgagactccaggggtcccctcgtctgcccattaaatggcacctggttcctgatggggctgtctagttggagcctcgactgctgctcacccgtcggtcccagggtcttcaccaggctcccctacttcaccaactggatcagccagaagaagagggagagcacccctccagatcccgccttggctcctcctcaggaaacacccccagccctggacagcatgacctctcagggcatcgtccacaagcccgggctctgcgcagcccttctggctgctcacatgttcctcctgctgctgattctcctggggagcctgtgaagggccagggcccctggcctcttaccacaagcatgcccacctcaggccggcctccttgctgagctctgcacactcctgacgtgtttccatctctgagctctcctgtccacccaaggccacccctgcctcaggcctgacaaactaaaaaccacccaagaagcttcttgctctggtttctggcccaccagagccatctcccatgctccactgtgtctccagctcctcagggagggaaggtctccctcctccctgggcagggtccaggctgaccatatgggagccaagtcactctccttgggaagttgggtcgcgcagactcaggccccattcgggtcctccagggcatgcagtcttccagaaaaatggggccagggcctccccacatggaagaagctgcctgtcctcctggagctgggtgttgtgcaccggtcagggatgaagcggcatcttccaggtgcgcaggtcacagaggctctcctcgacagcttgcaagtaaactgtgaagggggctgaggtcttcggtcagcagtaccagagctgtgtcccatgggccagctctcagctgactgccccctgtacccgctgccctgccctctccctgcctccagaaacccagcccccatccctgtggcttgctccagcttgtaggggttgtggcttagctgacccaggacttgctggtccagcactgagcccataaaccagactctgagttgcccctgtaaa

SEQ ID NO: 103501 - DNA, 48 bp, Homo sapiens
  Payload ID: 246
  Gene Symbol:
  Gene Name: AC013286.1
  ENST ID: ENST00000629453
  CDS Start-End: 1-48
atggctgtttcggagtcaatagcttccacaccgcaaaaccactacaca

SEQ ID NO: 103502 - DNA, 603 bp, Homo sapiens
  Payload ID: 247
  Gene Symbol:
  Gene Name: AC015688.3
  ENST ID: ENST00000584605
  CDS Start-End: 1-282
tcctggagtccagtaatccaaagatgtagccagccatatggtttttcgctgctgatctctttctttttaaaatgtgtttctgaaacatcccaacaaccaccacgacaaaaaaacactgcctgcccagcgctgcaaaccaggagcacacgtcctagattcagactgttggccataaaccccactcgggagatggagctgcacctgctatttcttaaaatgacaccaccaacaaccaaacctgtcatgacagacagcaaatgtttacacgtatatttctcctgagtgaacctgatgttttacaataggctgtccccttttctgggactattcaaggaggtctccaggacggacttcagatcactgtcaatgggaccgttctcagctccagtggaaccaggtttgctgtgaactttcagactggcttcagtggaaatgacattgccttccacttcaaccctcggtttgaagatggagggtacgtggtgtgcaacacgaggcagaacggaagctgggggcccgaggagaggaagacacacatgcctttccagaaggggatgccctttgacctctgcttcctggtgcagagctcagatttcaaggtga

SEQ ID NO: 103503 - DNA, 532 bp, Homo sapiens
  Payload ID: 247
  Gene Symbol:
  Gene Name: AC015688.3
  ENST ID: ENST00000579290
  CDS Start-End: 1-200
aaacatcccaacaaccaccacgacaaaaaaacactgcctgcccagcgctgcaaaccaggagcacacgtcctagattcagactgttggccataaaccccactcgggagatggagctgcacctgctatttcttaaaatgacaccaccaacaaccaaacctgtcatgacagacagcaaatgtttacacgtatatttctcctgagtgaacctgatgttttacaataggtaataataaaaacagtctgtgcagatgcactggcactgacggccaggatggcggaaatggccatcccctctgaggaccttgtaggcggtgagggacccatgctgggccagaaggaagacaaacatggctgtccccttttctgggactattcaaggaggtctccaggacggacttcagatcactgtcaatgggaccgttctcagctccagtggaaccaggtttgctgtgaactttcagactggcttcagtggaaatgacattgccttccacttcaaccctcggtttgaagatggagggtacgtggtgtg

SEQ ID NO: 103504 - DNA, 375 bp, Homo sapiens
  Payload ID: 248
  Gene Symbol:
  Gene Name: AC016142.1
  ENST ID: ENST00000622932
  CDS Start-End: 1-375
atgactcttaacgagcatgctgccttcaagcatctgtttaacaaagcacatcttgcaccgcccttaatccatttaaccctgagtggacacagcacatgtttcagagagcacagggttggggataaggtcacagatcaacaggatcccaaggcagaagaatttttcttagtacagaacaaaatgaaaagtctcccatgtctacttctatccacacagacccggcaaccatctgatttctcaattttttccccacccttcccgcctttctattccacaaaaccgccattgtcatcatggcccatccccaatgagccgctgggcacacctcccagacggggtcgtggccgggcagaggggctcctcacttcccagtag

SEQ ID NO: 103505 - DNA, 1802 bp, Homo sapiens
  Payload ID: 249
  Gene Symbol:
  Gene Name: AC016549.1
  ENST ID: ENST00000627417
  CDS Start-End: 1149-1514
cactcattcattccaaagggtctctcaaggcaatggtaatgtgcaaggaggtgatacctaaatgaatgaccaaaagaacatgcttctgcttttgtgtgtctcctacattttagacatttgtttgtttctcttggtagcctttaaattccttgaagcccaggaccatgtctcacttacctttgtgtttccactaactagtctacctcctggaattggcagatactcagtgaaagcctgtgaaataagtgatgtctatttctagcatattattctgagatttaatgatagatttagtgattgaatgagatttccattttcaaatacagcaaaagcataactattttcattcattcatattcattcaacttcattctcaaaattaggtcctgagttaactaataattacctttgaaatgtgtgggttatttgaggcaatcaggtggtgacattgagctctcagccagagtttgtttctggaattgattcagttccattgcattgatttttgttctcagaagccaaggtttcccaggaaaaatcattcccacttgaattgggctgtgattcttgctgcgtttaagtaaaggaagcctcttggttctagttctgcaaacttacacactgaactgggacaagtttttgtttagagtaatggctgggaaaagaggaacctttcattttattcagaagtcaaaaacaaaggcctcccagccacctggagatgttttgttgcagacaccagcctggctctgtctttatgcctaacaattgagcatccagtcttctttgtgctgggaccattgctcagctctgcaaggggaaaagagggagaaagccagagctgccaggcttcttgcactggggccgggggagggttcctgggaagcaggtgctctctggcttcttggtacgtgaggctctcggagctgcctctcctctgaccctcaggtcctcaccgagtttgctccaggagtatattgaaaacatacccagtgctctctcaagcacccactgcttagagggcccagatttcttttccttctttcccttgcagagctggagactgcatcgggcatctggtgtttaaactaaacaggaaaactgactaaaggtccacagtgctcattgtgtagactagctgccctccgatgggtgctctgattatcagtggttccagtgcagggcctgtcactaaacaggcctcacttcctccttgggggctttcccatgggaggtgtggctttttactctacatggaaatgactctctgcagccacagaacacagtcattttctgaattatcccagtctctcatgcgccctggattcctccagatgccttatatctcttgtgcaaagttgtctaaaatttggttcccagcttccaagccttgccttttggccttcctggaagtatttttgttgatgagtcgtctgtcattattctctaaaatgatttgctttttgtttctttcattcctatttccaccccacatatacacacatgcttcttaacttaggggattacatgccaataaatctattgttgaaaatgcactaatactatcgcaaagatgaaaattcacaggctgaaccgttgtaagtccatatgctcctcaacttacatgtgtgatggagttatgcccaaataagtccatcgtcaagttgaaaaatcaaaatcaagccatcttaggttgaggaccatttgtttgtacctccaaagatgtcatatctttaaacatactccctagcttttctttttactttttattttgaagtaattatagaatcacagaaagttgc

SEQ ID NO: 103506 - DNA, 228 bp, Homo sapiens
  Payload ID: 250
  Gene Symbol:
  Gene Name: AC016577.1
  ENST ID: ENST00000624963
  CDS Start-End: 1-228
atgaacccatcggagatgcaaagaaaagggcctccacggagatggtatctgcaggtgtacccaacagctccgaagagacagcgaccatcgagaacgggccatgatgatgatggcggttttgtcgaaaagaaaagggggaaatgtggggaaaagcaagagagatcaaattgttactgtgtctgtgtagaaagaagtagacataggagactccattttgttatgtgctaa

SEQ ID NO: 103507 - DNA, 1640 bp, Homo sapiens
  Payload ID: 251
  Gene Symbol:
  Gene Name: AC016734.1
  ENST ID: ENST00000620528
  CDS Start-End: 72-878
cgcgtttgtagaggggtgggtgcgcacgctctgtccctgcgtgaccttccgaccccgctgtcctcaccgcaatggcggctgtgagggccctggtggcctcgaggctcgctgcggcatctgcattcacgtccctgtcccccggcggtcggacgccttcccagcgcgcagcccttcacctctccgtgccgcgccccgcggccagggtcgcgctggtgctgtctggatgcggagtctacgatgggaccgagatccacgaggcctcggcgatcctggtgcacctgagccgtggaggggctgaagtccagatctttgctcctgacgtccctcagatgcacgtgattgaccacaccaaggggcagccgtccgaaggcgagagcaggaatgttttgaccgagtctgcgaggatcgcccgtggcaaaatcacagacctggccaacctcagtgcagccaaccatgatgctgccatctttccaggaggctttggagcggctaaaaacctgagcacgtttgccgtggacgggaaagattgcaaggtgaataaagaagtggagcgtgtcctgaaggagttccaccaggccgggaagcccatcggcttgtgctgcattgcacctgtcctcgcggccaaggtgctcagaggcgtcgaggtgactgtgggccacgagcaggaggaaggtggcaagtggccttatgccgggaccgcagaggccatcaaggccctgggtgccaagcactgcgtgaaggaagtggtcgaagctcacgtggaccagaaaaacaaggtggtcacgaccccagccttcatgtgcgagacggcactccactacatccatgatgggatcggagccatggtgaggaaggtgctggaactcactggaaagtgacgcgcatggacggggcccagctaggcgccaggacttggcctcaccctctggctgaggagctgtcggctgctttccatccagctgggagtctggcaggcccttttttttttttctttgccgaaacctgcaggcgttctctctctaaggaggatgtgctgcagtgcatgggggatgtttcttcctgggtgtggctgggctgctctcacatacagaggccgaggggccaattcgttctctgccacagggacttgcctcactgtgtcccaaaaacaaatcgcagccagcttttccagaaatagaaaattctgccgtctgaggttttatacttcaggttagttagtttttggaaggaagaacatttttaggtttgcaagcctcctgatcaggaaaccagaaataccacatttatggaccatgaaaggttggttcttgactctgaagggacttttgagttaatcagcgtaaggggatttctaaagcaggcaatccctgtagccgcagagaataaacgccttcccaaaatggcaacttcccacagccacatttcagacctgctgagactgctgagtgaggaatggcagtgaggtttcttcaattagtctcagttctcttaattttcaggaagaaagggaaattgcagctcctcagcccccaggattgacctctggggagtgatggtagcgttggtgccaggccgtgggttcaggtgtggcagaagcttgcagatgcgtccgaagggaaataaagtgtgttggcgttaga

SEQ ID NO: 103508 - DNA, 1435 bp, Homo sapiens
  Payload ID: 251
  Gene Symbol:
  Gene Name: AC016734.1
  ENST ID: ENST00000620015
  CDS Start-End: 125-673
gtgctactggaaatgactgcaggccgaaccagtagggcaggaggccaccacgcgtgccaggatcctggtgcacctgagccgtggaggggctgaagtccagatctttgctcctgacgtccctcagatgcacgtgattgaccacaccaaggggcagccgtccgaaggcgagagcaggaatgttttgaccgagtctgcgaggatcgcccgtggcaaaatcacagacctggccaacctcagtgcagccaaccatgatgctgccatctttccaggaggctttggagcggctaaaaacctgagcacgtttgccgtggacgggaaagattgcaaggtgaataaagaagtggagcgtgtcctgaaggagttccaccaggccgggaagcccatcggcttgtgctgcattgcacctgtcctcgcggccaaggtgctcagaggcgtcgaggtgactgtgggccacgagcaggaggaaggtggcaagtggccttatgccgggaccgcagaggccatcaaggccctgggtgccaagcactgcgtgaaggaagtggtcgaagctcacgtggaccagaaaaacaaggtggtcacgaccccagccttcatgtgcgagacggcactccactacatccatgatgggatcggagccatggtgaggaaggtgctggaactcactggaaagtgacgcgcatggacggggcccagctaggcgccaggacttggcctcaccctctggctgaggagctgtcggctgctttccatccagctgggagtctggcaggcccttttttttttttctttgccgaaacctgcaggcgttctctctctaaggaggatgtgctgcagtgcatgggggatgtttcttcctgggtgtggctgggctgctctcacatacagaggccgaggggccaattcgttctctgccacagggacttgcctcactgtgtcccaaaaacaaatcgcagccagcttttccagaaatagaaaattctgccgtctgaggttttatacttcaggttagttagtttttggaaggaagaacatttttaggtttgcaagcctcctgatcaggaaaccagaaataccacatttatggaccatgaaaggttggttcttgactctgaagggacttttgagttaatcagcgtaaggggatttctaaagcaggcaatccctgtagccgcagagaataaacgccttcccaaaatggcaacttcccacagccacatttcagacctgctgagactgctgagtgaggaatggcagtgaggtttcttcaattagtctcagttctcttaattttcaggaagaaagggaaattgcagctcctcagcccccaggattgacctctggggagtgatggtagcgttggtgccaggccgtgggttcaggtgtggcagaagcttgcagatgcgtccgaagggaaataaagtgtgttggcgttaga

SEQ ID NO: 103509 - DNA, 318 bp, Homo sapiens
  Payload ID: 251
  Gene Symbol:
  Gene Name: AC016734.1
  ENST ID: ENST00000625036
  CDS Start-End: 1-318
cgatgggaccgagatccacgaggcctcggcgatcctggtgcacctgagccgtggaggggctgaagtccagatctttgctcctgacgtccctcagatgcacgtgattgaccacaccaaggggcagccgtccgaaggcgagagcaggaatgttttgaccgagtctgcgaggatcgcccgtggcaaaatcacagacctggccaacctcagtgcagccaaccatgatgctgccatctttccaggaggctttggagcggctaaaaacctcgggtctccctatagtgacccggccaagcacagaagtctgggtttgcagctgtt

SEQ ID NO: 103510 - DNA, 898 bp, Homo sapiens
  Payload ID: 251
  Gene Symbol:
  Gene Name: AC016734.1
  ENST ID: ENST00000624120
  CDS Start-End: 19-732
cccgctgtcctcaccgcaatggcggctgtgagggccctggtggcctcgaggctcgctgcggcatctgcattcacgtccctgtcccccggcggtcggacgccttcccagcgcgcagcccttcacctctccgtgccgcgccccgcggccagggtcgcgctggtgctgtctggatgcggagtctacgatgggaccgagatccacgaggcctcggcgatcctggtgcacctgagccgtggaggggctgaagtccagatctttgctcctgacgtccctcagatgcacgtgattgaccacaccaaggggcagccgtccgaaggcgagagcaggaatgttttgaccgagtctgcgaggatcgcccgtggcaaaatcacagacctggccaacctcagtgcagccaaccatgatgctgccatctttccaggaggctttggagcggctaaaaacctcttgtgctgcattgcacctgtcctcgcggccaaggtgctcagaggcgtcgaggtgactgtgggccacgagcaggaggaaggtggcaagtggccttatgccgggaccgcagaggccatcaaggccctgggtgccaagcactgcgtgaaggaagtggtcgaagctcacgtggaccagaaaaacaaggtggtcacgaccccagccttcatgtgcgagacggcactccactacatccatgatgggatcggagccatggtgaggaaggtgctggaactcactggaaagtgacgcgcatggacggggcccagctaggcgccaggacttggcctcaccctctggctgaggagctgtcggctgctttccatccagctgggagtctggcaggcccttttttttttttctttgccgaaacctgcaggcgttctctctctaaggaggatgtgctgcagtgcat

SEQ ID NO: 103511 - DNA, 696 bp, Homo sapiens
  Payload ID: 251
  Gene Symbol:
  Gene Name: AC016734.1
  ENST ID: ENST00000624648
  CDS Start-End: 1-675
ccttcccagcgcgcagcccttcacctctccgtgccgcgccccgcggccagggtcgcgctggtgctgtctggatgcggagtctacgatgggaccgagatccacgaggcctcggcgatcctggtgcacctgagccgtggaggggctgaagtccagatctttgctcctgacgtccctcagatgcacgtgattgaccacaccaaggggcagccgtccgaaggcgagagcaggaatgttttgaccgagtctgcgaggatcgcccgtggcaaaatcacagacctggccaacctcagtgcagccaaccatgatgctgccatctttccaggaggctttggagcggctaaaaacctgagcacgtttgccgtggacgggaaagattgcaaggtgaataaagaagtggagcgtgtcctgaaggagttccaccaggccgggaagcccatcggtcactcacttaaggacctgcctggtcactgtccagggaggcccctaaagtggagcctcaggaagaggtgcaggctcagagctcctgaaggaggtccctgctgcagccgtgtcacagccggggtgaaggtttcgcccatggtctccacctcgggatcccgtccttgtcagagaagtgttccttggatgagcgcccagagggaggagcccatggccctttcttctgtgactgattaaaaatctcgatgaaacaagaca

SEQ ID NO: 103512 - DNA, 781 bp, Homo sapiens
  Payload ID: 251
  Gene Symbol:
  Gene Name: AC016734.1
  ENST ID: ENST00000623810
  CDS Start-End: 60-233
ggggtgggtgcgcacgctctgtccctgcgtgaccttccgaccccgctgtcctcaccgcaatggcggctgtgagggccctggtggcctcgaggctcgctgcggcatctgcattcacgtccctgtcccccggcggtcggacgccttcccagcgcgcagcccttcacctctccgtgccgcgccccgcggccagggtcgcgctggatcctggtgcacctgagccgtggaggggctgaagtccagatctttgctcctgacgtccctcagatgcacgtgattgaccacaccaaggggcagccgtccgaaggcgagagcaggaatgttttgaccgagtctgcgaggatcgcccgtggcaaaatcacagacctggccaacctcagtgcagccaaccatgatgctgccatctttccaggaggctttggagcggctaaaaacctgagcacgtttgccgtggacgggaaagattgcaaggtgaataaagaagtggagcgtgtcctgaaggagttccaccaggccgggaagcccatcggtcactcacttaaggacctgcctggtcactgtccagggaggcccctaaagtggagcctcaggaagaggtgcaggctcagagctcctgaaggaggtccctgctgcagccgtgtcacagccggggtgaaggtttcgcccatggtctccacctcgggatcccgtccttgtcagagaagtgttccttggatgagcgcccagagggaggagcccatggccctttcttctgtgactgattaaaaatctcgatgaaacaaga

SEQ ID NO: 103513 - DNA, 411 bp, Homo sapiens
  Payload ID: 251
  Gene Symbol:
  Gene Name: AC016734.1
  ENST ID: ENST00000624810
  CDS Start-End: 1-411
cgatgggaccgagatccacgaggcctcggcgatcctggtgcacctgagccgtggaggggctgaagtccagatctttgctcctgacgtccctcagatgcacgtgattgaccacaccaaggggcagccgtccgaaggcgagagcaggaatgttttgaccgagtctgcgaggatcgcccgtggcaaaatcacagacctggccaacctcagtgcagccaaccatgatgctgccatctttccaggaggctttggagcggctaaaaacctgagcacgtttgccgtggacgggaaagattgcaaggtgaataaagaagtggagcgtgtcctgaaggagttccaccaggccgggaagcccatcggcgggtctccctatagtgacccggccaagcacagaagtctgggtttgcagctgtt

SEQ ID NO: 103514 - DNA, 75 bp, Homo sapiens
  Payload ID: 252
  Gene Symbol:
  Gene Name: AC016753.2
  ENST ID: ENST00000630104
  CDS Start-End: 1-75
ataataataataataataataataaaattcatttttatttatttatttattttttttgagacagggtctcactgt

SEQ ID NO: 103515 - DNA, 264 bp, Homo sapiens
  Payload ID: 253
  Gene Symbol:
  Gene Name: AC017028.10
  ENST ID: ENST00000623536
  CDS Start-End: 1-264
atgaggagccaggggcagggtgggcctggggcctggcggaggatggagagctggagtgcagagcctgctggaccagggcagggccgccttgggtccccctgtgaggcagccgagcaagcgagctttgagaagacagtgataggagtggggcaagcacgggcagccctttctgaagaggagcacagagtctgggaggctgcagcgggagttggaggactagagcagtggggctgctgggaagcaggggtcacgagtggctggggc

SEQ ID NO: 103516 - DNA, 381 bp, Homo sapiens
  Payload ID: 254
  Gene Symbol:
  Gene Name: AC017081.1
  ENST ID: ENST00000625193
  CDS Start-End: 1-381
atggtgatgactcttaatgagcatgctgccttcaagcatctgtttaacaaagcacatcttgcaccgcccttaatccatttaaccctgagtggacacagcacatgtttcagagagcacagggttgggggtaaggtcatagatcaacaggatcccaaggcagaagaatttttcttagtacagaacaaaatgaaaagtctcccatgtctacttctttctacacagacacggcaaccatccgatttctcaatcttttccccacctttcccccttttctattccacaaaaccgccattgtcatcatggcccgttctcaatgagctgttgggtacacctcccagacggggtggtggccgggcagaggggctcctcacttcccagtag

SEQ ID NO: 103517 - DNA, 48 bp, Homo sapiens
  Payload ID: 255
  Gene Symbol:
  Gene Name: AC018512.1
  ENST ID: ENST00000625006
  CDS Start-End: 1-48
atgtctcaaaaaaaaaaaaaaaaaagccagaaaaaagaaaaaaaaaag

SEQ ID NO: 103518 - DNA, 1926 bp, Homo sapiens
  Payload ID: 256
  Gene Symbol:
  Gene Name: AC018755.18
  ENST ID: ENST00000429354
  CDS Start-End: 131-1786
cacagctctcactcaccctccggcttcctgtcggggctttctcagccccaccccacgtttggacatttggagcatttccttccctgacagccggacctgggactgggctggggccctggcggatggagacatgctgcccctgctgctgctgcccctgctgtggggggggtccctgcaggagaagccagtgtacgagctgcaagtgcagaagtcggtgacggtgcaggagggcctgtgcgtccttgtgccctgctccttctcttacccctggagatcctggtattcctctcccccactctacgtctactggttccgggacggggagatcccatactacgctgaggttgtggccacaaacaacccagacagaagagtgaagccagagacccagggccgattccgcctccttggggatgtccagaagaagaactgctccctgagcatcggagatgccagaatggaggacacgggaagctatttcttccgcgtggagagaggaagggatgtaaaatatagctaccaacagaataagctgaacttggaggtgacagccctgatagagaaacccgacatccactttctggagcctctggagtccggccgccccacaaggctgagctgcagccttccaggatcctgtgaagcgggaccacctctcacattctcctggacggggaatgccctcagccccctggaccccgagaccacccgctcctcggagctcaccctcacccccaggcccgaggaccatggcaccaacctcacctgtcagatgaaacgccaaggagctcaggtgaccacggagagaactgtccagctcaatgtctcctatgctccacagaccatcaccatcttcaggaacggcatagccctagagatcctgcaaaacacctcataccttccggtcctggagggccaggctctgcggctgctctgtgatgctcccagcaacccccctgcacacctgagctggttccagggctcccctgccctgaacgccacccccatctccaataccgggatcttggagcttcgtcgagtaaggtctgcagaagaaggaggcttcacctgccgcgctcagcacccgctgggcttcctgcaaatttttctgaatctctcagtttactccctcccacagttgctgggcccctcctgctcctgggaggctgagggtctgcactgcagatgctcctttcgagcccggccggccccctccctgtgctggcggcttgaggagaagccgctggaggggaacagcagccagggctcattcaaggtcaactccagctcagctgggccctgggccaacagctccctgatcctccacggggggctcagctccgacctcaaagtcagctgcaaggcctggaacatctatgggtcccagagcggctctgtcctgctgctgcaagggagatcgaacctcgggacaggagtggttcctgcagcccttggtggtgctggtgtcatggccctgctctgtatctgtctgtgcctcatcttctttttaatagtgaaagcccgcaggaagcaagcagctgggagaccagagaaaatggatgatgaagaccccattatgggtaccatcacctcgggttccaggaagaagccctggccagacagccccggagatcaagcatctcctcctggggatgcccctcccttggaagaacaaaaggagctccattatgcctcccttagtttttctgagatgaagtcgagggagcctaaggaccaggaggccccaagcaccacggagtactcggagatcaagacaagcaagtgaggatttgcccagagttcagtcctggctggaggagccacagcctgtctgggggaaaggacaagtcagggaccacttgctgaagcacgaagagcccttgtggcaatgttaacattaactgatgtttaagtgctccaagcaga

SEQ ID NO: 103519 - DNA, 1837 bp, Homo sapiens
  Payload ID: 256
  Gene Symbol:
  Gene Name: AC018755.18
  ENST ID: ENST00000599649
  CDS Start-End: 42-1697
gccggacctgggactgggctggggccctggcggatggagacatgctgcccctgctgctgctgcccctgctgtggggggggtccctgcaggagaagccagtgtacgagctgcaagtgcagaagtcggtgacggtgcaggagggcctgtgcgtccttgtgccctgctccttctcttacccctggagatcctggtattcctctcccccactctacgtctactggttccgggacggggagatcccatactacgctgaggttgtggccacaaacaacccagacagaagagtgaagccagagacccagggccgattccgcctccttggggatgtccagaagaagaactgctccctgagcatcggagatgccagaatggaggacacgggaagctatttcttccgcgtggagagaggaagggatgtaaaatatagctaccaacagaataagctgaacttggaggtgacagccctgatagagaaacccgacatccactttctggagcctctggagtccggccgccccacaaggctgagctgcagccttccaggatcctgtgaagcgggaccacctctcacattctcctggacggggaatgccctcagccccctggaccccgagaccacccgctcctcggagctcaccctcacccccaggcccgaggaccatggcaccaacctcacctgtcagatgaaacgccaaggagctcaggtgaccacggagagaactgtccagctcaatgtctcctatgctccacagaccatcaccatcttcaggaacggcatagccctagagatcctgcaaaacacctcataccttccggtcctggagggccaggctctgcggctgctctgtgatgctcccagcaacccccctgcacacctgagctggttccagggctcccctgccctgaacgccacccccatctccaataccgggatcttggagcttcgtcgagtaaggtctgcagaagaaggaggcttcacctgccgcgctcagcacccgctgggcttcctgcaaatttttctgaatctctcagtttactccctcccacagttgctgggcccctcctgctcctgggaggctgagggtctgcactgcagatgctcctttcgagcccggccggccccctccctgtgctggcggcttgaggagaagccgctggaggggaacagcagccagggctcattcaaggtcaactccagctcagctgggccctgggccaacagctccctgatcctccacggggggctcagctccgacctcaaagtcagctgcaaggcctggaacatctatgggtcccagagcggctctgtcctgctgctgcaagggagatcgaacctcgggacaggagtggttcctgcagcccttggtggtgctggtgtcatggccctgctctgtatctgtctgtgcctcatcttctttttaatagtgaaagcccgcaggaagcaagcagctgggagaccagagaaaatggatgatgaagaccccattatgggtaccatcacctcgggttccaggaagaagccctggccagacagccccggagatcaagcatctcctcctggggatgcccctcccttggaagaacaaaaggagctccattatgcctcccttagtttttctgagatgaagtcgagggagcctaaggaccaggaggccccaagcaccacggagtactcggagatcaagacaagcaagtgaggatttgcccagagttcagtcctggctggaggagccacagcctgtctgggggaaaggacaagtcagggaccacttgctgaagcacgaagagcccttgtggcaatgttaacattaactgatgtttaagtgctccaagcaga

SEQ ID NO: 103520 - DNA, 72 bp, Homo sapiens
  Payload ID: 257
  Gene Symbol:
  Gene Name: AC018867.1
  ENST ID: ENST00000626288
  CDS Start-End: 1-72
attcctcctgccttagcctcccaagcagctgggtctacagactccgtctcaaaaaaaaaaaagaaaattatt

SEQ ID NO: 103521 - DNA, 45 bp, Homo sapiens
  Payload ID: 258
  Gene Symbol:
  Gene Name: AC018902.1
  ENST ID: ENST00000628998
  CDS Start-End: 1-45
atggtaatactaaaaatatatacagagttcagtagggtatggatt

SEQ ID NO: 103522 - DNA, 192 bp, Homo sapiens
  Payload ID: 259
  Gene Symbol:
  Gene Name: AC019206.1
  ENST ID: ENST00000624334
  CDS Start-End: 1-192
agcagaagaagaagcaagagcagcagaaggagcagcagaaggagcagcagaagaagcagaagcaaaagaagcagaagccgaagaagaagcaagagcagcagaaggagcagcagaagaagcagacgcagaagcagaaccagaagaagcaggagcagcagcaggagaagcagcacaaacagaagcagcagcaag

SEQ ID NO: 103523 - DNA, 531 bp, Homo sapiens
  Payload ID: 260
  Gene Symbol:
  Gene Name: AC021106.1
  ENST ID: ENST00000623925
  CDS Start-End: 275-430
tgggtgatggctactttggtgtccattgtactattgattgtataagtttgacattctccataaaaaggataagcaagaatacattctcagaagaaaaagacaagtgaaaaatcaccaaaggtcctgggcaggtgttttgaagtgtcaacgaacagagtagattgcaggatagggaggtggggaactgagtgggaaaacctaacttgaggccagactacatttaaagcaatttgaggacttccgagtgggaaagtccaagtagggaaatggcgatatgaagatggagcttgggagagacgtttgtagctctgcacttaggataatgaaagccacaaacataaagaagcgttcagggggcagagataccgttgcaccacagggaatgaaccaactaggaaaggaaaaaaaagaaagcctgttgagctcataaaggagataattagcccaagctcctacctacattttacttttgttttagaaaaccaataaacacctctcagaaatggagctccatttcactcttgccaccta

SEQ ID NO: 103524 - DNA, 501 bp, Homo sapiens
  Payload ID: 261
  Gene Symbol:
  Gene Name: AC022016.1
  ENST ID: ENST00000634510
  CDS Start-End: 1-501
atgggcaaggacttcatgactaaaacaccaaaagcaatggcaacaaaagccaaaatagacaaatgggatctaattaaactaaagagcttctgcacagcaaaagaaactaccatcagagtgaacagacaacctacagaatgggagaaaatttttacaatctacccatctgacaaagggcaatcccattactgggtatatacccaaaggattataaatcatgctactataaaaacacatgcacacgtatgtttattgagtataataaaaaaacaaaaacaaaaacaaaaacaaacctctctgcctgtagtcctagcactttgggaggccaaggtgggaggattgcttgagctcaggaggttgagaccagcctgggcaaaatggaaaaaccatgtctctacaaaaaatacaaaaattagctgggcatggtggtgtgtgcctatagtcccagctacttgggaggctgaggtgggaagatcacctgagccccaggaggtcaaagtt

SEQ ID NO: 103525 - DNA, 54 bp, Homo sapiens
  Payload ID: 262
  Gene Symbol:
  Gene Name: AC022210.1
  ENST ID: ENST00000624966
  CDS Start-End: 1-54
atgactctgccaagaaaacagaccctgagccatgaagcaaggaagcccctgagc

SEQ ID NO: 103526 - DNA, 375 bp, Homo sapiens; identical to SEQ ID NO: 103469
  Payload ID: 263
  Gene Symbol:
  Gene Name: AC022405.1
  ENST ID: ENST00000624839
  CDS Start-End: 1-375

SEQ ID NO: 103527 - DNA, 81 bp, Homo sapiens
  Payload ID: 264
  Gene Symbol:
  Gene Name: AC022819.2
  ENST ID: ENST00000626579
  CDS Start-End: 1-81
gtgactagattatgcactagaatttcattcagtattcttccaaaaaataaaaatttattttttaactttactactttgcac

SEQ ID NO: 103528 - DNA, 2404 bp, Homo sapiens
  Payload ID: 265
  Gene Symbol:
  Gene Name: AC023491.2
  ENST ID: ENST00000619792
  CDS Start-End: 428-1714
ggcggctggacgaggacgctccgagcccagctctcgagagttcaagcaaccgacggttccccactgctcccaggagcggttacctgggcactctgtgcccctccttcctgttcgggcccaggccgaggacctgccagtagggctcagttgcctggagcccgttcagcccatcccccagttcactttgcctgtgggatctccccgttgctcctgcccgtggactgagtggcaggccatcctacaagcacccggacacttgacatcagtggtgtcaagacaactctaagaaggttttccgtgatcctgcaagccctgccttccttcctgggatcctgccttcaatttgattgcacaggtaccacagcaagccagtgctgtgtgctccgagttccagggcgtcctccagctcagccactgcactgagaacatggactctctgtggggcccaggagccgggagtcacccctttggggtccacaacacccggctgtccccagacttgtgtccagggaagatagtgttgagggccctcaaggagagcggggcagggatgcctgagcaggacaaggaccctagagtccaagagaatcctggtgatcagagaagggtccccgaggtcaccggggatgcaccgtctgcatttcggcccctgcgggacaatagaggcctctctccctttgtgcccgggcccgggcctctgcagacagacctccatgcccagaggtcagaaatcagatataaccagacatcccagatctcctggacgagctcctgcaccaaccgaaatgccatctccagctcctacagctccatgggaggcttgccggggctaaagcggaggagggggccagcctcatcccactgccagctgaccctcagttcctcaaagacagtgagtgaggacaggcctcaggctgtctcttcaggtcacacccagtgtgaaaaggcagcagatatagcaccagggcagacactcgccctcaggaatgactcctccacatccgaggcctctaggcccagtacacacaagtttcccctgctgccacgcaggcgaggggagcctttgatgctgccacctcccttagagctggggtaccgggtcactgttgaagacctggaccgggagaaggaggcggcattccagcgcatcaacagtgcactgcaggttgaggacaaggccatctcggactgcagaccctcacggccttcccacactttgtcctcacttgcaacagggacttctggtctgcctgccatttctaaagcacccagtatggatgtacagcaggagacacacaagtcccaagactgcctgggcctactggcccccttagcatctgctgcaggggtcccctctacagctcccatgtctgggaagaagcacagaccaccaggccccctgttctcctcctcagatccccttcctgccacctcttcccattcccaggactcagcccaggtcacctcgctgattcctgcccccttcccagctgcaagcatggatgcgggcatgagaagaacaaggtgtggcacttctgctcctgcagctgccgcagcagcccctcccccctccacattgaaccccacgttggggtcactactggagtggatggaggcccttcacatttctgggcctcagccacagctgcagcaggtgcccagaggtcagaaccagagatcccagacctcccggaccagctcgtgccccaaacgaaatgccatctcgagcccctaccactctacgggaggcctcccggaacgaaagcggagaagggggccagcctcatcccactgccagctgaccctcagttcctgaaacacagtgagtgaggacggacctcaggctgtctcttcgggtcacacccagtgtgaaaagatggcagatacagcaccagggcagacactcgaccccaggggtggctcccccagatcccaggcctctaggccctgtagatgcaagtttcccctgctgccacgcaggcgaggggagcctttgatgctgccacctcccttagagctggggtaccgggtcactgctgaagacctggaccaggagaaggaggcggctttccagcgcatcaagagtgcactgcaggttgaggacaaggccatttagtactgcagaccctcacggccttcccacactttgtcctcacttgcaacaggggcttctggtctgcctgccatttctaaagcacccagtatggatgcacagcaggagagacacaagtcccaagactgcctgggcctagtggccccccagcatctgctgcacaggcctgtagtcccagctactcaggaggctgaggcaggagaagggcataaacccgggaggcagagcttgcagtgagctgagatcgcgccactgcactccagcctgggtgacagagcgagactccgtctc

SEQ ID NO: 103529 - DNA, 63 bp, Homo sapiens
  Payload ID: 266
  Gene Symbol:
  Gene Name: AC024060.1
  ENST ID: ENST00000629101
  CDS Start-End: 1-63
ttaaaaaggttagtagatggagtctcgctctgtcgcccaggctggagtgcggtggcacgatct

SEQ ID NO: 103530 - DNA, 54 bp, Homo sapiens
  Payload ID: 267
  Gene Symbol:
  Gene Name: AC024361.1
  ENST ID: ENST00000629043
  CDS Start-End: 1-54
gagagtgtcctcagacgacacctcaactgcagtcctgttccacctacaggacac

SEQ ID NO: 103531 - DNA, 2118 bp, Homo sapiens
  Payload ID: 268
  Gene Symbol:
  Gene Name: AC024592.12
  ENST ID: ENST00000592091
  CDS Start-End: 80-445
tctcgcgatagccagccgcggctgcccttgcgcttcccgagctggcggggtccgtggtgcgggatcgagattgcgggctatggcgccgaaggtttttcgtcagtactgggatatccccgatggcaccgattgccaccgcaaagcctacagcaccaccagtattgccagcgtcgctggcctgaccgccgctgcctacagagtcacactcaatcctccgggcaccttccttgaaggagtggctaaggttggacaatacacgttcactgcagctgctgtcggggccgtgtttggcctcaccacctgcatcagcgcccatgtccgcgagaagcccgacgaccccctgaactacttcctcggtggctgcgccggaggcctgactctgggagcacgcaagactgggtttcaccgtgttagccaggatggtcttgatctcctgacctcgtgatctacctgcctcggcctcccaaagtgctgggattacagacatgagccacctcgcccagccttttcatggctgagtgatattccattgtgtggatggatcacactagctactctgacccatggatcccctgggcccagccaagccacagtggctgtggcgccgctgtctggccgggctgctgtttcagctgctggtggctgtgtgtttcttctcctacctgcgtgtgtcccgagacgatgccactggatcccctaggccagggcttatggcagtggaacctgtcaccggggctcccaatgggtcccgctgccaggacagcatggcgacccctgcccaccccaccctactgatcctgctgtggacgtggccttttaacacacccgtggctctgccccgctgctcagagatggtgcccggcgcggccgactgcaacatcactgccgactccagtgtgtacccacaggcagacgcggtcatcgtgcaccactgggatatcatgtacaaccccagtgccaacctcccgccccccaccaggccgcaggggcagcgctggatctggttcagcatggagtcccccagcaactgccggcacctggaagccctggacggatacttcaatctcaccatgtcctaccgcagcgactccgacatcttcacgccctacggctggctggagccgtggtccggccagcctgcccacccaccgctcaacctctcggccaagaccgagctggtggcctgggcggtgtccaactggaagccggactcggccagggtgcgctactaccagagcctgcaggctcatctcaaggtggacgtgtacggacgctcccacaagcccctgcccaaggggaccatgatggagacgctgtcccggtacaagttctatctggccttcgagaactccttgcaccccgactacatcaccgagaagctgtggaggaacgccctggaggcctgggccgtgcccgtggtgctgggccccagcagaagcaactacgagaggttcctgccacccgacgccttcatccacgtggacgacttccagagccccaaggacctggcccggtacctgcaggagctggacaaggaccacgcccgctacctgagctactttcactggcgggagacgctgcggcctcgctccttcagctgggcactggctttctgcaaggcctgctggaagctgcagcaggaatctaggtaccagacggtgcgcagcatagcggcttggttcacctgagaggccggcatggggcctgggctgccgggacctcactttcccagggcctcacctacctagggtctcactagtcgggggatttacctacctggggcctcggctgcctggggcctcggctgcctggggtctcacctgcctggggcctcacctgctggagtctttggtggccaggcatgtgacttacctgggatttcacttgccgggcttcactgccaggagcctcccctgctggggaccttgccagctggggctggggatggtgcctactggggaccttgctttctggaggctgcacctactgaggatctcggctgttggggactttacctgctgggacctgctcccagagaccttgccacactgaatgtcacctgctaggagcctcacccgctgggaggcacagggcccaagggagctggatgtgttgccc

SEQ ID NO: 103532 - DNA, 506 bp, Homo sapiens
  Payload ID: 268
  Gene Symbol:
  Gene Name: AC024592.12
  ENST ID: ENST00000586349
  CDS Start-End: 1-506
gccgaaggtttttcgtcagtactgggatatccccgatggcaccgattgccaccgcaaagcctacagcaccaccagtattgccagcgtcgctggcctgaccgccgctgcctacagagtcacactcaatcctccgggcaccttccttgaaggagtggctaaggttggacaatacacgttcactgcagacactggcagtgagcgcccaagaggctcctgctgtgcccgtctcgaggcccttgctcttcccgtctaccccgcagctgctgtcggggccgtgtttggcctcaccacctgcatcagcgcccatgtccgcgagaagcccgacgaccccctgaactacttcctcggtggctgcgccggaggcctgactctgggagcacgcactactctgacccatggatcccctgggcccagccaagccacagtggctgtggcgccgctgtctggccgggctgctgtttcagctgctggtggctgtgtgtttcttctcctacctgcgtgtgtcc

SEQ ID NO: 103533 - DNA, 431 bp, Homo sapiens
  Payload ID: 268
  Gene Symbol:
  Gene Name: AC024592.12
  ENST ID: ENST00000585661
  CDS Start-End: 1-431
gccgaaggtttttcgtcagtactgggatatccccgatggcaccgattgccaccgcaaagcctacagcaccaccagtattgccagcgtcgctggcctgaccgccgctgcctacagagtcacactcaatcctccgggcaccttccttgaaggagtggctaaggttggacaatacacgttcactgcagctgctgtcggggccgtgtttggcctcaccacctgcatcagcgcccatgtccgcgagaagcccgacgaccccctgaactacttcctcggtggctgcgccggaggcctgactctgggagcacgcactactctgacccatggatcccctgggcccagccaagccacagtggctgtggcgccgctgtctggccgggctgctgtttcagctgctggtggctgtgtgtttcttctcctacctgcgtgtgtcc

SEQ ID NO: 103534 - DNA, 548 bp, Homo sapiens
  Payload ID: 269
  Gene Symbol:
  Gene Name: AC025263.3
  ENST ID: ENST00000550437
  CDS Start-End: 1-231
ttacaacctatccggtttgtgaaagcttctgcagttgaatgcggaggaccaaaaaaatgtgctctcactggccagagtaagtcctgtaaacacagaattaaattaggggactcaagcaactattattatatttctcctttttgcagatacaggatcacttctgtatgtaacttttttacatacattcgatacattcagcagggactcgtgaaacagcaggatgttttataatcacatttgaaaactcaaccatctttctgggcacaatttgatggctgaagatatgcttcactccaataaaaagaaaatgaagatttttcaagagcattcgtaggcttcgaatcaaaaggacagtacttatttcctgaggtctgataaccgttgttttatgaggaaatagtactaggatcacagtaccatggatgtggtaggcgaaaatgaggccctgcagcagttctttgaagctcagggagccaatggtactctggagaacccagccctggacacaagtctgttggaggaatttctgggcaatgactttgatttgg

SEQ ID NO: 103535 - DNA, 375 bp, Homo sapiens
  Payload ID: 270
  Gene Symbol:
  Gene Name: AC026248.1
  ENST ID: ENST00000623475
  CDS Start-End: 1-375
atgactcttaacgagcatgctgccttcaagcatctgtttaacaaagcacatcttgcaccgcccttaatccattcaaccctgagtggatacagcacatgtttcagagagcacagggttgggggtaaggtcacagatcaacaggatcccaaggcagaagaatttttcttagtacagaacaaaatgaaaagtctcccatgtctacctctttctacacagacacggcaaccatccgatttctcaatctttcccccacctttcccccctttctattccacaaaaccgccattgtcatcatggcccgttctcaatgagctgttgggtacacctcccagacggggtggtggccgggcagaggggctcctcacttcccagtag

SEQ ID NO: 103536 - DNA, 2734 bp, Homo sapiens
  Payload ID: 271
  Gene Symbol:
  Gene Name: AC026369.1
  ENST ID: ENST00000621764
  CDS Start-End: 119-676
ggaggctgggccggtgggagagggaggcgagccgaccgctgggctgctgggctcccgcgccctcgcgctccccgccgccagcccaggcgcaggcagggcgcaggcggcggcgggcggcatggagagcctgctggagaatccggtgcgcgccgtgctctacctcaaggagctcacggccatcgtgcagaaccagcagagcctcatccacacccagcgagagcgtatcgacgagctggagcggcggctggacgagctgagcgctgagaaccgcagcctgtgggagcaccagcagctgctgcaagcccagcctccgcccgggctcgtccccccgtcatcggccccgctgccggccgctccggccaccgctcctgccgccgccgccagggcccaggaacctctccaggaccagggacagcgctcagcagccgcgccgcatcccgcgcccgatcggccgccgcgtcagcaccacggacagctcctggagcagccccagcggggccctggcagcagggctcacacaccccagtcgccccacaagcatctggggacacaaggggccgtgactgacaaggagaaggagcgtcccccgagttgctgcgctgctgccggagccctccttcagcacaaatccccctccgccctcggcaagggcgtcctgagcaggagacctgagtgagcggggagaggagatgggcactgttgtggtgggagcaagggaagcaagtgggtgtgagggagagacggggacgttgggtgcgtaggagtctaaaggaccggagtgatgtggcctgaaggcgccagaagtgtgcaaaggagattttgggtaaatgagggaacgatatccctgcttgagaaggttttggggaatgctggagcaaaaaggagtaaccagaccattagtaggagcaaaggaggaaggaggtgggtgttaagcgattggtgatactgggaactgacagcatttaaacggggttaggctgggttgaagttcgagtgaagattaaactgtagaaaagagaaccattgaaggaatctttttaagtgagaaaaaatttggaaggaagtttgggtagtaaaagtatttgcatggagactgagatgtgagaaaagctgaaggcttggaaagaggcatgtgaagagctttaaaaaggctggggcccaggaagagtaggactggggtagaggggaatccaggaggccggggacaaacctgaaaagcaggagtgatgtgggaaaccaagggagctggaggcagaggaagagaaaatgtggctctttagctggtgaagtgggagccacagctaggagtggctcatttagggaagctttctcttctctgacctgattggacacccttcctctgaattcccgcagagccgaagaggtgcaagggaacatcccatcaaaccaatggaggactcaggcatggcttgaggactcagtctggttacagctttttcctccaactcaaggagggtttttcatacagggtgtttggccgttgttgaaagggagcaatgacatgggggacagttggcagatggagttggtattcagatgccatgcctgtttaaatctccctgttaaggccagcaactgcaaacccttttttcccggttatctggtgatcactgaaatcttgccttgggtcctgagagaaatgttaacctctcagttcctagaacttcaagctctttcttcactcaggaggtccatgaactaggaatatgggaagaagatatgaaagtgtctgggatgttctctcctctgtactggaaaggctgtggccatgtctgcttcttttctctgattaggcaagtgatggagaactaaacaaagaacagttcaagggaaattgtccctggtcagcacctgaccttgacaatggtgatgcataagggaatggggagggggaagtagagctgagaatctcatcttcatccaggtgcattaagtctgggagatacttgtgaatatttgctgtattccttcaaaactcattttcttttaccatctgtggtagagttagagaagttgggttagggcagggtagctcacagagcacgttgatcaaaaccacaggatctaagaggtgaaggtctaacatgatctggcttggcagacttaaaacatttgattcaagtcccaagaagatacagttttctaccccaactccctcaaaacccctttgtacttccctcagtttcacatttttatttttattttttccttatctggcataaaaagcagaaagtcagttttccctcaatgcccaaggctcagcaaaaggcaacattgttccaagatactaagtggtcttttcccccacatgaggggatgaatttttccagtccccttccctgagggcagccacagctacctggtcattatgatttctctcctcatgacttttggtgtctcctgtctctcccactgcaactccactttctttgcatctcttcagggcactgtgtggccaagaagagttgaggaaagattatttttcttagacaaagacatagccatagccttcagagtggcctacggaacccaaaccctttcactcagttggtcctgctcggaatcctgggatttaggaatcatctgggctcctgtccagctccacatgtcaattctggagaggagttataatatcctcacctttccttctcacctgtcctgcttttgcttcccaaaggagcagaacaaaaataaaaaataattagcatggtgg

SEQ ID NO: 103537 - DNA, 63 bp, Homo sapiens
  Payload ID: 272
  Gene Symbol:
  Gene Name: AC026449.1
  ENST ID: ENST00000623778
  CDS Start-End: 1-63
aaagtttatttttgtttttcattactacacaatttcttgagaaaaaggtcatgggaaagtttc

SEQ ID NO: 103538 - DNA, 977 bp, Homo sapiens
  Payload ID: 273
  Gene Symbol:
  Gene Name: AC037459.4
  ENST ID: ENST00000450780
  CDS Start-End: 103-977
tccccggctgcctcctcccaacaggccggcctcggccgcgctggcgactcggcggtgctggtgctgccgccttccccgggccctcgttcctccaggcccagcatggactcggaagggggaagcctcctcctggacgaggactcggaagtcttcaagatgctgcaggaaaatcgcgagggacgggcggccccccgacagtccagctcctttcggctcttgcaggaagccctggaggctgaggagagagatggggctggcgagggcctggcacggggctgcatagtgcctggagtcaccagcacctacagacggatccccgacgctgcccacgggtgctcatcctgggagagaggtgacaagttcagaggtgtcggcagggaggcactctttctcaaactggcctcccgggactcaggagtggagatggcagttggggacagccccctggccgccttaccgggcctttctcaggactccctggactttgaatcctcagggagttctgagccccccgcccaggtaggccgactcctggccagccagaagctgggggaggtgttggagcggtcccgccggctcccaacagctcccaccagcttgtcaggacaacaccgctccctgcggctggcaagcaagcctgagcgtgaagtgccccttggagcagggcaacaggagtccatggaggcagacacagacctagaggcaggcctggaagaagaggcggtggggggcctggggcctggagcctgggcctgcctccccgggcagggtcttcgctatctggaacacctgtgcctggtgctggagcagatggcaaggctccagcagctctacctgcagctgcggatccagaggcccccaggggatcccggcgaggaggagtcgacccgagcccctttaccgtccccgttacacaccccaggcaatcgggggcaggggccatgggagctgctaagccagacagagcacacaggtga

SEQ ID NO: 103539 - DNA, 531 bp, Homo sapiens
  Payload ID: 273
  Gene Symbol:
  Gene Name: AC037459.4
  ENST ID: ENST00000430850
  CDS Start-End: 84-482
aacaggccggcctcggccgcgctggcgactcggcggtgctggtgctgccgccttccccgggccctcgttcctccaggcccagcatggactcggaagggggaagcctcctcctggacgaggactcggaagtcttcaagatgctgcaggaaaatcgcgagggacgggcggccccccgacagtccagctcctttcggctcttgcaggaagccctggaggctgaggagagaggtggcacgccagccttcttgcccagctcactgagcccccagtcctccctgcccgcctccagggccctggccacccctcccaagctccacacttgtgagaagtgcagtaccagcatcgcgaaccaggctgtgcgcatccaggagggccggtaccgccaccccggctgctacacctgtgccgactgtgggctgaacctgaagatgcgcgggcacttctggatggggctggcgagggcctggcacggggctgcatagtgcctggagtcaccagcacctacagacggatccccgacgctgcccacgg

SEQ ID NO: 103540 - DNA, 794 bp, Homo sapiens
  Payload ID: 273
  Gene Symbol:
  Gene Name: AC037459.4
  ENST ID: ENST00000447849
  CDS Start-End: 1-424
ggcggtgctggtgctgccgccttccccgggccctcgttcctccaggcccagcatggactcggaagggggaagcctcctcctggacgaggactcggaagtcttcaagatgctgcaggaaaatcgcgagggacgggcggccccccgacagtccagctcctttcggctcttgcaggaagccctggaggctgaggagagaggtggcacgccagccttcttgcccagctcactgagcccccagtcctccctgcccgcctccagggccctggccacccctcccaagctccacacttgtgagaagtgcagtaccagcatcgcatggggctggcgagggcctggcacggggctgcatagtgcctggagtcaccagcacctacagacggatccccgacgctgcccacgggtgctcatcctgggagagaggtgacaagttcagaggtgtcggcagggaggcactctttctcaaactggcctcccgggactcaggagtggagatggcagttggggacagccccctggccgccttaccgggcctttctcaggactccctggactttgaatcctcagggagttctgagccccccgcccaggtaggccgactcctggccagccagaagctgggggaggtgttggagcggtcccgccggctcccaacagctcccaccagcttgtcaggacaacaccgctccctgcggctggcaagcaagcctgagcgtgaagtgccccttggagcagggcaacaggagtccatggaggcagacacagacctagaggcaggcctggaagaagaggcggtg

SEQ ID NO: 103541 - DNA, 1157 bp, Homo sapiens
  Payload ID: 274
  Gene Symbol:
  Gene Name: AC037482.2
  ENST ID: ENST00000571574
  CDS Start-End: 58-690
aaacccaagaacttcactctcttgaaaacccacccagatcctccccgttctgacaccatggtcagctcctgttgtggctccgtgtgctctgaccagggctgcggccaagtcctctgtcaggagacctgctgccgccccagctgctgtcagaccacctgttgcaggaccacctgctaccgccccagctgttgtgtgtccagctgctgcaggccccagtgctgccagtctgtgtgctgccaacccacctgctgtcgccccagctgctgtgagacgacctgctgccaccctaggtgctgcatctccagctgctgccgccccagctgctgtatgtccagctgctgcaagccccagtgctgccagtctgtgtgctgccagcccacctgctgccaccccagctgctgcatctccagctgctgtcgccccagctgctgtgtgtccaggtgctgcaggccccagtgctgccagtctgtgtgctgccagccaacctgctgccgtcccagctgctgcatctccagctgctgccgcccctcttgctgtgaatccagctgctgccgcccatgctgctgccgcccctgctgctgcctgcgtccagtctgtggccgagtctcctgccacaccacttgctatcgcccaacctgtgtcatctccacctgtccccgccccttgtgctgtgcctcctcttgctgctgagcccactgccctggctcacgtcccccttcaccactggcccacagatgtagacccttctactgtgctgaccattaggatacatgaagtggggttgatgtcattcaataggatggaccttatgcttccaaagagcccaccaccatttcactgactctgtgagaacattctggttcattttaaactccctcccttgctttctttttcttctggtggtggcaccaaatgtgaattaatttgtaatacactagctaagaaattattccaatcttctgatttccttattttctttatcactttaaggtacagattctccttctcagtgaggtagatattatctgcaggaccagttttgtcactgatgttgcaccctcagatccagccacccaattgtattctgtgtttctcctagggtgaatttcttatgctttgttgcatctctgctttctaataaacttttctgcacttaa

SEQ ID NO: 103542 - DNA, 375 bp, Homo sapiens
  Payload ID: 275
  Gene Symbol:
  Gene Name: AC055733.1
  ENST ID: ENST00000624326
  CDS Start-End: 1-375
atgactcttaacgagcatgctgccttcaagcatctgtttaacaaagcacatcttgcaccgcccttaatccatttaaccctgagtggacacagcacatgtttcagagagcacagggttggggataaggtcacagatcaacaggatcccaaggcagaagaatttttcttagtacagaacaaaatgaaaagtctcccatgtctacttctatccatacagacccggcaaccatgcgatttctcaattttttccccacccttcccgcctttctattccacaaaaccgccattgtcatcatggcccatccccaatgagccgctgggcacacctcccagacggggtggtggccgggcagaggggctcctcacttcccagtag

SEQ ID NO: 103543 - DNA, 33 bp, Homo sapiens
  Payload ID: 276
  Gene Symbol:
  Gene Name: AC055866.1
  ENST ID: ENST00000628087
  CDS Start-End: 1-33
ggggactttttacctccaggacaagtggtgctc

SEQ ID NO: 103544 - DNA, 51 bp, Homo sapiens
  Payload ID: 277
  Gene Symbol:
  Gene Name: AC063956.1
  ENST ID: ENST00000623021
  CDS Start-End: 1-51
atcaagttcaggctgtttgccatatcattaattctaatgctgtctgtgaca

SEQ ID NO: 103545 - DNA, 51 bp, Homo sapiens; identical to SEQ ID NO: 103544
  Payload ID: 278
  Gene Symbol:
  Gene Name: AC063956.2
  ENST ID: ENST00000635707
  CDS Start-End: 1-51

SEQ ID NO: 103546 - DNA, 516 bp, Homo sapiens
  Payload ID: 279
  Gene Symbol:
  Gene Name: AC064829.1
  ENST ID: ENST00000624593
  CDS Start-End: 82-369
tcaggcctgcctagatgttgtaggggatcatgggactctcccatggatcccacagagaagacaggtgagagtccaccactgacgcacctccacagaggtctctttctctgccaagccgcaggaaattgtcgcattcaggatatctctgtggtcaggtcccactggaggaagagatttctaaactctgaggtggtcgctgagaactgcttttctgacttcattcccgaaagaggctgtgtgcaagaatcaggtcccatggagattggattattatctggtaaagttgagggaccgcatccacccctcaccagattgtatcctctcccctatctaatcttattcctgctcacactctgtgtcccaaaatgaaattccaagacgatggcggagtgccatgaagctcctgctcagctgtgaaccaaatttgaggtaaattcaaggggccctgaaaacagcacttctagtgtctctccctgggttggttgcaggacaataaaacactgggagatatctgtt

SEQ ID NO: 103547 - DNA, 387 bp, Homo sapiens
  Payload ID: 279
  Gene Symbol:
  Gene Name: AC064829.1
  ENST ID: ENST00000624507
  CDS Start-End: 1-387
atgcaaagccagagaggtctccttctctgccaagccacagggacatgcggcatttgtgctgtctccgttgtagggtccctctggaggaggaggtgtcaagactgtgaagtggtcgctgagaactgcttttctgacttcattcccgaaagaggctgtgtgcaagaatcaggtcccatggagattggattattatctgccttgcacgggctatctgggaaaggcaggcaccatgacaaaggcaagtccaagatcaagcagtgttcccatatgtctaactggcctcttaaaggtgcaggtaaagttgagggaccgcatccacccctcaccagattgtatcctctcccctatctaatcttattcctgctcacactctgtgtcccaaaatga

SEQ ID NO: 103548 - DNA, 375 bp, Homo sapiens
  Payload ID: 280
  Gene Symbol:
  Gene Name: AC066615.1
  ENST ID: ENST00000557832
  CDS Start-End: 1-375
atgactcttaacgagcatgctgccttcaagcatctgtttaacaaagcacatcttgcaccgcccttaatccatttaaccctgagtggacacagcacatgtttcagagagcacagggttggggataaggtcacagatcaacaggatcccaaggcagaagaatttttcttagtacagaacaaaatgaaaagtctcccatgtctacttctatccacacagacccggcaaccatccgatttctcaattttttccccacccttcccgcctttctattccacaaaaccgccattgtcatcatggcccatccccaatgagccgctgggcacacctcccagacggggttgtggccgggcagaggggctcctcacttcccagtag

SEQ ID NO: 103549 - DNA, 922 bp, Homo sapiens
  Payload ID: 281
  Gene Symbol:
  Gene Name: AC068533.7
  ENST ID: ENST00000450043
  CDS Start-End: 1-922
atggatgccactagtgagcgggactttgtggccgagttcctgttctgggcttcgctgtgcatgacccatctcagcaggatggccgaggacctcatcctctactgcaccaaggaattcagcttcgtgcagctctcagatgcctacagcacgggaagcagcctgatgccccagaagaaaaaccccgacagtttggagctgatccggagcaaggctgggcgtgtgtttgggcggtgtgccgggctcctgatgaccctcaagggacttcccagcacctacaacaaagacttacaggaggacaaggaagctgtgtttgaagtgtcagacactatgagtgccgtgctccaggtggccactggcgtcatctctacgctgcagattcaccaagagaacatgggacaggctctcagccccgacatgctggccactgaccttgcctattacctggtccgcaaagggatgccattccgccaggcccacgaggcctccgggaaagctgtgttcatggccgagaccaagggggtcgccctcaaccagctgtcactgcaggagctgcagaccatcaggaaggatgccaattctgcgcttctcagtaactacgaggtatttcagttactaactgatctgaaagagcagcgtaaagaaagtggaaagaataaacacagctctgggcaacagaacttgaacactatcacctatgaaacgttaaaatacatatcaaaaacaccatgcaggcaccagagtcctgaaattgtcagagaatttctcacagcattgaaaagccacaagttgaccaaagctgagaagctccagctgctgaaccaccggcctgtgactgctgtggagatccagctgatggtggaagagagtgaagagcggctcacggaggagcagattgaagctcttctccacaccgtcaccagca

SEQ ID NO: 103550 - DNA, 66 bp, Homo sapiens
  Payload ID: 282
  Gene Symbol:
  Gene Name: AC069063.1
  ENST ID: ENST00000623611
  CDS Start-End: 1-66
atgacacatatttactcaaatttttgttttaataagtctgtctttgcctttgatcttataccaatg

SEQ ID NO: 103551 - DNA, 1318 bp, Homo sapiens
  Payload ID: 283
  Gene Symbol:
  Gene Name: AC069063.2
  ENST ID: ENST00000623916
  CDS Start-End: 1119-1229
atgactctgggtgacaaagatgtagaaacgtagttcatcaattgtaacaaatgtaccgctatgctggaaaacgttactaatggtggaggctatgtatgtggcggtaagatgtgtttagaaaatctccgtatcttatgctcaaatttgctgtgaacctacaattgctctaaaaaaaaatcaagtctattaaaaaatttatcatgtagtagatcttgtataaagtctcaacaaatatcaaagaattaacatcatacaaactctctaagcacaagcaacttaagtaaaaaattaacagaaaaaaattttttgagtcaataggagttattttgggaacaaaacacaaagtaaagacttgaggggattgaaaccatcaggatgaatgtaagccagacgggggcaaattgcagaatgtcaattgccttaacctaggaaaggtaaatttctaaaaatgataccaaatggttaaaaatcactaaatgaggaattgaagagaatttcaggttagaaggttgtaaaaagtgaaataattgtccaaagtcaccaaactagttcacgagaaagctggaactagaaactcatgcctctcaatccagtgttctttccactgtaacagattggcaccatagaacatgtttgactcaaggcagtaaattaagtacactgaagaaaaagataagaaaaaagtgataaaatgtaaagtctttgattcagacccaagtattacagctgctatggcaaaaaatagccacaatttctaagtgactttaaccaggaaaaaaagaaagagatgagatttgaaaaggaattaaatttcaagaatcaacaggaagtgatgacagccttccctatttggtagtttcaggcctgaacttttgtcattaaggtaataattcaaagtgctttaatgcctggactgaccacactaaataacaaaattataacccgttgagctacggtcagttttataaactgtgcctaaaatttcctgagttcaaatctgattataaatgggcaataaattcatctgttcattgggctgatttactttattttctgggtgcatttaaaatcttttttattgtggaaactttcaaacatacaaaaagagtacataataaatgattcccttgtacccatcattcaatttcaataagtcacattttgcctttcaaattttacctattgccactaacatcctttttttttctggagtagctgaactgatttaagatgaaggaggaaaaataaaggatgaaaggaatattttcaatctgttattcattgatactctagccaaaaagattccagattatgaggc

SEQ ID NO: 103552 - DNA, 750 bp, Homo sapiens
  Payload ID: 284
  Gene Symbol:
  Gene Name: AC069368.3
  ENST ID: ENST00000437723
  CDS Start-End: 70-750
gacgcggtggcagagcccgcgcggcgctggaagcgagtggcggagcggcgggacctcggcggactcgccatggaggaggagggtgtgaaggaagccggtgagaagcctcggggagcacagatggtggacaaggctggctggatcaagaagagcagtgggggcctcctgggtttctggaaagaccgatatctgctcctctgccaggcccagctgctggtctatgagaatgaggatgatcagaagtgtgtggagactgtggagctgggcagctatgagaagtgccaggaccttcgtgccctcctcaagcgaaaacaccgctttatcctgctgcgatccccagggaacaaggtcagcgacatcaaattccaggcacccaccggggaggagaaggaatcctggatcaaagccctcaatgaagggattaaccgaggcaaaaacaaggctttcgatgaggtaaaggtggacaagagctgcgccctggagcatgtgacacgggaccgggtgcgagggggccagcgacgccggccaccaacgagagtccacctgaaggagtttgggatgaatgcgcttctcctgtctgcctggttcggccacttacgaatcctccagatcttggtaaactcaggggccaagatccactgtgagagcaaggaggggaacactgcccttcatctggctgctggtcggggccatatggctgtgctgcagcgacttgtggacatcgggctggacctggaggagcagaatgcg

SEQ ID NO: 103553 - DNA, 48 bp, Homo sapiens
  Payload ID: 285
  Gene Symbol:
  Gene Name: AC069499.1
  ENST ID: ENST00000625266
  CDS Start-End: 1-48
gccaaaagcagttgtctcaaagctttgctgataagagtttcacattat

SEQ ID NO: 103554 - DNA, 123 bp, Homo sapiens
  Payload ID: 286
  Gene Symbol:
  Gene Name: AC073072.1
  ENST ID: ENST00000625271
  CDS Start-End: 1-123
tggctcatgcctgtaatctcagcactttgggaggctaaggtgggtggatcacctgagatctgttcattttcaggagttcaagaccagcctgggcaacatggtgaaactcagtctctacaaaaa

SEQ ID NO: 103555 - DNA, 48 bp, Homo sapiens
  Payload ID: 287
  Gene Symbol:
  Gene Name: AC073130.2
  ENST ID: ENST00000628802
  CDS Start-End: 1-48
ctagaacaggaatcagaagtcaaaaaaatgggcaaaggacatgaacag

SEQ ID NO: 103556 - DNA, 381 bp, Homo sapiens
  Payload ID: 288
  Gene Symbol:
  Gene Name: AC073333.1
  ENST ID: ENST00000623891
  CDS Start-End: 1-381
atggtgatgactcttaacgagcatgctgccttcaagcatctgtttaacaaagcacatcttgcaccgcccttaatccatttaaccctgagtggacacagcacatgtttcagagagcacagggttgggggtaaggtcatagatcaacaggatcccaaggcagaagaatttttcttagtacagaacaaaatgaaaagtctcccatgtctacttctttctacacagacacagcaaccatccgatttctcaatcttttccccacctttcccccttttctattccacaaaaccgccattgtcatcatggcccgttctcaatgagctgttgggtacacctcccagacggggtggtggccgggcagaggggctcctcacttcccagtag

SEQ ID NO: 103557 - DNA, 406 bp, Homo sapiens
  Payload ID: 289
  Gene Symbol:
  Gene Name: AC073610.5
  ENST ID: ENST00000537495
  CDS Start-End: 1-189
aacaaacaggatctgcctaatgctatgaacgctgctgagatcacagacaagctgggcctgcattcccttcgtcaccgtaactggtacattcaggccacctgtgccaccagcggggacgggctgtacgaaggcctggactggctggccaatcagctcaaaaacaagaacggatgcagtggtgcagtatgacgtggagctgattgcactaatccgagccaactactggctaaagctggtgaagggcattttgcctctggtagggatggccatggtgccagccctcctgggcctcattgggtatcacctatacagaaaggccaatagacccaaagtctccaaaaagaagctcaaggaagagaaacgaaacaagagcaaaaagaaataataaataataaattttaaaaaa

SEQ ID NO: 103558 - DNA, 183 bp, Homo sapiens
  Payload ID: 290
  Gene Symbol:
  Gene Name: AC073657.1
  ENST ID: ENST00000624812
  CDS Start-End: 1-183
aagaatcagagtttcttttttttgagacggagttttgctctgtcacccaggctggagtgcagtggcgcgatctcggctcactgtaagctctgcctcccgggttcacgccattctcctgccccagctactcgggaggctgaggcaagagaatcacttgaacccgggaggtggaggttgcagtga

SEQ ID NO: 103559 - DNA, 45 bp, Homo sapiens
  Payload ID: 291
  Gene Symbol:
  Gene Name: AC074033.1
  ENST ID: ENST00000626819
  CDS Start-End: 1-45
tctggaagtaactttgatcctttcttgcaaaaactgctcaaaatt

SEQ ID NO: 103560 - DNA, 648 bp, Homo sapiens
  Payload ID: 292
  Gene Symbol:
  Gene Name: AC079355.1
  ENST ID: ENST00000621874
  CDS Start-End: 1-648
acggcctccggtcggtgggcttctccaggcccagcttgggcctcccggcggcctctgcaggcccaagtggtcctgaagtcagcctctccaggcccagctccggcctcccagcaagcaagctcttttggctcagctcctgcccagctcccgccggcttttgtagaccctgaactttctccagcgaagctcctcagtcccacctcctgcctcccggtggcctgtacaggcccaggtctggctggagaacagcctctgcaggccccgctcttgcctcccaggggcgtctccaggcccagctctcgcctcacggcggcctcccgggaccaagtccctgcctgcctcccagcagcctgtgtgcggcccagctcctccgttacggtggcctgtggcccaactcatgcctctggcaccctttccagaggcgtgagcccctgcctcacattggcctctctcacgctgagggaggtcagcgtgagcccctgcctcacactggcctctctcacgctgagggaggtcagcgtgagcccctgcctcacactggcctctctcacgctgagagaagtcctccctcacgctggcctgttgaggcccagttcatgcctctgttggcttctcctggcccagcccctgcctgttggcggcctctag

SEQ ID NO: 103561 - DNA, 63 bp, Homo sapiens
  Payload ID: 293
  Gene Symbol:
  Gene Name: AC079907.1
  ENST ID: ENST00000626900
  CDS Start-End: 1-63
aacagattttcactaattgtggaccacgagacagggtcttgctctgtcacccaggctggagtg

SEQ ID NO: 103562 - DNA, 3766 bp, Homo sapiens
  Payload ID: 294
  Gene Symbol:
  Gene Name: AC084219.2
  ENST ID: ENST00000591793
  CDS Start-End: 84-1880
tttaccacagtagtttgagtcatttccacatcttgcgagtccttccgaacgagtctcctttccttggggctcgcaaccacccaatgatcgattcaggagaaaagaagcctgggcggagagcagaggaggcagtgaccttcaaggatgtggctgtgatcttcactgaggaggagctggggctgctggaccctgcccagaggaagctgtaccgagatgtgatgcttgagaacttcaggaacctgctctcagtggggcatcaaccattccatggagatactttccacttcctaagggaagaaaagttttgggtgatggggacaacaagccaaagagaagggaatttgggcacaattctgctttccctggaactgtgtcattcaggactctgcaaattccctaaagtaggaggaaaaatgaccatgtccaaggaggcagtgaccttcaaggatgtggcagtggtcttcactgaggaggagctggggctgctggaccttgcccagaggaagctgtatcgagatgtgatgctggagaacttcaggaacctgctgtcagtggggcatcaaccattccaccgagatactttccactttctaagggaggaaaagttttggatgatggatatagcaacccaaagggaagggaattcaggaggcaagatccaacctgagatgaagacttttccagaagcaggaccacatgaagggtggtcctgccagcagatctgggaagaaattgcaagtgatttaaccaggcctcaagactctaccataaagagctctcagttctttgaacagggtgatgcccactcccaggttgaggaaggactatctataatgcacacaggacagaaaccttccaattgtgggaagtgtaaacaatccttcagtgatatgtccatctttgatcttcctcagcaaatacgctcagcagagaagtctcattcctgtgatgagtgtggaaaaagcttctgttacatctcagcgcttcatattcatcagagagtccacctgggagagaaactctttaagtgtgacgtgtgtggtaaggaattcagtcagagtttacatctgcaaactcatcagagagtccatactggagagaaacctttcaaatgtgaacaatgtgggagaggcttcagatgtagatcagcacttacagttcattgcaaattacacatgggagagaaacattataattgtgaggcatgtgggagggccttcattcatgatttccagcttcagaaacatcagagaattcacacaggggagaagccattcaaatgtgagatatgtagtgtgagcttccgtcttaggtcaagtcttaataggcattgtgtggtccacacaggaaagaaaccaaacagcactggggaatatggaaaaggcttcattcgtaggctggatttgtgtaagcatcagacgatccacacaggagagaaaccatataattgtaaagaatgtgggaagagcttcagacggtcctcctatcttttgatccatcagcgagtccacactggagaaaagccatacaaatgtgacaagtgtgggaagagctacattactaagtcaggtcttgacttgcaccatagagcccacacaggagagagaccttataactgtgatgactgtgggaagagctttagacaggcctcaagtattttgaatcataagagactccattgccgaaaaaaaccattcaaatgtgaggattgtggaaagaagcttgtataccggtcataccgtaaagaccaacaaaaaaaccacagtggagaaaatccatccaaatgtgaagactgtgggaagcgctacaagaggcgcttgaatcttgatataattttatcattatttttaaatgacacgcacaattctgtcttctcttgaactgcataactgagaactctgcaaattccccaaagaaggaggaaaaatgaccatgttcaaggaggcagtgaccttcaaggatgtggctgtggtcttcaccgaggaggagctggggctgctggacgtttcccagaggaagctgtatcgagatgtcatgctggagaacttcagaaacctgctatcagtggggcatcaactttcccaccgagatacttttcacttccaaagagaagaaaagttttggatcatggagacagcaacccaaagagaagggaattcaggaggcaagatccaaactgagttggagtctgttccagaaacaggaccacatgaagagtggtcttgccagcaaatctgggaacaaactgcaagtgagttaactagacctcaagactccataagtagctctcagttctccacacaaggtgatgtcccctcccaggttgacgcaggactatctataattcacataggagagacaccttctgagcatgggaagtgtaaaaaattcttcagtgatgtctccatccttgatcttcatcaacaattacactcaggaaagatatcccatacatgtaatgagtacaggaagagattctgttatagctcagctctttgtcttcatcagaaagttcacatgggagagaaacgctataagtgtgatgtgtgtagtaaggcatttagtcagaactcacaactgcaaactcatcagagaatccacactggagagaaaccattcaaatgtgagcagtgtgggaaaagtttcagccgtagatcaggaatgtatgttcattgcaaattacacacaggagaaaaacctcatatttgtgaggaatgtgggaaggccttcattcacaattcccagcttcgggaacatcaaagaatccatactggggagaagccattcaaatgttatatatgtggtaagagcttccatagtagatcaaatcttaataggcattccatggtccacatgcaagagaaatcatttagatgtgatacctgtagtaatagctttggtcagagatcagcacttaatagtcattgcatggaccacacaaaagagaaactatacaaatgtgaagaatgtggaaggagcttcacttgtaggcaagatctttgtaagcatcagatggaccatacaggagacaaaccatataattgtaatgtatgtgggaagggcttcaggtggtcctcatgtctttcaagacatcagcgggtccacaatggagaaacaacattcaagtgcgacggatgtgggaagagattttatatgaattcacagggccattcacatcagagagcctatagagaagaagaactgtataaatgtcagaagtgtgggaagggctacattagtaagtttaatcttgacttgcaccagagggtccacacgggagagagaccttataattgtaaggaatgtggaaagagcttcaggtgggcctcaggtattttgagacataagagactccatactggagaaaaaccattcaaatgtgaagagtgtgggaagaggtttactgagaattcaaaacttcgtttccatcaaagaattcacactggagaaaagccttacaaatgtgaggagtgtggaaagggattcagatgggcctcaactcatctaacccatcaaagactccacagcagagaaaaactattccaatgtgaggattgtgggaagagcagtgagcacagttcatgccttcaagaccaacaaagcgaccacagtggagaaaaaacatccaaatgtgaggactgtgggaagcgctacgagaggcgcttgaatctagatatgattttatcattatttttaaatgatatataattattgtccatatttatgggttacagcatatttcaatacatgtatacaatgtataatg

SEQ ID NO: 103563 - DNA, 96 bp, Homo sapiens
  Payload ID: 295
  Gene Symbol:
  Gene Name: AC087350.1
  ENST ID: ENST00000626876
  CDS Start-End: 1-96
tttttggtcttgaagaaatttaaaggtttaaccttcactcagtctaagtgttttagcaaagttatgctttaccctggtccaagttattatattgta

SEQ ID NO: 103564 - DNA, 57 bp, Homo sapiens
  Payload ID: 296
  Gene Symbol:
  Gene Name: AC087392.1
  ENST ID: ENST00000631259
  CDS Start-End: 1-57
tgttctactgtccggctggagtgtactggcatgatctctgctcactgcaacctctgc

SEQ ID NO: 103565 - DNA, 63 bp, Homo sapiens
  Payload ID: 297
  Gene Symbol:
  Gene Name: AC087651.1
  ENST ID: ENST00000626282
  CDS Start-End: 1-63
cgcgccctgaggccctctgtgctccccgggtccacggtccgcatcaaacctgaacttggtggg

SEQ ID NO: 103566 - DNA, 63 bp, Homo sapiens
  Payload ID: 298
  Gene Symbol:
  Gene Name: AC087651.2
  ENST ID: ENST00000629937
  CDS Start-End: 1-63
caaatgcaaaaagctgttcaatcaagcctcaagagatggggtttcaccatcttggccaggctg

SEQ ID NO: 103567 - DNA, 1766 bp, Homo sapiens
  Payload ID: 299
  Gene Symbol:
  Gene Name: AC087762.1
  ENST ID: ENST00000623469
  CDS Start-End: 751-1275
ctccccacccctctttgttgtgtaagtgtgattggtcacacatcacagaaaactcatatagcagatatttgccacgtaacgtagaatttgaaagcacatctatgccataggaaacggctaattgccttgactcaggagtgcccccaagagcctgtctcattgggaatccttcagctgtcccaagaggaaaccattgcgttgacttttgtgacagtcatgtacttggttttaatgatgtttatcacttacttacaagttcttaagcaccagagttgagttgggcctctttctgcccctgggatcactgggcatgtcctcgtcagtgcctgatttcttttgctcagtgtgtttgggggatccttctatttcattgcctggtcttcgctcatttcctattgcagttccgtgcatggcccattacatgaacacaaccattgttttctctcttccattgttttctctcttctgctattgatggactcggggttgcttctgatctttggctcttaggaaggttgccccataaacatcctcttacctgtctccaggtgcacctgtgcacagtgcctgccagaaaagtacctgggggtggaactgagtttcttcactttggcaggtgctgcagacggtcagcttctcttctcaccagcagtgggagagccccctgtgctccagccctccccagagctggggatcatcagacctgagagccacaggtcctcgtccatgtgtagctgaccagatgtgaggatgctctgcccatgtttggggacagcttcttttcctctccccatctggctccccgctgctccctgtgtgcccaccccacctgccccggtgtttggctggcctcctcttcctgctgagccagtgcctctaaggagctgccagcagtggggatgcgccaggcctcctccagttctccagggcgcaggctttctgctgcgaccatcccgggtctcatcgagctctgcaccctgcacccgcagcgctgacctcacggagtctgcccctctgctgcagcttgccctggcctcctgcctgcctctttctgatcctgtcgtcttttgcctccttggcctccctcctggccttgctgctgtctcccttcctcagcttgtcttttggggaatctctaaccttccagaactccctctgcccatatggagccccgatctgggcagcaccacccctttgcaaaactcccctccgtccacacctccctggggcttgcaggcaccatccaaggaacagcaggactcaccatctcagtgagccagggcagggtagcccgggtctgaggcagcgtgggattgggagtctgagccatggcgtgggctatgggacctgggccaggcagcaaatgtctctaagctctcctgttctcatccataaaagaacataattataaggattcagtgagagaatatccacggcagtgtttgggagtgatgtgctacctggctcagaagtcactgtgaacatcattgtccctttctgtaatgtagctttctgtcatgcatctagctagtatgtaaggagaacctggtgcacacaggctgttacttcaccttatcttgttgtggagtgctcgtaactgcccgccaggaggtaggcaccgtgttcctctctgctttacagaagaggaaaccgaggcctaggaagggggctggccttggctgagatgtcacccctgatgacaggcaaagctgggaatctcatctctgtggccagactcccagcaccatcatgcacggctttctgga

SEQ ID NO: 103568 - DNA, 171 bp, Homo sapiens
  Payload ID: 300
  Gene Symbol:
  Gene Name: AC090154.1
  ENST ID: ENST00000623055
  CDS Start-End: 1-171
ggctgggcgcggtggctcacacctgtaatcccagcactttgggagactgaggcaggcggatcacctgaggtcaggagttcaagaccagcctggccaacatggcgaaaccccgtttctacaaaaatgactaagttgttgcaaatatatgaacttatgcttgaatatcaggct

SEQ ID NO: 103569 - DNA, 407 bp, Homo sapiens
  Payload ID: 301
  Gene Symbol:
  Gene Name: AC090498.1
  ENST ID: ENST00000623936
  CDS Start-End: 28-105
cgccatttttttggaaacctctgcgccatgagagccaagtggaggaagaagcgaatgcgcaggctgaagcgcaaaagaagaaagatgaggcagaggtccaagtaaaccgctagcttgttgcaccgtggaggccacaggagcagaaacatggaatgccagacgctggggatgctggtacaagttgtgggactgcatgctactgtctagagcttgtctcaatggatctagaacttcatcgccctctgatcgccgatcacctctgagacccaccttgctcatgaacaaaatgcccatgttggtcctctgccctggacctgtgacattctggactatttctgtgtttatttgtggccgagtgtaacaaccatataataaatcacctcttccgcggttttagctgaagaatt

SEQ ID NO: 103570 - DNA, 533 bp, Homo sapiens
  Payload ID: 302
  Gene Symbol:
  Gene Name: AC090958.1
  ENST ID: ENST00000630055
  CDS Start-End: 210-533
atctgggctgcgtcttctcgccgctgctcttcgtggcccaacgccccaatccttgcgtgtgcttgcagtcccaccccacactcagccttgtgtccctcgatccagtctccgacttccatttcccaccctaaaccgcctacccggtgtctgttccccgcccggttgtcctcgccctgctgcgctgagtgtcccctgttagcctcgaccccatggcgctgcagacgctgcagagctcgtgggtgaccttccgcaagatcctgtctcacttccccgaggagctgagtctggctttcgtctacggctccggggtgtaccgccaggcagggccgagttcagaccagaagtcatatctgacggcagcttccagaacatgctggctcccatatccacagagcactttcctccaacacggctccctacccttccctgtgcttcccccagtgcttccagcaagtctgtttaactcacgtgtccttcaagactcagatttgtcatctctaggagaatttctccctcctgtgcccctgatctga

SEQ ID NO: 103571 - DNA, 51 bp, Homo sapiens
  Payload ID: 303
  Gene Symbol:
  Gene Name: AC091180.1
  ENST ID: ENST00000628664
  CDS Start-End: 1-51
agcaaggtggagcaaaacacgaccccttcccctcaccctcctcaacctgaa

SEQ ID NO: 103572 - DNA, 78 bp, Homo sapiens
  Payload ID: 304
  Gene Symbol:
  Gene Name: AC091304.2
  ENST ID: ENST00000617112
  CDS Start-End: 1-78
atgagagccaagtggaggaagaagcgaatgcgcaggctgaagcgcaaaagaagaaagatgaggcagaggtccaagtaa

SEQ ID NO: 103573 - DNA, 550 bp, Homo sapiens
  Payload ID: 305
  Gene Symbol:
  Gene Name: AC092159.1
  ENST ID: ENST00000624944
  CDS Start-End: 88-228
actttctaactctgtaggacacagcaaatcaaaatagaggtcctgggagggatccactaatttagtgagttagacaaagaatgatttatggcagtaaccacattcaggagaaatattcctataaaaactcagcaaatatggaaaactgagcacatgaagcaaaaatatttaaagattttcagaaatttggaaaacctaaattacattttaagacataggatgtcatgatctattttgtgctgatatagtagaatacctgagactgggtagcttataataaacagaaatgtattggctcacagttctggaagctggaagctcaatatcaaggtgttggcatcttgcaagggcctccttgctgtgccatcatatggcagaacgcacagagaaggagagaaccactccattaatcccaccatgagggcagggctcctgtggcctaacgacctcttaaaagtctccctctaaatactgatggaatgccaattaagactcaatgtgagttttggaggggacaaacattcagaccttagcacaggaatcatgaatg

SEQ ID NO: 103574 - DNA, 48 bp, Homo sapiens
  Payload ID: 306
  Gene Symbol:
  Gene Name: AC092384.1
  ENST ID: ENST00000629085
  CDS Start-End: 1-48
gcagacggcgatcgccagcttctccaacagaaggtgagaagcttcccc

SEQ ID NO: 103575 - DNA, 921 bp, Homo sapiens
  Payload ID: 307
  Gene Symbol:
  Gene Name: AC092718.1
  ENST ID: ENST00000624382
  CDS Start-End: 1-921
atgggggaggactctccagtggctatgttcagctggtatttggacaacaccccaacagagcaggctgagcccctcctggatgcctgcagactcagaggattttggccaaggtccttaaccctcctccagagcaacacctccacgttgctgttgaacagctcgtttctgcagtcccggggagaggtcatccgaatcagagccacagcactgaccaggcatgcctatggggaggacacctatgtgatcagcactgtgcctccccgtgaggtgcctgcctgcactattgccccagaggagggcaccgttctgacgagctttgccatcttctgcaacgcctccacagccctgggacccctggagttctgcttctgtctggaatcaggttcctgcctacactgtggccctgaacctgccctcccatcagtgtatctgccacttggagaggagaacaatgactttgtgctgacagtagttatttctgccaccaatcgtgcaggggacacgcagcagacccaggccatggctaaggtggcactcggagacacatgtgttgaggatgtagcattccaggctgccgtgtcagagaaaatccccacagctctgcaaggcgagggtggccccgagcagctcctccagctggccaaggctgtgtcctccatgctgaaccaagagcatgaaagccagggctcaggacagtcactgagcatagacgtcagacagaaggtcagagagcatgtgctgggatcactgtctgcagtcaccaccggcttggaggacgtgcagagggtgcaggagctggccgaggtgctgagagaggtgacctgccggagtaaggaactcacaccctcggcccaggggtcctgcatgggcgattcatgggaaggtgcccctcctgctgcccatgtatctcacgctaggtga

SEQ ID NO: 103576 - DNA, 1850 bp, Homo sapiens
  Payload ID: 308
  Gene Symbol:
  Gene Name: AC092835.2
  ENST ID: ENST00000425953
  CDS Start-End: 282-1850
gttggccggcgctaggcgtccccgccggctgttagatgcctttgtcgtcgggctcggcttcctcagtgtgtggctggaggtcgaacccagggtagaggagggctgaacgcatccccttttaatctgagtgtccgggaggagggtggcgggaggacccccgggtgggggcgccaggctgcccacgcgtgcgttcccggcctcttgggggacccgagcggcggacctccggctccttcccctgtcgcggttgcctccagcgcgggccggaggaaggagtctccatggaacctgagggcagaggatcactttttgaggactcagaccttctccatgctggaaacccaaaagaaaatgacgtgactgctgtgctgctgacccctgggtcccaagaattgatgatcagggatatggccgaggctctcacccagtggaggcagctgaactctcctcagggagatgtgcctgagaagcctaggaatctggtcttgctggggcttccaatttccacacctgatgtaatctctcagttggagcatgaggaagagctggagagagaagtctcaaaggcagccagtcaaaagcactgggaaacaataccagaaagcaaggagctaactccagagaaggatatttctgaagaagaatcggctcctggggtgttaattgtaagattttcaaaggaaagttctagtgaatgtgaggattctttagagagtcagcaggaaaaccatgagaaacatttaatacaagaggctgtcactgagaaatcttctagggagagaagctaccaatctgatgaatttagaagaaattgcactcagaggtccttacttgttcagcagcaaggagagagactacatcattgtgattcatttaaaaataacttaaaacaaaattcagatataattaggcatgagagaatttgtgcaggaaagaaaccttggaaatgcaatgaatgcgagaaagccttcagttactactcagcttttgtcttgcatcagagaattcacacaggagaaaaaccctatgaatgtaacgaatgtggtaaagcctttagccagagcatacaccttactctgcaccagagaattcatactggggagaaaccctatgaatgtcatgagtgtgggaaagccttcagtcaccgctcagcccttattcggcatcatataattcatactggagaaaaaccctatgaatgcaatgaatgcgggaaggcctttaatcagagttcatacctcactcaacatcagcgaattcatactggagagaaaccttatgagtgtaatgaatgtgggaaggccttcagccaaagcacattccttacccagcatcaggtcattcacactggagagaaaccttataagtgtaacgaatgtggcaaagcctttagtgatcggtcaggtcttatccagcaccagagaactcatactggggagcggccatatgagtgtaacgaatgtgggaaagcctttggctactgctcagccctgactcagcaccagaggactcacactggggagaaaccctataaatgcaatgattgtgccaaagccttcagtgaccgctcagcccttattcgtcatcagagaacacacactggagagaaaccttacaaatgtaaagattgtggaaaagcattcagccagagctcatctcttacaaagcatcagaaaactcacactggagaaaagccctacaagtgtaaggaatgtggaaaagcctttagccagagttcatccctctctcaacatcagaaaactcatgctggagtgaaaaccaagaaatatgtccaagctcttagtgagcatttaacctttggccaacacaagagaattcatactggataa

SEQ ID NO: 103577 - DNA, 475 bp, Homo sapiens
  Payload ID: 308
  Gene Symbol:
  Gene Name: AC092835.2
  ENST ID: ENST00000614286
  CDS Start-End: 106-475
tgcccacgcgtgcgttcccggcctcttgggggacccgagcggcggacctccggctccttcccctgtcgcggttgcctccagcgcgggccggaggaaggagtctccatggaacctgagggcagaggatcactttttgaggactcagaccttctccatgctggaaacccaaaagaaaatgacgtgactgctgtgctgctgacccctgggtcccaagaattgatgatcagggatatggccgaggctctcacccagtggaggcagctgaactctcctcagggagatgtgcctgagaagcctaggaatctggtcttgctggggcttccaatttccacacctgatgtaatctctcagttggagcatgaggaagagctggagagagaagtctcaaaggcagccagtcaaaagcggaattctcttggcgacaactccccattgaagaatgttcctttcttctggagaaaggagggcacctttc

SEQ ID NO: 103578 - DNA, 2598 bp, Homo sapiens
  Payload ID: 309
  Gene Symbol:
  Gene Name: AC092881.1
  ENST ID: ENST00000623993
  CDS Start-End: 2221-2577
ggcacccaataaatacataattattagaatgaatacattctatcacaatgtcttaattcaacagattcttggcacctgtggatttaacactggtagtttctactatgtacaaatggctttctagggtcatggcattcaggtatcaaagaaactgatgttttcagctcatgttcacatagttactcttacaaagtaatataatcctggttctactacttacaatctgtgtaaccttgaacaaattccttaaactcttgtggagctgctgtgaaggttaaatgagttaattcacataaatacttaaaatcgcatctgatacacagtagataatattcaataaatattagctctgtgtgtgtgtgtgtgcgtgtgtcatacttatgaaaagaaagccaacaggtggtaccaaaagtgaagataaaataagatagtctaatcaagtgatggttttcacacacacaaaaaggatgttttatggtggaaaatgttattctatagctgtgttcttgaactttaaaagtagcaatgatcttgaaataaatctctcagaaatgtgaagactgtacttcttgctgaaatcaatataacagcctaacaggtgtctcctgtcttgataaagtaggccattcctaaatctatcccatgctgtggatgttattcccactgctaaaacaactttactcacagtctgttcaatgctaatctcaaatataatctcatcagtaaattcttttcctaatcattttccaagatacctgattactcctgtctttgaaatatccaaatagtctacagccgtaccatcctgaatgtgccctatctcatctgaaacatccaaataacctcgaacttcttattctactacatagtaaaatcatttgtgtacttatcctactagattatatgagactgcttcttgttcatcatgcattcaagatttactgagtgcttgtcatatgcgaggtacagaggatacaaaggcaatgaggacatgcaataaataatgcagcaacaccatagcagtaggtacactatgcagagatggcataaatgaggatgatctcttctaccacacatctgcagtatctagaatggcacaacatgtatggtagggacccataagtatttgtcaactttaattcctacctgctttttgaagtttttccataccactatagcttccctttttttttggttctcctcaaggagaatggtatagacagaatttgctccctaaaagtctgtctacaccattctgcacatggtatcttttaatctatgtgttagcatcacaggctgttatttaatattttacatataaatatgtcctatcttccccaactataaaacatgtgttcaaaagagcaagaaatcctagagcactctgtacttattactaagcatttagtatctgttcaatggtcctacaatttccgaaagcaaccaaaatatgtcatgcacctatttacatagctgatagcatcacttctgaaccaccccacctgtgctctgggttctctatgaaacaagtagctttcacataggtgttcttaaagcaggaggccaaagaaatgtctgctggaagcatgagactatgtcattgttctcaagctaggagtccagaacttagaaattctgacagatttagctcttcttccatctagatgcctgggtcctctgagaattcagacacaaatttgtataatgaattcacccagatattttgctaagctaggtgcctataagataatatgcacacagaaagcactcagtaaatgacagtttcctttttctccaatcttacaaggtcctagatcctgttggtaactaagaaaaggtaaatgcaactatcaaccacttaattccaatgctttgactatccaggagaaattaattcctggttccctgttgattctaatctaggagacagcttaagggagctcatgggtcttgaagcttataaggtgtacagtaagtcttcacttaatgccactgatcattcttggaaactgtgatttcaggcaaaaatacatacagcaggtccttgaatagtgttgtttcattcaacttcattccattgtaatgttgatgagaacaaaaaattggttttgttatatgtagttttgcttcaagtcgcagtttcaaaaaacttatgttaagtgaggacttaattcacctgaaagcttatcacacactcaaatataacaaataggaaacattatgcaacttgaatacaagagtatgttcattggtttctatagttatcattccatgtacagtattcacgtgaattattggatgaaaagtccaattatttacatatttggatacaatcatactatactagaactgaagaccatacaggtctctgttccagcattttctggctacctcatggcactgcataatcacttccacccaaatctagccaaatctaagtttaagcacttctgtatctattccaagacaaactccctttcttgtttaatctcagtgactcttacttctagagagggcactcttccttctatatctcttccacctctaacctttctaaccatcaagaacatacaatagatagtagatctcacattttta

SEQ ID NO: 103579 - DNA, 60 bp, Homo sapiens
  Payload ID: 310
  Gene Symbol:
  Gene Name: AC100821.2
  ENST ID: ENST00000625207
  CDS Start-End: 1-60
gaattgatgcaggaagtaaaaaatatttccataaagttagaaaatttaaggtggtatcca

SEQ ID NO: 103580 - DNA, 903 bp, Homo sapiens
  Payload ID: 311
  Gene Symbol:
  Gene Name: AC104057.1
  ENST ID: ENST00000624636
  CDS Start-End: 1-903
atgagagggccggaccagatggaaattcgggggggtccgtatctcctgctcggtgaggtcgttggacacagcgcacttggtgcccagcccgcgcaggctgccaatggagatgccgatgagcttctggagctgtccgcactgctgcagccccgggctggccggggcccctgcgccaccctcagcggccgctgcatcacccccgccaccgccctccttcttctctcccatcgcctccgcgcgcagtgccgccctatgcaggccacagcggccgaggcagggagcccggggctcgggcgcctaggcaaggaacccccgagccgggagagctggaccgggagcgcccctcggcgctgcccttgccaggacgccagtagagctggcagcggagtctgccgctcccgccctcagagccgcggcggcgggagcagaaagccgcggcggcaaaaagccgcggcgacggggcaaaaagccgcggcggcgcaggcaaaaagcttaggcggcgggggcaaaaagccgcggcggcaaaaatgcgcggcggggcaaaaagccgcggcggaagaaagccgccggggcgggggcaaaaagccgcggcgggggggacaaaaagcagtgggagctggggcaaaaaaaccacaaaaagccgcggcggcggggaccaaaacgccgcggcggcggaggcaaaaagctgcaaaagccgcggtgtgggggcagaaagccgcagcgggagaaagtctcactccaaattcccttgcttcagtaagcttctctaggccaatgttccttcggcattacccattttcttcctgtgaatgcaaatcacataaacatggaagtacatttgaccattttaattgtttaacattccatgtcacacgaccttccacaatagaatcaatgtattaa

SEQ ID NO: 103581 - DNA, 906 bp, Homo sapiens
  Payload ID: 312
  Gene Symbol:
  Gene Name: AC104073.2
  ENST ID: ENST00000624631
  CDS Start-End: 1-906
atgagagggccggaccagatggaaattcgggggggtccgtatctcctgctcggtgaggtcgttggacacagcgcacttggtgcccagcccgcgcaggctgccaatggagatgccgatgagcttctggagctgtctgcactgctgcagccccgggctggccggggcccctgcgccaccctcagcggccgctgcatcacccccgccaccgccctccttcttctctcccatcgcctccgcgcgcagtgccgctctatgcaggccacagcggccgaggcagggagcccggggctctggcgcctaggcaaggaacccccgagccgggagagctggaccgggagcgcccctcggcgctgcccttgccaggacgccagtagagctggcagcggagtctgccgctcccgccctcagagccgtggcggcgggagcagaaagccgcggcggcaaaaagccgcggcgacggggcaaaaagccgcggcggcgcaggcaaaaagcttaggcggcgggggcaaaaagccgcggcggcaaaaatgcgcggcggcggggcaaaaagccgcggcggaagaaagccgccggggcgggggcaaaaagccgcggcgggggggacaaaaagcagtgggagctggggcaaaaaaaccacaaaaagccgcggcggcggggaccaaaacgccgcggcagcggaggcaaaaagctgcaaaagccgcggtgtgggggcagaaagccgcagcgggagaaagtctcactccaaattcccttgcttcagtaagcttctctaggccaatgttccttcggcattacccattttcttcctgtgaatgcaaatcacataaacatggaagtacatttgaccattttaattgtttaacattccatgtcacacgaccttccacaatagaatcaatgtattaa

SEQ ID NO: 103582 - DNA, 411 bp, Homo sapiens
  Payload ID: 313
  Gene Symbol:
  Gene Name: AC104389.1
  ENST ID: ENST00000624109
  CDS Start-End: 1-411
atggattgccaaaacggtcaccagcacatttcccaggagctggaagttctcaggatccacatgcagcttgtcacagtgcagttcactcagctgggcaaaggtgcccttgagatcatccaggtgctttatggcatctcccaaggaagtcagcaccttcttgccatgtgccttgactttggggttgcccatgatggcagaggcagaggacaggttgccaaagctgtcaaagaacctctgggtccatgggtagacaaccaggagcctccttcccagggtttctcctccagcatcttccacattcaccttgccccacaggcttgtgatagtagccttgtcctcctctgtgaaatgacccatggcgtctggactaggagcttattgataacctcagacgttccagaagcgagtgtg

SEQ ID NO: 103583 - DNA, 411 bp, Homo sapiens
  Payload ID: 314
  Gene Symbol:
  Gene Name: AC104389.2
  ENST ID: ENST00000623781
  CDS Start-End: 1-411
atggattgccaaaacggtcaccagcacatttcccaggagctggaagttctcaggatccacatgcagcttgtcacagtgcagttcactcagctgggcaaaggtgcccttgagatcatccaggtgctttgtggcatctcccaaggaagtcagcaccttcttgccatgtgccttgactttggggttgcccatgatggcagaggcagaggacaggttgccaaagctgtcaaagaacctctgggtccatgggtagacaaccaggagcctccttcccagggtttctcctccagcatcttccacattcaccttgccccacaggcttgtgatagtagccttgtcctcctctgtgaaatgacccatggcgtctggactaggagcttattgataacctcagacgttccagaagcgagtgtg

SEQ ID NO: 103584 - DNA, 580 bp, Homo sapiens
  Payload ID: 315
  Gene Symbol:
  Gene Name: AC104532.2
  ENST ID: ENST00000588891
  CDS Start-End: 51-257
agttccgggccgcctgggggcgtggccgggcctgtacagcagcctgggccatgtcggcgccgccggccctgcagatccgggaggcaaacgcacacctggcagccgtgcaccggcgcgcagcggagctggaggcgcggctggacgcggcggagcgcacggtgcacgcccaagccgagcgcctggccctccacgaccagcagctgcgcgccgccctagacgaactgggtcgcgccaaggaccgaggcaccttccactagcaacagtctccccaggcacaacacagctaacacaaggccccgcaggcaggactctgggacagacgcaggccagctgcccagagcccagaccaagcatggacgccgtggatgccaccatggagaaactccgggcacagtgcctgtcccgcggggcctcgggcatccagggcctggccaggtttttccgccaactagaccgggacgggagcagatccctggacgctgatgagttccggcagggtctggccaaactcgggctggtgctggaccaggcggaggcagagggtgtgtgcaggaagtgggaccgcaatggcagcgggacg

SEQ ID NO: 103585 - DNA, 963 bp, Homo sapiens
  Payload ID: 316
  Gene Symbol:
  Gene Name: AC104534.3
  ENST ID: ENST00000594769
  CDS Start-End: 1-963
tcatggtctatggcttggatcaatctaagatgaactgtgaccgagtcttcaatgtcttctgcttatatggcaatgtggagaaggtgaaattcatgaaaagcaagccgggggccgccatggtggagatggctgatggctacgctgtagaccgggccattacccacctcaacaacaacttcatgtttgggcagaagctgaatgtctgtgtctccaagcagccagccatcatgcctggtcagtcatacgggttggaagacgggtcttgcagttacaaagacttcagtgaatcccggaacaatcggttctccaccccagagcaggcagccaagaaccgcatccagcaccccagcaacgtgctgcacttcttcaacgccccgctggaggtgaccgaggagaacttctttgagatctgcgatgagctgggagtgaagcggccatcttctgtgaaagtattctcaggcaaaagtgagcgcagctcctctggactgctggagtgggaatccaagagcgatgccctggagactctgggcttcctgaaccattaccagatgaaaaacccaagactgacaggctccaactacccgggactcagtattagccttcgcctcactggctcctctgcacaagaggaggcttccggagtagccctcggtgaagccccagaccacagctatgagtcccttcgtgtgacgtctgcgcagaaacatgttctgcatgtccagctcaaccggcccaacaagaggaatgccatgaacaaggtcttctggagagagatggtagagtgcttcaacaagatttcgagagacgctgactgtcgggcggtggtgatctctggtgcaggaaaaatgttcactgcaggtattgacctgatggacatggcttcggacatcctgcagcccaaaggagatgatgtggcccggatcagctggtacctccgtgacatcatcactcgataccaggaga

SEQ ID NO: 103586 - DNA, 342 bp, Homo sapiens
  Payload ID: 316
  Gene Symbol:
  Gene Name: AC104534.3
  ENST ID: ENST00000602021
  CDS Start-End: 1-342
tcatggtctatggcttggatcaatctaagatgaactgtgaccgagtcttcaatgtcttctgcttatatggcaatgtggagaagatctgcgatgagctgggagtgaagcggccatcttctgtgaaagtattctcaggcaaaagtgagcgcagctcctctggactgctggagtgggaatccaagagcgatgccctggagactctgggcttcctgaaccattaccagatgaaaaacccaagtattgacctgatggacatggcttcggacatcctgcagcccaaaggagatgatgtggcccggatcagctggtacctccgtgacatcatcactcgataccaggaga

SEQ ID NO: 103587 - DNA, 342 bp, Homo sapiens; identical to SEQ ID NO: 103586
  Payload ID: 316
  Gene Symbol:
  Gene Name: AC104534.3
  ENST ID: ENST00000635188
  CDS Start-End: 1-342

SEQ ID NO: 103588 - DNA, 963 bp, Homo sapiens; identical to SEQ ID NO: 103585
  Payload ID: 316
  Gene Symbol:
  Gene Name: AC104534.3
  ENST ID: ENST00000634693
  CDS Start-End: 1-963

SEQ ID NO: 103589 - DNA, 48 bp, Homo sapiens
  Payload ID: 317
  Gene Symbol:
  Gene Name: AC104581.1
  ENST ID: ENST00000628882
  CDS Start-End: 1-48
ctttggacaagaagtttgtatttatttgggaggaatggtgtttgtttg

SEQ ID NO: 103590 - DNA, 84 bp, Homo sapiens
  Payload ID: 318
  Gene Symbol:
  Gene Name: AC104650.2
  ENST ID: ENST00000625822
  CDS Start-End: 1-84
cagaacctcccttccactgtttcccaggcacctctaccatatggtcgggggccgtgcaggccgcaggggggaggctccgttaga

SEQ ID NO: 103591 - DNA, 375 bp, Homo sapiens; identical to SEQ ID NO: 103504
  Payload ID: 319
  Gene Symbol:
  Gene Name: AC104981.1
  ENST ID: ENST00000623847
  CDS Start-End: 1-375

SEQ ID NO: 103592 - DNA, 60 bp, Homo sapiens
  Payload ID: 320
  Gene Symbol:
  Gene Name: AC105009.1
  ENST ID: ENST00000626806
  CDS Start-End: 1-60
gaaatttctcctggagcaatggacagggtgataagacaatttcactactttcaaacaaat

SEQ ID NO: 103593 - DNA, 483 bp, Homo sapiens
  Payload ID: 321
  Gene Symbol:
  Gene Name: AC105052.2
  ENST ID: ENST00000624140
  CDS Start-End: 1-483
atgagacaagaggtagaggggagaggtagaggtagccacgagctgataattacagacaagagatgcggagtatgtgggggctcattatcctgcatagtctatctttgtatatctttgaacttttcaagaataaaaaagcttaaaaagtatacatggcctggtcctaccagagactcacccaatgccagcctccagccagggagagccaagtttgcattttcacacgcatctcacactcctctgcactctcaacttggagcgctccaaacagggaaaccccaagccttgctggcttctgccaaccccctgagcagaagcatgggtccccctgatcaccacctcaccaccctcatcctgatctcactgtacacaccctttcccggtctgctaagtagcgggtgtttttccttgacactaacgctaccgctagaccacggtgggcttggcaacaggtgtcttcccagatgctggcgttaccgctag

SEQ ID NO: 103594 - DNA, 129 bp, Homo sapiens
  Payload ID: 322
  Gene Symbol:
  Gene Name: AC107081.1
  ENST ID: ENST00000627186
  CDS Start-End: 1-129
aaaggtatcttaaagacggagtcttgctctgtcacccaggatagagtgcaatggcattatctcggctcactgcaagctcaggctggtcttgaactcctgggctcaagtgatcctcctgccttgggctcc

SEQ ID NO: 103595 - DNA, 375 bp, Homo sapiens
  Payload ID: 323
  Gene Symbol:
  Gene Name: AC108925.1
  ENST ID: ENST00000625070
  CDS Start-End: 1-375
atgactcttaacgagcatgctgccttcaagcatctgtttaacaaagcacatcttgcaccgcccttaatccatttaaccctgagcggacacagcacatgtttcagagagcacagggttggggataaggtcacagatcaacaggatcccaaggcagaagaatttttcttagtacagaacaaaatgaaaagtctcccatgtctacttctatccacacagacccggcaaccatccgatttctcaattttttccccacccttcccgcctttctattccacaaaaccgccattgtcatcatggcccatccccaatgagccgctgggcacacctcccagacggggtcgtggccgggcagaggggctcctcacttcccagtag

SEQ ID NO: 103596 - DNA, 3202 bp, Homo sapiens
  Payload ID: 324
  Gene Symbol:
  Gene Name: AC108938.5
  ENST ID: ENST00000603767
  CDS Start-End: 298-1044
gtttatagcatagtccactgggactgccgctctgacaaagactgtgtcactactttgtggaatgttattttagaacttccagaatgcctcagtaaatcctgactgccatgtaactgtgtactgtgctgctgagctcttaacatgaagcagcagcagtgaccctggcgggccaggctgacgtgcgtgggaacagtgggagtgaccctggctgggaagcagggaggcctggatattgtttctcctggctctgtgtcctgccattctcatccctgtgctcagagctctcaagcacccacgatggccttctcaggccgagcgcgcccctgcattatcccagagaacgaagaaatcccccgagcagcccttaacactgtccacgaggccaatgggaccgaggacgagagggctgtttccaaactgcagcgcaggcacagtgacgtgaaagtctacaaggagttctgtgacttttatgcgaaattcaacatggccaacgccctggccagcgccacttgcgagcgctgcaagggcggctttgcgcccgctgagacgatcgtgaacagtaatggggagctgtaccatgagcagtgtttcgtgtgcgctcagtgcttccagcagttcccagaaggactcttctatgagtttgaaggaagaaagtactgtgaacatgactttcagatgctctttgccccttgctgtcatcagtgtggtgaattcatcattggccgagttatcaaagccatgaataacagctggcatccggagtgcttccgctgtgacctctgccaggaagttctggcagatatcgggtttgtcaagaatgctgggagacacctgtgtcgcccctgtcataatcgtgagaaagccagaggccttgggaaatacatctgccagaaatgccatgctatcatcgatgagcagcctctgatattcaagaacgacccctaccatccagaccatttcaactgcgccaactgcggacaggaaggatctgactgccgatgcacaggagctgaaaggggagctatactgcctgccatgccatgataaaatgggggtccccatctgtggcgcttgccgacggcccatcgaagggcgtgtggtgaacgccatgggcaagcagtggcatgtggagcattttgtttgtgccaagtgtgagaaaccctttcttggacatcgccattatgagaggaaaggcctggcgtattgtgaaactcactataaccagctatttggtgatgtttgcttccactgcaatcgtgttatagaaggtgatgtggtctctgctcttaataaggcctggtgcgtgaactgctttgcctgttctacctgcaacactaaattaacactcaatttctagaaaatttctccacaaactgagagctccagaattgatgactcagagtgaaccgaggagatcactactgtgcacaagtttgcctccaaacaactgggtgatgcctccaaacagacctggaatcatccatttctccaaggatctctgcttcttcttgtaaaataggctatttaaggactacaatctgagcattaagggactgtccttattagaagaggaaacttggacacagatacacacagagggagcaccgtgtgaagacacagagaggagatggccagctaccagccaagcagagagcccttactgtaaaccaaccctgccgcatcctgatctcagaattttggcttccagaactttccagctactagggaggctgaagcaagagaatggcatgaacctgggaggcggagcttgtcgtgagcccagatcaggccactacactccagccggggcaacagagcgcaactccgtctcaaaacaaacaaacaaaacaaaacaaaaaaaacttatagacaagtacaaaatgagaagaaaaagtccctttcccttcatgcctctacttcctgctgtattctcaaagaactatcataggaacgtactgggaaaaccaaaagaattcacggatcctttgaaagaagacgcacaccactgtaaattctgtggaacaggagaaaaactgtcttggaggaaggcatccttctattctactgatcagaaagctggacaaagtcccactgccaggctacacagttggtgccatttgcggaggtgacctttgacctttaacccacgcggccacccgcccgagctcttacccctgctgcccctcgcgcgtcccactccccgtccctgccggatccgcttccctgcgctgggcccagcgcgccgccagggaaggggccggagcctgggagcccgccccgccgtcgcccgtcctccgcccgcaggcccacccgcagcggtcacgtgaaggaccgagcgccgcgcgcccaggcggggcctccggcctgcacgaggagggcagagtccgttgcggctgccgccccgacgcccgcgcatccccgctcgccgcgcccgccgccgcgatgtccggggccggcctagccgcggtggtgagctgcctgcgcccgcagcccggcgaggagccgcagacccatgaggaccttctcctggcagctgcctatgttttggatgcccagtacaacagaaatgttccatttgaaactcacctcaggccatcagacgttactatttttataaccactagacaacgcaggttgccgcatacttctttatttgtgtagacctcgctcttgccctgtttgaagagcctgagttgcttcccctgcctttcttggccacctcaatagcagaagtactctgcctgactgcatactttggcagactggtacattttgcaaaagtcactcctcaaatggttttctggaaggatacaaaagacatctgcaccatggtaaccacagtggcgagtgttcattgtagtacctgtaagagtttatgaccaaaggcaggagccatgaagaaaaaagactcaatagatttgcttttgatgaaacaacaacacttccatacagtgaacgccataagcacaactgcaagcaaaccgcaaactgaagaacaaatagggcaaaatgtggcagtgcagacatttcagcatatcaagagcacttccaaattacaggaaaaaaaagatatctcaatagataattttgctgaagataagtgaaggcaactcataaggaaaaaatatgtaaaatggccgataggaaagatgtttaacgtcactaattaaaaattatagaataaaacgacaataaaatacca

SEQ ID NO: 103597 - DNA, 690 bp, Homo sapiens
  Payload ID: 325
  Gene Symbol:
  Gene Name: AC109344.1
  ENST ID: ENST00000623296
  CDS Start-End: 1-690
atgtcccctctgatcatgggacttgatgtgaacccagatgcctgcttgacggctctgctggacatctgcaagctcctagaggctgtctgtccctccagccctacctcctctggccatgaaatccccactcagctgctcggcaaggaccttcagtcatccctgtgcccaccctttcccttggcctgggcactcctcctgccaactccacttctgagctttcacccagagggctgtgcaccctcccactcccactgccttgcctgtcatctctccttgcacccagtgcaaacctcctccagtggtctcctggcccatcagcctgtcatgggctggatgcccaaatgcagggccaagctcatgcacctgctgcttatgagcttcagtgtctgcctgatgacctcaggggatccgagctcctcggcacggcagccgaggtcccctacgctggcctcagcatacctgcccagccacggcagacagcatcctcagtcacgagaagtctgtgcttctggaacctggaacatgcagggctttgcagacagagctccatgctacttcctctgcccttctcactccctccaaaatccacactgctcccccgtcaccacctgtgccctcctaattccatcagcacccatcagccactcaccagccatcctaactccatcggccaccttcctaattccttag

SEQ ID NO: 103598 - DNA, 375 bp, Homo sapiens
  Payload ID: 326
  Gene Symbol:
  Gene Name: AC109486.1
  ENST ID: ENST00000624505
  CDS Start-End: 1-375
atgactcttaacgagcatgccgccttcaagcatctgtttaacaaagcacatcttgcaccgcccttaatccatttaaccctgagtggacacagcacatgtttcagagagcacagggttgggggtaaggtcacagatcaacaggatcccaaggcagaagaatttttcttagtacagaacaaaatgaaaagtctcccatgtctacctctttctacacagacacagcaaccatccgatttctcaatcttttccccacctttcccccctttctattccacaaaaccgccattgtcatcatggcccgttctcaatgagctgttgggtacacctcccagatggggtggtggccgggcagaggggctcctcacttcccagtag

SEQ ID NO: 103599 - DNA, 825 bp, Homo sapiens
  Payload ID: 327
  Gene Symbol:
  Gene Name: AC109829.1
  ENST ID: ENST00000447166
  CDS Start-End: 42-825
gaggcagaaaactctggctgagaagagcatggggttgagaaatggcaccaatttgggggatggacgtcccactgccatcagatatcagccttctattattgtttgttttttttatttggcggctttggacactgttttccaggaatcggagctggaagcaggtggcagccaagataaactcagagacttcaaagcagcatagattgaaaaagatccagaaattaacaggtcagagagatcctatcctttactcttcagctcaagatccacagtgggaagaaaacctcaggatggcttgcactgaagctaacctgacatgtgtttcagaactccctgtgggctggacccaggaatatatactctggtcaatggagcggagccttcaacagatcttccgatacctagaaagcgcaagatcaaggcttgtggaacaggatttgcctgaatcacaggatatgatttcttcctctaccacctctgttcttgtggctcagaagactgttctatgctgttgtgactataagaaagcaaaacattctactgaccacagcatctcctttagttcatcatgcaatgactccagtctgtctcatcttcctgtcttttctgaaggaacaacttgggaattccggagccatagtttacctatttcccacaaaaagcaatcctctgtgttcaggaaccaaggcagaaccctgcctctttttcagctctcagagccccagaaatcaaaaatttttcagaatttggcagatctttcacccttacaacctcagagctcttttatcaactctatttctgaacccctaaatatctgcaaacaaa

SEQ ID NO: 103600 - DNA, 375 bp, Homo sapiens
  Payload ID: 328
  Gene Symbol:
  Gene Name: AC109829.2
  ENST ID: ENST00000624185
  CDS Start-End: 1-375
atgactcttaacgagcatgctgccttcaagcatctgtttaacaaagcacatcttgcaccgcccttaatccatttaaccctgagtggacacagcacatgtttcagagagcacagggttggggataaggtcacagatcaacaggatcccaaggcagaagaatttttcttagtacagaacaaaatgaaaagtctcccatgtctacttctatccacacagacccggcaaccatccgatttctcaattttttccccacccttcccgcctttctattccacaaaaccgccattgtcatcgtggcccatccccaatgagccgctgggcacacctcccagacggggtcgtggccgggcagaggggctcctcacttcccagtag

SEQ ID NO: 103601 - DNA, 108 bp, Homo sapiens
  Payload ID: 329
  Gene Symbol:
  Gene Name: AC110602.1
  ENST ID: ENST00000625901
  CDS Start-End: 1-108
ataagggaggcaggttcaagcgattctcccacctcaccctcccgagtagctgggaatattattctgacaccacaggcctgcatgttcgtaaaacagttatatcttagc

SEQ ID NO: 103602 - DNA, 1129 bp, Homo sapiens
  Payload ID: 330
  Gene Symbol:
  Gene Name: AC110615.1
  ENST ID: ENST00000625176
  CDS Start-End: 811-1089
ggcattagaaaccttttattgagacaaggtaaacagtgggctgaaaatattacaggctgaaggaaggctgaggaaaccagtatgaaggcagctcaaatgatgaactaaatatattccaaaggtactatttatacttaaggcagttttaaaagtgaggtcttaaccaaaaagcctttacatggcattcaaaacaaaaacaaaaacaaaaaaaacacgggggggggggggtcacttaaatctcttggattgactaaaagagctaaattatgtacccaaaatctgtacagcaggggcctgttttcagcaggaaagcctatgtacaagtaagaacctcttactcttgtaacattgtcctgttttgttttgtcttataagaatatataactcctatcctcacagagttagtccataaggcctcagtgacctcacagaaatatggagttaacctctactacagaactatttacactgcactgtaaatacacatatgtgtgtccaccctcacagctaagctgtcaatgccttgagtgaaggggttacagctcattcgttttgcatctacagtgacaatgaataggcactcaatacatacttttttttgcatgaatgataaatgaaatgattttacattaccaccactatttacattaacattcctaccattagccgtctccaaaataaaaacacaaaattgctgccacatgttcagcagttttcacaatacagtgtgtctggactttttaatgtaaacaaacatgcttgatttaccaattttcagagcaaggacacaaacttagcattcttctaggaatggaaaacttgccaggaagttacttcattctttttctctttttcaaaagtgcatctcgtagtgccaactgtttttctcggaaggaacgcttattttttgaccggacattctggctataccgcatcatcataaagttcttctgttttttcttctctttatttgtcgaactggaaaatggatttgttttggttttcttcctcacaaattcttttcggtctgtctttccagccattgcagttgctagtcttgtctctttgtcagactttggctttttatgaaggcgttcaatgtcccgaagagaaagtaattcacccctgg

SEQ ID NO: 103603 - DNA, 90 bp, Homo sapiens
  Payload ID: 331
  Gene Symbol:
  Gene Name: AC112719.2
  ENST ID: ENST00000629900
  CDS Start-End: 1-90
tcctcagtcagagtttttaattcagatcctgaacaaccctctaaaataggtgctattgttatctacattttacagaagaggaaacaagct

SEQ ID NO: 103604 - DNA, 468 bp, Homo sapiens
  Payload ID: 332
  Gene Symbol:
  Gene Name: AC118758.1
  ENST ID: ENST00000599370
  CDS Start-End: 1-468
atggcctccggtcggtgggctcctccaggcccagcttgggcctcccagcggcctctgcagacccaagtcgtcctgaagtcggcctctccaggcccagctccggcctcccggcaagcaatctgttttggctcagctcctgcccagctcccgctggcctttggaggccccaaactttctccagccaagctcttcaggcctacctcctgcctcccggtggcctgtacgggcccagctctggcaggagaacagcctctgcaggccccgctcttgcctcccaggggcctctccaggcccagctctcgccccacggtggcctcctggggccaagtccctgcctgcctcccggcagcccgcgagcggcccagctcctccctcacggtggcctgtttaggcccaactcgtgtctctggcaccctgtccagaggcgtgagcccctgcctcacactggcctctctcatgctgagagag

SEQ ID NO: 103605 - DNA, 291 bp, Homo sapiens
  Payload ID: 333
  Gene Symbol:
  Gene Name: AC123512.1
  ENST ID: ENST00000623203
  CDS Start-End: 1-291
atgaatgtctgctgttcaagccacccagtcaatgaaaaagtttggaaaccttcatctagaaagtggtctagcaaagtgtggtccatggatgagtttgatctgcaaactgcttgttattggttcatgacaaggtctaccaattgcattttgagagctcagataagcagagagcaatgcaatttgtcacagaaggatgattatgtatatgcactgtcatgtctatttccatgcctaactcaaaggagacacaaggagaaagtgagctcagcctggataaattggagattgtga

SEQ ID NO: 103606 - DNA, 258 bp, Homo sapiens
  Payload ID: 334
  Gene Symbol:
  Gene Name: AC123512.2
  ENST ID: ENST00000623676
  CDS Start-End: 1-258
atgaatgtctgctgttcaagccacccagtcaatgaaaaagtttggaaaccttcatctagaaagtggtctagcaaagtgtggtccatggatgagtttgatctgcaaactgcttgttattggttcatgacaaggtctaccaattgcattttgagagctcagataagcagagagcaatgcaatttgtcacagaaggatgattatgtatatgcactgtcatgtgtatgtatgtgtatgtatatacgctatttccatgcctaa

SEQ ID NO: 103607 - DNA, 418 bp, Homo sapiens
  Payload ID: 335
  Gene Symbol:
  Gene Name: AC124312.1
  ENST ID: ENST00000623624
  CDS Start-End: 1-417
atggagccgatctacagggtactctccagaaagaaaataagcatcaccaacctcctcacaactgacttccactgctgctacgaaaacaccatgggcactaaaaagtcctcagccatgaaaaaaaatgagccaaagaacaacaaagatgtggccttgggctctcttcccaaccacaaggagctatctacctctggggaacaagggaacccagagccagcactcaaggacaaacctggccacacagaggcgggttaccggctaactcttctgtgccacctgcacattcacccagtcctgcagacattgtgcgtgctacccagcctcacaaagagaagtccttcacacaaggaatctcctctgcacaggagcacctactgccctgtgactccctttgatccaaagtggaccccatcctaag

SEQ ID NO: 103608 - DNA, 96 bp, Homo sapiens
  Payload ID: 336
  Gene Symbol:
  Gene Name: AC126407.1
  ENST ID: ENST00000626930
  CDS Start-End: 1-96
gctcctccagcagctccacggtctgcattggctgaatctggagcagcagattccccggagggctcacagacgggaaggtccggcccagacacaccc

SEQ ID NO: 103609 - DNA, 756 bp, Homo sapiens
  Payload ID: 337
  Gene Symbol:
  Gene Name: AC129492.1
  ENST ID: ENST00000622992
  CDS Start-End: 319-720
ctgaacgcatctggaagagcctccaacacacaggcctcccctcagtgggcacttcccaccaggactccctgaagagtccttagggtcctgctgggccctgccctggccaggaccggcctctcctgtcctcctggtcacttgcacagggcctccaacacctccagagtacgtcggatatcccggacttggcgcgccagcccctgaaccggctgcagagcccgctccagctcctcgcagcgcgccagcagggtgtacatgcccttgatgctcatgtccacggcttcacctaaggagtccacagcatcgcggtaggtctggatgcaacccacgctcagcgccgtcagctcctgcaccgcgccacccagaccgcgaagcagacggtccacccggcctcccagctcccgactcaaccgctccagatcccgcagcacctcggggtcgattgggggaatggccggtgtgggtgtgggtgcaggcgctgggcagggccgcgcaggggcagaaggcgggggtggaggcgcgccgctcagacggatcttgagttgcaggttgttggcgacaaagtgggtaaggtcgccgtggcggctcactgtgccttcgagctccaggggactggagatggtggcgcggcgtccgccgcccgcgccggactcggcactccctgaggacccggcgccaccgcacgcctcgctcagcccgtccaggctgcggctgtcctgaagacggctggagaacgagcggccggctctgctgccc

SEQ ID NO: 103610 - DNA, 2175 bp, Homo sapiens
  Payload ID: 338
  Gene Symbol:
  Gene Name: AC130310.1
  ENST ID: ENST00000614594
  CDS Start-End: 1018-1614
ggcgcatgccactacacccggctaatattttgtatttttagttgagacaggattttaccatgttggccaggctggtctcgatttcctgacctgtgatctgcctgcctcggcctcccaaagtgctgagattacaggcgtgagccactgtgcccagcccttggctactttttatatttttagtacagacagggtttcatcatgtcggccagtctggtcttgaactcctgaccttgtgatacactcacctcggcctcgcaaagtgctgggattacaggcgtgagccaccgtgcctggcccttggctactttttatatttttagtagagatggggtttcaccatgttggccagtctggtctcgaactcctgacctcaggtgatccgccctcctcggcctcccaaagcactgggattacaagcgtgagccactgtgcctggcccaatcatagttattttaaagcccttgtttcctaactccaatatgtggcttatctgtaatctgcttcttctgttagctttccgcatgattattgatcactgtttcctgctgtgtcctgtatctcgtgctttctgtcagaggtatgcctcaaaggaccgtgggggtccatatctagggaccgtggggggtccatatgtcgggaccgtgggggtgtctatatctcgggaccgtgggggtccatatctaaggaccgtgggggtccatatcttgggaccatggggggtctatatgtcaggaccgtgggggtctatatctaaggaccgtggggttctgtatctcaggaccgtgggggtccatatctagggaccgtgggggtccatatctagggaccgtggggggtccatatgtcgggaccgtgggggtgtctatatctcgggaccgtgggggtccatatctaaggactgtgggggtccatatcttggagcccccacaagaaccacaggcccccttggagcacccacaggagccacagccccctttgccacagctggagcaggaacaagctggcacacagcagcacatgggcttgcagcagcagacaggcacacagcagctggagccacatcccccacagccggaaccacagccacccttggatcccccacaagagccacagccccccttggagcccccacaggagccacaaccccccttggatcccccacaagagcacagccccccttgcagcctccacaggagccacagccccccttggagcccccagaagagccacagccccctttgccacagctggagcaggaacaggttggcacacggcagcacacgggcttgcagcagcagacgggcacacagcagctggagccagaacctccacagccagagccacagcccccacagccggagccacagcccccacagccggagccacagcccccacagctggagccacagcctccggagcagccgcaacagcccatggttctggtggattgagggtggagcaggtagaggagcaggtgagagggaggtgcaggtgtggagctccctgagcctggaccctttatatccctgcccagggtcatgtgtgaggctgggcacacatttcctggttcctgtttgtgccatttttagggcccctttttcttgtttcctctagaaatccgccccttggtgtatgggctgctcagtgggctgctgctctcttgctgaatctgtgtccagacttaatggaggcccccaagggtctagcctctccctgttgactccagagtcacactggatttacaaaagcatctattttaggctgggcatggtggctcacacctgtaatctcagcactttgggaggcctaggcaggtggatcacttgaggtgaggggttggagaccagcctggccaaaatggtgaaatctcgtgtctactaaaaacacaaaaattaactgggtgtggtggctcacatctgtaatcccagcactttgggaggccgaggcaggtggatcatttgaggtcaggagttggagaccagcctgcccaacatggcaaaaccccatctctactaaaaatacaaaaattagccaggcatggtggtgcatgcttgtaactccagctacttgggaggctgaggcaggagaatggcttgaacccagaggtgaaggttgcagtgagcagagatcacaccactgcactctagtgtgggcaacagagcgggactctgtctc

SEQ ID NO: 103611 - DNA, 171 bp, Homo sapiens
  Payload ID: 339
  Gene Symbol:
  Gene Name: AC131263.1
  ENST ID: ENST00000628571
  CDS Start-End: 1-171
gacagagtctcactctgttgcccaggctggaatgtagtggtgctatctcagctcactgcagcctctgcctccgctggtctcaaactcctgacctcaggtgatctgcctgcctcggcctcccaaagtgctgggattataggcgtgagccaccacgcccggctaacttgtaag

SEQ ID NO: 103612 - DNA, 1806 bp, Homo sapiens
  Payload ID: 340
  Gene Symbol:
  Gene Name: AC133551.1
  ENST ID: ENST00000616638
  CDS Start-End: 31-339
gagagactacaactcccagtatgcaccgcgatgcgcgcctcaccctgcatctcccagcccgcagccagctggcatcctagaccctctgccctgcgaccaacagccgggagcggaccagacaccagaactcccggaacggttgaagacggttccgctccctgtcccgcctttcgcagcccagcagtttcgccctgcggagaggagccttgctgtttccaaatctctcctgctgaagagacattggagctagggcggctagtttcacctggctgtcacaaatcctctgcaccccaggagcgccgcttggacccccgggctcgctgcgtggtccatatctaggtcgggcctctcacggagactttcccaccagtgtaataaagaggagaaaacgtcacagcggaagggcctgaccctgctgcatccactaaggaaacagctacggggatgggaccctgggagctgctgtggagcctcatccaccgcttctctgaccccacccaggctgcttcccaggcctcagggtcttagtgtggacctccgggccgtgattaatgcaggtcagcaggaccagagcgccccttggtccctcccaacacatgagggtagtttgtgtggtgaggtcagggatagtgtctgcgcttctaccctgaatagggctcccttggaaaatactttaatatctctttttaaatacccccttggaccacttttaatagttttctgatagaactaaacagtgatcattctcttaattcatgtttccattaagtttttcaggttaagtactgcacgactactcgcttctgaaactgatagacactgcctcagctccgtgcagggcagacgcacaagagcagaatctccgtgggacatctctctggagcatcaatattactgcagtatttggaagaaacaaatttaaataagttctaaggtgaagaatggaacatttaagacaagtctggaaagtcatctgcctttaataactgtcgtttgtccttaacgtcagactttctccaagaccaaaactctaagaacttatttccattcttacaaatagtaaaaatgataaatcatatcaagtcaattgaaagtcctgcctgctgctttcctaaattgcaatatggccttggtatggttttatttgtacttttgtgggggattcgtggatctttagattaaaaaaaaaaaaataggtttttgaacaatttttgcaagtttgcagctgttagttattgatttatttttccaacccatctaattcttctgtctctctcctctcctcaggctcaataattccatgggtctctaaggctgtgtttattttctttaaattttgttgatttacttttatactccatttgattttttctatctctcaccttttctcagactcagtcatcccacaggtctgtaaggctctgttcattttctttaaacttcttttttttttcctctcctcagattggataaattatattgctatgtctctgtttctgaactatagaaaagctcaaaattattatttttatttctcattttttatatggctattttttctctgctgatgtttcacatctattcatttatgagaatattttcctttgccctcatgagcgtgtttataatagctgccttcaaattcttgtctgccgtttacatcttggacatcttggagatggctactgcctgctttttatcttgtgtatttattacattttcacgtgtcttcacgcatcccttgaattggaaattgtgccctggagactgtatacaagactggattaaaaagactggattctgttt

SEQ ID NO: 103613 - DNA, 2132 bp, Homo sapiens
  Payload ID: 341
  Gene Symbol:
  Gene Name: AC136352.4
  ENST ID: ENST00000614604
  CDS Start-End: 368-2113
gctttgcctggtgtttcttgcttggattggcgtttcctccctcgcattcctttgctggacttgaccttttctctgctgggtttggcattcccttgactgggctgggtgtttccttgggagggggggcttggcctttcctggggtgggcgtggggtccccctggtgggcgtgggctttccccgggtgggtgtgggttttccctgggtggggtgggctgggctcccttgctgggcttggcaagttttggctgggattgacctttctcttcaaacagattggaaacccagggtttcctgctagttggtgaaactggttggtagacgcgatctgttcgctactaccggcctcccctggctgttaaaagcagatggtggctgaggtttgttcaatgcccgctgcctctgctgtgaagaagccatttgatctcagaagcaagatgggcaagtggtgccaccaccgcttcccctgctgcagggggagcggcaagagcaacatgggcacttctggagaccacgacgactcctttatgaagacgctcaggagcaagatgggcaagtgttgccatcactgcttcccctgctgcagggggagcggcacgagcaatgtgggcacttctggagaccatgacaactcctttatgaagacactcaggagcaagatgggcaagtggtgctgtcactgcttcccctgctgcagggggagcggcaagagcaacgtgggcacttggggagactacgacgacagcgccttcatggagccgaggtaccacgtccgtcgagaagatctggacaagctccacagagctgcctggtggggtaaagtccccagaaaggatctcatcgtcatgctcagggacactgacatgaacaagagggacaagcaaaagaggactgctctacatttggcctctgccaatggaaattcagaagtagtacaactcctgctggacagacgatgtcaacttaacgtccttgacaacaaaaaaaggacagctctgataaaggccgtacaatgccaggaagatgaatgtgtgttaatgttgctggaacatggcgctgatggaaatattcaagatgagtatggaaataccgctctacactatgctatctacaatgaagataaattaatggccaaagcactgctcttatatggtgctgatattgaatcaaaaaacaagtgtggcctcacaccacttttgcttggcgtacatgaacaaaaacaggaagtggtgaaatttttaatcaagaaaaaagctaatttaaatgcacttgatagatatggaagaactgccctcatacttgctgtatgttgtggatcagcaagtatagtcaatcttctacttgagcaaaatgttgatgtatcttctcaagatctatctggacagacggccagagagtatgctgtttctagtcatcatcatgtaatttgtgaattactttctgactataaagaaaaacagatgctaaaaatctcttctgaaaacagcaatccagaacaagacttaaagctgacatcagaggaagagtcacaaaggcttaaagtcagtgaaaatagccagccagagaaaatgtctcaagaaccagaaataaataaggactgtgatagagaggttgaagaagaaataaagaagcatggaagtaatcctgtgggattaccagaaaacctgactaatggtgccagtgctggcaatggtgatgatggattaattccacaaaggaagagcagaaaacctgaaaatcagcaatttcctgacactgagaatgaagagtatcacagtgacgaacaaaatgatacccagaaacaactttctgaagaacagaacactggaatatcacaagatgagattctgactaataaacaaaagcagatagaagtggctgaaaaggaaatgaattctgagctttctcttagtcataagaaagaagaagatctcttgcgtgaaaacagcatgttgcgggaagaaattgccatgctaagactggaactagatgaaacaaaacatcagaaccagctaagggaaaataaaattttggaggaaattgaaagtgtaaaagaaaaacttctaaaggctatacaactgaatgaagaagcattaacgaaaaccagtatttaagtacagtggacagcttagg

SEQ ID NO: 103614 - DNA, 1988 bp, Homo sapiens
  Payload ID: 341
  Gene Symbol:
  Gene Name: AC136352.4
  ENST ID: ENST00000620810
  CDS Start-End: 372-1517
agtagctttgcctggtgtttcttgcttggattggcgtttcctccctcgcattcctttgctggacttgaccttttctctgctgggtttggcattcccttgactgggctgggtgtttccttgggagggggggcttggcctttcctggggtgggcgtggggtccccctggtgggcgtgggctttccccgggtgggtgtgggttttccctgggtggggtgggctgggctcccttgctgggcttggcaagttttggctgggattgacctttctcttcaaacagattggaaacccagggtttcctgctagttggtgaaactggttggtagacgcgatctgttcgctactaccggcctcccctggctgttaaaagcagatggtggctgaggtttgttcaatgcccgctgcctctgctgtgaagaagccatttgatctcagaagcaagatgggcaagtggtgccaccaccgcttcccctgctgcagggggagcggcaagagcaacatgggcacttctggagaccacgacgactcctttatgaagacgctcaggagcaagatgggcaagtgttgccatcactgcttcccctgctgcagggggagcggcacgagcaatgtgggcacttctggagaccatgacaactcctttatgaagacactcaggagcaagatgggcaagtggtgctgtcactgcttcccctgctgcagggggagcggcaagagcaacgtgggcacttggggagactacgacgacagcgccttcatggagccgaggtaccacgtccgtcgagaagatctggacaagctccacagagctgcctggtggggtaaagtccccagaaaggatctcatcgtcatgctcagggacactgacatgaacaagagggacaagcaaaagaggactgctctacatttggcctctgccaatggaaattcagaagtagtacaactcctgctggacagacgatgtcaacttaacgtccttgacaacaaaaaaaggacagctctgataaaggccgtacaatgccaggaagatgaatgtgtgttaatgttgctggaacatggcgctgatggaaatattcaagatgagtatggaaataccgctctacactatgctatctacaatgaagataaattaatggccaaagcactgctcttatatggtgctgatattgaatcaaaaaacaagtgtggcctcacaccacttttgcttggcgtacatgaacaaaaacaggaagtggtgaaatttttaatcaagaaaaaagctaatttaaatgcacttgatagatatggaagaactgccctcatacttgctgtatgttgtggatcagcaagtatagtcaatcttctacttgagcaaaatgttgatgtatcttctcaagatctatctggacagacggccagagagtatgctgtttctagtcatcatcatgtaatttgtgaattactttctgactataaagaaaaacagatgctaaaaatctcttctgaaaacagcaatccaggtaaagaagcagaagaataatttttggcaggaggaacatgcaacaagtttgtgtgtttgccagaagaacatctgatgagattgcctgtttggcaggaagagcaacaactgcaaaagacaagatgccgagtgaactttgcagggtttctgagcagttcacttttgctagtaccaaaagtgtgagacaccagagtttgggaatgaggtgaatacttagctaagtgtgaaagccaccatgattatatgtaagcaaacaggcatgactgagctcctataaaactttatttacaaagccaaaaggcagattggatttgtcctgtggcctatagtttgctgggattgatggaagataaccatgtaaagaaaccaggagacaaaggaagcttttgcagtagtcagctatagtttccatgtcacacatccttggactagtatcaatgtattctaaggttttcacctgcccatggtgaaataaagtttggaatctccgtt

SEQ ID NO: 103615 - DNA, 600 bp, Homo sapiens
  Payload ID: 342
  Gene Symbol:
  Gene Name: AC136352.5
  ENST ID: ENST00000621137
  CDS Start-End: 1-600
atggcgctcctgctgcgcttcgtgctcctgtgcagagtcgcggatttcatcagaggttggagtatcactactcctgagcagatgattgaaaaagccaaaggggaaactgcctatctgccatgcaaatttacgcttagtcctgaagaccagggaccactggacatcgagtggctgatatcaccagctgataatcagaaggtggatcaagtgattattttatattctggagacaaaatttatgatgactactatccagatctgaaaggccgagtacattttaagagtaatgatctcaaatctggtgatgcatcaataaatgtaacgaattttcagctgtcagatattggcacagatcagtgcaaagtgaaaagagctcctggtgttgcaaataggaagattcagctggtagttcttgggaagatgtgccgcctccaaagagccgcacgtccactgccagaagctacagcagtaatcattcatccctgggatccatatctccttccaacatggaaggatattccaagactcagtataaacaagtaccaagtgaagactttgaacgcactcctcagagtccgactctcccacctgctaaggtag

SEQ ID NO: 103616 - DNA, 1426 bp, Homo sapiens
  Payload ID: 343
  Gene Symbol:
  Gene Name: AC136612.1
  ENST ID: ENST00000621028
  CDS Start-End: 32-406
ggagagactacaactcccagtatgcaccgcgatgcgcgcctcaccctgcatctcccagcccgcagccagctggcatcctagaccctctgccctgcgaccaacagccgggagcggaccagacaccagaactcccggaacggttgaagacggttccgctccctgtcccgcctttcgcagcccagcagtttcgccctgcggagaggagccttgctgtttccaaatctctcctgctgaagagacattggagctagggcggctagtttcacctggtaattgtgacaccctgtctcctcgagctgcaggcttttatgcttgtcatgttcgaagtttgataccttgcagatcaacaaagggtcggtggcctctcactgcctccgccgcagggttgtcaagtttttcaggttaagtactgcacgactactcgcttctgaaactgatagacactgcctcagctccgtgcagggcagacgcacaagagcagaatctccgtgggacatctctctggagcatcaatattactgcagtatttggaagaaacaaatttaaataagttctaaggtgaagaatggaacatttaagacaagtctggaaagtcatctgcctttaataactgtcgtttgtccttaacgtcagactttctccaagaccaaaactctaagaacttatttccattcttacaaatagtaaaaatgataaatcatatcaagtcaattgaaagtcctgcctgctgctttcctaaatcacaatatggccttggtatggttttatttgtacttttgtgggggattcgtggatctttagattaaaaaaaaaaaataggtttttgaacaatttttgcaagtttgcagctgttagttattgatttatttttgcaacccatctaattcttctgtctctctcctctcctcaggctcaataattccatgggtctctaaggctgtgtttattttctttaaattttgttgatttacttttatactccatttgattttttctatctctcaccttttctcagactcagtcatcccacaggtctgtaaggctctgttcattttctttaaacttttttttttcctctcctcagattggataaattatattgctatgtctctgtttctgaactatagaaaagctcaaaattactatttttatttctcattttttatatggctattttttctctgctgatgtttcacatctattcatttatgagaatattttcctttgccctcatgagcgtgtttataatagctgccttcaaattcttgtctgccgtttacatcttggacatcttggagatggctactgcctgctttttatcttgtgtatttattacattttcacgtgtcttcacgcatctcttgaattggaaattgtgccctggagactgtatacaagactggattaaaaagactggattctgttt

SEQ ID NO: 103617 - DNA, 3571 bp, Homo sapiens
  Payload ID: 344
  Gene Symbol:
  Gene Name: AC136616.1
  ENST ID: ENST00000613216
  CDS Start-End: 279-2183
gccgggccccgccgacgcccgcgcgcccccgggcccctgacacacaggagattcttcaggctcactttcaagtgcttcgtggactgcttctgactgcgccgcctgtgacccgcaccccgccgccctcccgccgccccgtcccccggcccggccgccccccggcccccggccggcccgcgccctcggggccctccccggtgccgccggtgccccgcgcctgaccgcagccccccgcagggtgccgcgaccccagcccggccgtgaggcccgcaggggccatggcgaagaagagcgccgagaacggcatctgtagcgtgtccggcgaccagaagaagggccccctcatcgcgcccgggcctgacggggcccgggccaagggcgacggccccgcgggcctggggacacccggcggtggcctggccgtgccggcgcgcgcgacctggacgcgccagatggacttcatcatgtcgtgtgtgggcttcgccgtggatctgggcaacgtgtggcgcttcccctacctgtgctacaagaatggcggaggtgtgttccttattccctgcatcctgatagccctggtcggaggaatccccattttcttcttggagatctcgctgggccagttcatgaaggccggcagcatcaatgtctggaacatctgtcccttgttcaaaggcctgggctatgcctccatggtgatcgtcttctactgcaacacctactacatcatggtgctggcctggggcttctattacctggtcaagtcctttaccaccacgctgccctgggccacatgtggccacacctggaacactcccgactgtgtggagatcttccgccatgaagactgtgccagtgccagcctggccaacctcacttgtgaccagcttgctgaccgccggtcccctgtcatcgagttctgggagaacaaagtcttgaggctgtctgggggactggaggtgccaggggccctcaactgggaggtgaccctttgtctgctggcctgctgggtgctggtctacttctgtgtcaagggggtcaaatccatgggaaagatcgtgtacttcactgctacattcccctacgtggtcctggtcgtgctgcttgtgcttggagtgctgctgcctggcaccctggacagcatcatttactatctcaagcctgactggtcaaagctggggtcccctcaggtatggatagatgtggggacccagattttcttttcttatgccattggcctgggggccctcacagccctgggcagctacaaccgcttcaacaacaactgctacaaggacgccatcatcctggctgtcatcaacagtgggaccagcttctttgctggcttcgtggtcttctccatcctgggcttcatggctgcagagcagggcatgcacatctccaaggtggcagagtcagggccgggcctggccttcatcgcctacccacaggctgtcacactgatgccagtggccccactctgggctgccctgttcttcttcatgctgttgctgcttggtctcgacagccagtttgtaggtgtggagggcttcatcaccggcctcctcaacctcctcccagcctcctactacttctgtttccaaagggagatctctgtggccctctgttgtgccctccgctttgtcattgatctctccatggtgactgatggtgggatgtatgtcttccagctgtttgactactactcagccagcggcaccaccctgctctggcaggccttttgggagtgcgtggtggtggcctgggtgtatggagctgaccgcttcacggacgacattgcctgtatgatcgggtaccgaccttgcccctggatgaaatggtgctggtccttcttcaccccgctggtttgcatgggcatcttcatcttcaacgttgtgtactacgagccgctggtctacaacaacaccaacgtgtacccgtggtggggtgaggccatgggctgggccttcgtgctgtcctccatgctgtgcatgccactgcacctcctgggctgcctcctcagggccaagggcaccatggctgagtgctggaagcacctgacccagaccatctggggcctccaccacttggagtaccgagctcaggatgcagatgtcaggggcctgaccaccctgaccccagtgtccgagagcagcaaggtcgtcgtggtggagagtgtcatgggacagctcagctcacatcaccagctcacctctggtagccatagcagcccctgcttcatccccaccccacccctccagggggcctgcctttccctgacgcttttggggtctgcctgggagaggaggggagaaagcaccatgagtgctcactaaaacaactttttccatttttaataaaacgccaaaaatatcacaacccaccaaaaatagatgcctctccccctccagtcctagcccagctggtcctaggccccgcctagtgccccacccccacccacagtgctgcactcctcctgcccctgccacgcccaccccctgcccacctctccaggctctgctctgtagcacacccttgggtgacccctcaccccagaagcagcagtggcagcttgggaaatgtgaggaagggaaggagggagagacgggagggaggagagagaggagaagggaggcaagggaggggcagcagaaccaagacaaatatttcagctgggctatacccctctccccatccctgttatagaagcttagagagccagccagcagtggaaccttctggttcctgcgccaatcaccaccaatatcaattgtgtgagcttgggtgcgagtgcacgcgtgcgtgagcacgtagagtatatatagatctctatctcttagcaaaggtgaataccagatgtaaatggtgcctctaggcaaaggaggcttgtattttgcacattttataaaaacttgagagaatgagatttctgcttgtatatttctaaaaagaggaaggagcccaaaccatcctctccttaccactcccattcctgtgagccctaccttacccctctgcccctagcctaggagtgtgaatttatagatctaactttcagaggcaaaacaaaagcttcgagctgttgcatgtgcgagtctgttgtgtggatgtgtgtgtgtggtccccagacccagaatggattggaaaagtgcatggtgggggcctcggggctgtccccacactgtccctttgcccacaggtctgtggggcaagaggctgcaatattccatcctgggtgtctgggctgctaacctggcctgctcaggcttcccaccctgtgccctgggctgggcacacccccgggaagggaccccggacacggctcccacatccaggctcaaggcggatgcacttcctgcacctccagtcttctgtgtagcggctttaacccacgtatgtctgtcacgtccagtcccgagacggctgagtgaccccaagaaaggcttccctgacacccggacagaggctggagggctggggctgcgtgagggtggtgggcctgcggggacattcttactgtgctaaaaagccactgcaaacatagcaataaaaacctgtcattttccaaagcagg

SEQ ID NO: 103618 - DNA, 3120 bp, Homo sapiens
  Payload ID: 344
  Gene Symbol:
  Gene Name: AC136616.1
  ENST ID: ENST00000611339
  CDS Start-End: 173-1732
gaagtgacccagtgatgggtgggaaacagaggtccagagcaaaggcctttgcccaaagttaggagaaggatgctgggacctggagtcaggtgtgttccttattccctgcatcctgatagccctggtcggaggaatccccattttcttcttggagatctcgctgggccagttcatgaaggccggcagcatcaatgtctggaacatctgtcccttgttcaaaggcctgggctatgcctccatggtgatcgtcttctactgcaacacctactacatcatggtgctggcctggggcttctattacctggtcaagtcctttaccaccacgctgccctgggccacatgtggccacacctggaacactcccgactgtgtggagatcttccgccatgaagactgtgccagtgccagcctggccaacctcacttgtgaccagcttgctgaccgccggtcccctgtcatcgagttctgggagaacaaagtcttgaggctgtctgggggactggaggtgccaggggccctcaactgggaggtgaccctttgtctgctggcctgctgggtgctggtctacttctgtgtcaagggggtcaaatccatgggaaagatcgtgtacttcactgctacattcccctacgtggtcctggtcgtgctgcttgtgcttggagtgctgctgcctggcaccctggacagcatcatttactatctcaagcctgactggtcaaagctggggtcccctcaggtatggatagatgtggggacccagattttcttttcttatgccattggcctgggggccctcacagccctgggcagctacaaccgcttcaacaacaactgctacaaggacgccatcatcctggctgtcatcaacagtgggaccagcttctttgctggcttcgtggtcttctccatcctgggcttcatggctgcagagcagggcatgcacatctccaaggtggcagagtcagggccgggcctggccttcatcgcctacccacaggctgtcacactgatgccagtggccccactctgggctgccctgttcttcttcatgctgttgctgcttggtctcgacagccagtttgtaggtgtggagggcttcatcaccggcctcctcaacctcctcccagcctcctactacttctgtttccaaagggagatctctgtggccctctgttgtgccctccgctttgtcattgatctctccatggtgactgatggtgggatgtatgtcttccagctgtttgactactactcagccagcggcaccaccctgctctggcaggccttttgggagtgcgtggtggtggcctgggtgtatggagctgaccgcttcacggacgacattgcctgtatgatcgggtaccgaccttgcccctggatgaaatggtgctggtccttcttcaccccgctggtttgcatgggcatcttcatcttcaacgttgtgtactacgagccgctggtctacaacaacaccaacgtgtacccgtggtggggtgaggccatgggctgggccttcgtgctgtcctccatgctgtgcatgccactgcacctcctgggctgcctcctcagggccaagggcaccatggctgagtgctggaagcacctgacccagaccatctggggcctccaccacttggagtaccgagctcaggatgcagatgtcaggggcctgaccaccctgaccccagtgtccgagagcagcaaggtcgtcgtggtggagagtgtcatgggacagctcagctcacatcaccagctcacctctggtagccatagcagcccctgcttcatccccaccccacccctccagggggcctgcctttccctgacgcttttggggtctgcctgggagaggaggggagaaagcaccatgagtgctcactaaaacaactttttccatttttaataaaacgccaaaaatatcacaacccaccaaaaatagatgcctctccccctccagtcctagcccagctggtcctaggccccgcctagtgccccacccccacccacagtgctgcactcctcctgcccctgccacgcccaccccctgcccacctctccaggctctgctctgtagcacacccttgggtgacccctcaccccagaagcagcagtggcagcttgggaaatgtgaggaagggaaggagggagagacgggagggaggagagagaggagaagggaggcaagggaggggcagcagaaccaagacaaatatttcagctgggctatacccctctccccatccctgttatagaagcttagagagccagccagcagtggaaccttctggttcctgcgccaatcaccaccaatatcaattgtgtgagcttgggtgcgagtgcacgcgtgcgtgagcacgtagagtatatatagatctctatctcttagcaaaggtgaataccagatgtaaatggtgcctctaggcaaaggaggcttgtattttgcacattttataaaaacttgagagaatgagatttctgcttgtatatttctaaaaagaggaaggagcccaaaccatcctctccttaccactcccattcctgtgagccctaccttacccctctgcccctagcctaggagtgtgaatttatagatctaactttcagaggcaaaacaaaagcttcgagctgttgcatgtgcgagtctgttgtgtggatgtgtgtgtgtggtccccagacccagaatggattggaaaagtgcatggtgggggcctcggggctgtccccacactgtccctttgcccacaggtctgtggggcaagaggctgcaatattccatcctgggtgtctgggctgctaacctggcctgctcaggcttcccaccctgtgccctgggctgggcacacccccgggaagggaccccggacacggctcccacatccaggctcaaggcggatgcacttcctgcacctccagtcttctgtgtagcggctttaacccacgtatgtctgtcacgtccagtcccgagacggctgagtgaccccaagaaaggcttccctgacacccggacagaggctggagggctggggctgcgtgagggtggtgggcctgcggggacattcttactgtgctaaaaagccactgcaaacatagcaataaaaacctgtcattttccaaagcagg

SEQ ID NO: 103619 - DNA, 336 bp, Homo sapiens
  Payload ID: 345
  Gene Symbol:
  Gene Name: AC136616.2
  ENST ID: ENST00000612243
  CDS Start-End: 1-336
gctattttaaaaggtgtccagtgtgaggtgcagctggtggagtctgcgggaggcttggtacagcctggggggtcccttagactctcctgtgcagcctctggattcacttgcagtaacgcctggatgagctgggtccgccaggctccagggaaggggctggagtgggttggccgtattaaaagcaaagctaatggtgggacaacagactacgctgcacctgtgaaaggcagattcaccatctcaagagttgattcaaaaaacacgctgtatctgcaaatgaacagcctgaaaaccgaggacacggccgtgtattactgtaccacagggggaggggtc

SEQ ID NO: 103620 - DNA, 225 bp, Homo sapiens
  Payload ID: 345
  Gene Symbol:
  Gene Name: AC136616.2
  ENST ID: ENST00000614110
  CDS Start-End: 1-225
gcctctggattcacttgcagtaacgcctggatgagctgggtccgccaggctccagggaaggggctggagtgggttggccgtattaaaagtactggtggtggcacatactatgcagactccgtgaagggccgattcaccatctccagagacaatgccaagaactccttgtatcttcaaatgaacagcctgagagccgaggacatggctgtgtattactgtgcaaga

SEQ ID NO: 103621 - DNA, 285 bp, Homo sapiens
  Payload ID: 346
  Gene Symbol:
  Gene Name: AC136616.3
  ENST ID: ENST00000619130
  CDS Start-End: 1-285
caggttcagctgttgcagcctggggctgaggtgaagaagcctgggtcctcagtgaaggtctcctgccaggcctctggatacaccttcaccagctacgatattcactgtgtgcgacaggcccctggagggtttgaaaggatgggagggatctactctggcaatggtaagacaggctatgcacagaagtttcagggcagagtcaccatgaccagggacatgtccacgagcacagcctacatggagctgagcagtcagagatctgaggacatagatgtgtactactgt

SEQ ID NO: 103622 - DNA, 72 bp, Homo sapiens
  Payload ID: 347
  Gene Symbol:
  Gene Name: AC138028.1
  ENST ID: ENST00000625951
  CDS Start-End: 1-72
ctgactccagtgggggaagccttcggagactgcagcccatccattccgcccccgtggccccgccccactcgc

SEQ ID NO: 103623 - DNA, 462 bp, Homo sapiens
  Payload ID: 348
  Gene Symbol:
  Gene Name: AC138969.4
  ENST ID: ENST00000331436
  CDS Start-End: 1-462
atggcggcagtggagcatcgtcattcttcaggattgccctactggccctacctcacagctgaaactttaaaaaacaggatgggccaccagccacctcctccaactcaacaacattctataattgataactccctgagcctcaagacaccttccgagtgtgtgctctatccccttccaccctcagcggatgataatctcaagacacctcccgagtgtctgctcactccccttccaccctcagctctaccctcagcggatgataatctcaagacacctgccgagtgcctgctctatccccttccaccctcagcggatgataatctcaagacacctcccgagtgtctgctcactccccttccaccctcagctccaccctcagcggatgataatctcaagacacctcctgagtgtgtctgctcactccccttccaccctcagcggatgataatctcaagaaactaa

SEQ ID NO: 103624 - DNA, 1552 bp, Homo sapiens
  Payload ID: 348
  Gene Symbol:
  Gene Name: AC138969.4
  ENST ID: ENST00000381497
  CDS Start-End: 412-1521
acccgctgagcgtcgacacagtcgctgttggcctggtgtccagcgtggttgtctatcccgtctacctggccatcctctttctcttccggatgtcccggagcaaggtggctgggagcccgagccccacacctgccgggcagcaggtgctggacgtcgacagctgcctggactcatccgtgctggacagctccttcctcacgttctcaggcctccacgctgaggtgagggctctactgggggtcctgccgccttggcgcagcttggactcaagaccctgtgcacctctcagcaggcctttgctggacagatgaagagtgacttgtttctggatgattctaagaggttgatggacggatggctacatggatgtgatggagatggtttactatcgggaccttccgcatcctgctgatgttttgttgcttaggatatgaatggctgagcggaggctgtaaaacctggcactctgcttgggttatcaatactctggctgaccatcgtcatcgtgggactgactttggtggaagtccttggttacttatcattactgtgtttctgagaagttataaatttgccatctccctctgcacaagttacctttgtgtgtctttcctgaagactatcttcccgtctcaaaatggacatgatggatccacggatgtacagcagagagccaggaggtccaactgccgtagacaggaaggaattaaaattgtcctggaagacatctttactttatggagacaggtggaaaccaaagttcgagctaaaatccgtaagatgaaggtgacaacaaaagtcaaccgtcatgacaaaatcaatggaaagaggaagaccgccaaagaacatctgaggaaactaagcatgaaagaacgtgagcacggagaaaaggagaggcaggtgtcagaggcagaggaaaatgggaaattggatatgaaagaaatacacacctacatggaaatgtttcaacgtgcgcaagcgttgcggcggcgggcagaggactactacagatgcaaaatcaccccttctgcaagaaagcctctttgcaaccgggtcagaatggcggcagtggagcatcgtcattcttcaggattgccctactggccctacctcacagctgaaactttaaaaaacaggatgggccaccagccacctcctccaactcaacaacattctataattgataactccctgagcctcaagacaccttccgagtgtgtgctctatccccttccaccctcagcggatgataatctcaagacacctcccgagtgtctgctcactccccttccaccctcagctctaccctcagcggatgataatctcaagacacctgccgagtgcctgctctatccccttccaccctcagcggatgataatctcaagacacctcccgagtgtctgctcactccccttccaccctcagctccaccctcagcggatgataatctcaagacacctcctgagtgtgtctgctcactccccttccaccctcagcggatgataatctcaagaaactaaggaagaataaataaataatataaaaataaaa

SEQ ID NO: 103625 - DNA, 1141 bp, Homo sapiens
  Payload ID: 348
  Gene Symbol:
  Gene Name: AC138969.4
  ENST ID: ENST00000524823
  CDS Start-End: 1-812
atcgtcatcgtgggactgactttggtggaagtccttggttacttatcattactgtgtttctgagaagttataaatttgccatctccctctgcacaagttacctttgtgtgtctttcctgaagactatcttcccgtctcaaaatggacatgatggatccacggatgtacagcagagagccaggaggtccaactgccgtagacaggaaggaattaaaattgtcctggaagacatctttactttatggagacaggtggaaaccaaagttcgagctaaaatccgtaagatgaaggtgacaacaaaagtcaaccgtcatgacaaaatcaatggaaagaggaagaccgccaaagaacatctgaggaaactaagcatgaaagaacgtgagcacggagaaaaggagaggcaggtgtcagaggcagaggaaaatgggaaattggatatgaaagaaatacacacctacatggaaatgtttcaacgtgcgcaagcgttgcggcggcgggcagaggactactacagatgcaaaatcaccccttctgcaagaaagcctctttgcaaccgggtaagtttgcttgttttccttgcttttggacatagtctgccaggtcaggacatggatacatttttctccctacggctctgtgctcaagccctgcagagggagatggcagagaggaaggctgcctacaagcatcacagtcccatccctgttggtaactgtgttgcgcaaaaacaccttcatccccacccagtggggcccccatctaatattctaagtatcagaggttccgtatttgtaatagcaaatgggccctgactgtaaattagtgaagagtgaatgtaacttattacccacagggacaattccaaatgagggccttaaatgatgctcagctaagctggttcttgtgtggcctctgtaccttcaaaagctgccgagtcctatgattacacgcgatgggacttgtacacttgaagtgaaacacagttttaaaacttgctttgtttagaattcccacctcatttttccatggacaaaagtattctttatgtcctagtgcacttacaatttggtattacctgggagtgaaaagaaatattacagccatgcctaactgacttcttgaggtaagattgttctgtcag

SEQ ID NO: 103626 - DNA, 470 bp, Homo sapiens
  Payload ID: 348
  Gene Symbol:
  Gene Name: AC138969.4
  ENST ID: ENST00000527703
  CDS Start-End: 1-345
gctaaaatccgtaagatgaaggtgacaacaaaagtcaaccgtcatgacaaaatcaatggaaagaggaagaccgccaaagaacatctgaggaaactaagcatgaaagaacgtgagcacggagaaaaggagaggcaggtgtcagaggcagaggaaaatgggaaattggatatgaaagaaatacacacctacatggaaatgtttcaacgtgcgcaagcgttgcggcggcgggcagaggactactacagatgcaaaatcaccccttctgcaagaaagcctctttgcaaccggtgcacttacaatttggtattacctgggagtgaaaagaaatattacagccatgcctaactgacttcttgaggtcagaatggcggcagtggagcatcgtcattcttcaggattgccctactggccctacctcacagctgaaactttaaaaaacaggatgggccaccagccacctcctccaactc

SEQ ID NO: 103627 - DNA, 699 bp, Homo sapiens
  Payload ID: 348
  Gene Symbol:
  Gene Name: AC138969.4
  ENST ID: ENST00000541593
  CDS Start-End: 1-699
atgttttgttgcttaggatatgaatggctgagcggaggctgtaaaacctggcactctgcttgggttatcaatactctggctgaccatcgtcatcgtgggactgactttggtggaagtccttggttacttatcattactgtgtttctgagaagttataaatttgccatctccctctgcacaagttacctttgtgtgtctttcctgaagactatcttcccgtctcaaaatggacatgatggatccacggatgtacagcagagagccaggaggtccaactgccgtagacaggaaggaattaaaattgtcctggaagacatctttactttatggagacaggtggaaaccaaagttcgagctaaaatccgtaagatgaaggtgacaacaaaagtcaaccgtcatgacaaaatcaatggaaagaggaagaccgccaaagaacatctgaggaaactaagcatgaaagaacgtgagcacggagaaaaggagaggcaggtgtcagaggcagaggaaaatgggaaattggatatgaaagaaatacacacctacatggaaatgtttcaacgtgcgcaagcgttgcggcggcgggcagaggactactacagatgcaaaatcaccccttctgcaagaaagcctctttgcaaccggtgcacttacaatttggtattacctgggagtgaaaagaaatattacagccatgcctaa

SEQ ID NO: 103628 - DNA, 288 bp, Homo sapiens
  Payload ID: 349
  Gene Symbol:
  Gene Name: AC141272.1
  ENST ID: ENST00000611746
  CDS Start-End: 1-288
gaggtgcagctggtggagtctggaggaggcttggtacagcctggggggtccctgagactctcctgtgcagcctctggattcaccttcagtaaccactacacgagctgggttcgccaggctccagggaagggactggagtgggtttcatacattagtggtaatagtggttacacaaactacgcagactctgtgaagggccgattcaccatctccagggacaacgccaagaactcactgtatctgcaaatgaacagcctgagagccgaggacacggctgtgtattactgt

SEQ ID NO: 103629 - DNA, 75 bp, Homo sapiens
  Payload ID: 350
  Gene Symbol:
  Gene Name: AC142525.1
  ENST ID: ENST00000625748
  CDS Start-End: 1-75
cagaggagtcctcgctgggaagacagttatccatcagcctgggaaggctttaaggaaaaccagacaggctccctt

SEQ ID NO: 103630 - DNA, 1599 bp, Homo sapiens
  Payload ID: 351
  Gene Symbol:
  Gene Name: AC145212.2
  ENST ID: ENST00000400754
  CDS Start-End: 73-462
ccggaagtgcggatcccagcggcggtcgtgtagctgagcagccctggggcttggttctatgtccctgtggctatgtttccagtgtcctctgggtgtttccaagagcaacaagaaacgaataaatctctgccccgcagcgcctccaccccagagacccggaccaagttcacacaggacaatctgtgccacgcccagcgcgagcgcctggactcggccaacctgtgggtgctggtggactgcatccttcgcgacacctccgaggacctgggactccagtgtgacgccgtgaacctggccttcgggcgccgctgtgaggaactggaggacgcgcggcacaagctgcagcaccacctgcacaagatgctgcgggaaatcacagatcaggaacacaacgtggtggcactgaaggaggccatcaaggacaaggaggaacctctgcacatagcccagacccggctgtagctgctctcacaccggcccaacatgcagctgtgccgcgatgcagcccagttcaggtactgcctgggcctctgaggcagtcccaggtgcccccgtccacctcctcgctgcgaccctctccaataaacactccaatctccacacacacatcccccacaggtgctgagaggggagggagactctgcggccacacacaacatgcaagcacgccttaaacacacagatatagacatgacactgggcaggtcatgggtcgggggcctccccgtgccagggacctgtgcccacgtggtctcaccccaccctgtgctacctcatcttcccgggaggaagctccttcagacaaggtgagctcctggaggccacggggccagagaggccagagagggccattccctgctgccctgagggtgctgtccccacctctggtggaaagtatgacctacgcctgggctacaggcatagatgggccgtccttttgtttcccttgttaacggatgcctggtggccccttctgagcctaagtacctttcttccttccctgcccctcagttccttcaaggaactgggtgcctccttccgtcaaatatcaggaatggaaagaactgagcctggtcggctgaggccagtcctgtcctgtcagggtcgagattgcacgcgggtcactcattcccactcaggtccgcgctccctgggaggaccctcgtaatttatgctctgccctagagccgctttcctggtaggatcctttcatggcgtcttcccaggacctcctgccagctcccattgggagttttgggtcccctccaccccagtaggtgcatacttctgccctccccagccccagctcacaccccccaacacccccaagctggtgagtgaggtggaggagctgtacaagtccatcacagcgctgcgggagaagcttctacaagcggagcagtccctgcgcaacctcaaggacatccacatgagcctggagaaggacgtcaccgccatgaccaacagtgtcttcatcgaccgccagaagtgcatggcccatcgtacttgctaccccaccattctgcagctggctggctaccagtgagcagcggcacggtgcttccccccaatcccccaaataaacagtgcgttagcttt

SEQ ID NO: 103631 - DNA, 2886 bp, Homo sapiens
  Payload ID: 352
  Gene Symbol:
  Gene Name: AC156455.2
  ENST ID: ENST00000628671
  CDS Start-End: 473-604
ccagcctggacgacagagcagactccatctcaaaaaaaaaaaaaatggtcaccccttttgctcctaaatcaccctcaaagtaaaagagaacaagaaacagaagcagaaatccatatttagtgaaataagacaacacctgtagctccaaacctgtagaagcagatcccagagaaaagcaggccagttctctcctggaatcccagaaagtcccaggaattggaggcttcagtgctgcagtagggaggggactaaaaacaaagtctgtatatggagcagtaagacctccgggttctcatcccccatcctgtgtgctctcgggtgactagccctctccctctccaggtttagcttctggagaaattaaatcaaagaggctctagaactggggatggcaggcattgagtgcagggagtgagttgccagaggctgagagcagagagatttagtggcagtgggcagagcaaacagcaaaatgactgccctcttccctggccttgctccagaaactgagcagccagacatacacactcccagaaggcagttggaggtccccccgggcaatcagaaccacccacagagaagacctccagatactgacatttagaagcctctgaccaaagagctgcctggccacccactggcttactcgctgacaggccatgctcctgccgtacacaccgatcctatcagtcatcctcatgggctcctttccagacttctgaggaaagcttccaacatgaagagggagttcaaaacaaacagagagagagagagagagagagagaaaagaaatataaacaatgcagggagcaaaagataacttcaaataaactcaaaatattcttctgggagagatgagacaatattgcatacataaaacaagaagaggatgctatcactaaattttaaaaaaaagtaacagaaagtaagaaagacctctaagaaatgtttctgaaatgaggtataatttttttttttttgagagggagtcttactctgtcacccaggctggagcgcagtggcgtgatctcagctcactgcaacctccgtctcccaggttcaagtgattctcctgcctcagcttcctgagtagctgggattacaggcatgcgccaccatgcctggctaattttgcatttttagtagagacggggtttcaccatgttggccaggctggtctgaaactcccgacctcaggtgatctgcccacctcagcctcccaaagtgctgggattacaggcatgagctaccgtgcctggcctgtgtatttttggagacagagtcttgctctgttgcccaggctggagggcagtggtgcaaactctgcctcccgggttcaagcgattctcgtgcgtcacctcccaagtagctggggctagaggcatgtgccaccatgtctggttactttttatataaaccttcagtttaatcttttagcttactgctgtgtttttcagctttattcactttgctttttttctatattttcgtttcaactcaacttttaaaaaatcatacttgtatatttgtatatttatatttattttccaagacctcatttgcctctttttcataatgggctattattgctccatggtacagaatcttctgttctttcctaaactattagttatttttaaaatatttgttaactttctcccccttgctagttctcaggtacccgctttctcccagagtgctggctttccttaattatttgctgacttgtgctggtgtgtaacccttcatacttaggtatttctatttgtctgactgctgatttgattccaatccagtgtttcttctgattcgtggagaagagacgacaacgctgtgaggctctggttttggtggcttgtctgggtgtgggagctccttgtcatcatgggatttttagctccctgggtcgccatcctacatggccactctcctgccgatgctgcccgctactcagcaggaggggaagtcgagaccacctccttaaccttacagacattgattgtgagcttggagcaccttccgtgactggaccacccatgcagtggtcctttgctttttgcatttttaactgcaattttccccaagagtcttccctaatacagtctcttaggaattgacggtgggattaaacaaggcatgtttctgcactgaatatggtctatgggttgccactttgcaacctcagctttaaggcttatttcctcccaggaaactgatgttaactttttaagttaaaaatgtgtatataagtaatacatgtttattttggaaattagaaaatacaggccaggtgtggtggctcatgcctgtaatcccagcattttgggaggttgaggcaggaggattgcctgagcccaggagtttgagaccagcctgggcaacatagggaaattccatctctacaaaaaaattaaacattagctgggtgtggtggtgcccacctgtggtcacagctactcgggagactgaggtgggaggatagcttgggcaggggaggttgaggctacagtgagccacgatcacaccaatgtgacacagtgagaccctgtctcaaaaaaaaaaaaaaagaaagaaaatataggtaaacacaaagacaaaaaagcagggcatggtggctcacacctgtaattctagcaccttgggaggctgaggcaggaggatcacttgaggtcaggaactcgagacgagaccaggctgggcagcatggcgagaccccatctctataaaaagtacaaaaattagcagggcacggtggtgtgcacctgtggtcctgctacttgggaagttgaggtgggaggatcacctgagccctggaggttgagggtgctgtgagccatgatggcaccactccactccagtccaggtgaaagagccagatcctgtctc

SEQ ID NO: 103632 - DNA, 1343 bp, Homo sapiens
  Payload ID: 353
  Gene Symbol:
  Gene Name: AC171558.1
  ENST ID: ENST00000622674
  CDS Start-End: 1-951
atgaagatagcaaacaacacagtagtgacagaatttatcctccttggtctgactcagtctcaagatattcagctcttggtctttgtgctgatcttaattttctaccttatcatcctccctggaaattttctcattattttcaccataaggtcagaccctgggctcacagcccccctctatttctttctgggcaacttggccttcctggatgcatcctactccttcattgtggctcccaggatgttggtggacttcttctctgagaagaaggtaatctcctacagaggctgcatcactcagctctttttcttgcacttccttggaggaggggagggattactccttgttgtgatggcctttgaccgctacatcgccatctgccggcctctgcactgttcaactgtcatgaaccctagagcctgctatgcaatgatgttggctctgtggcttgggggttttgtccactccattatccaggtggtcctcatcctccgcttgcctttttgtggcccaaaccagctggacaacttcttctgtgatgtccgacaggtcatcaagctggcttgcaccgacatgtttgtggtggagcttctgatggtcttcaacagtggcctgatgacactcctgtgctttctggggcttctggcttcctatgcagtcatcctctgccatgttcgtagggcagcttctgaagggaagaacaaggccatgtccatgtgcaccactcgtgtcattattatacttcttatgtttggacctgctatcttcatctacatgtgccctttcagggccttaccagctgacaagatggtttctctctttcacacagtgatctttccattgatgaatcctatgatttatacccttcgcaaccaggaagtgaaaacttccatgaagaggttattgagtcgacatgtagtctgtcaagtggattttataataagaaactgagaaggaggaattctggctggaattcatatcattcatttaacaagtcctgtttttcactgagtacctcccatttgccaggtaccattgtaggcaatggaggagagttatgcataatgagagaataaacttattatatttaaagaatataaaggaaaccccagagtggttgaagtataatgagtaagtgtgagaaatttaagggttaagttttatgtgactgcaagggtctttcagtctgaggtaagaattttttcatattttaattgtggtaagaacccattttaatgttttaagcaaaggagcagttcatctacaatgctttcctctactggttagagcaacatcagcaagattttaggcagagattaataaactgtaaaatatcaaaaacc

SEQ ID NO: 103633 - DNA, 1084 bp, Homo sapiens
  Payload ID: 354
  Gene Symbol:
  Gene Name: AC171558.2
  ENST ID: ENST00000612882
  CDS Start-End: 99-1040
ttttgaaagcagtgatataactctaggtaaatgctatgtctactaattatagtttcttaattttcatagctatattatgaaaagagtaaattgaagaaatggaaactgcaaattacaccaaggtgacagaatttgttctcactggcctatcccagactccagaggtccaactagtcctatttgttatatttctatccttctatttgttcatcctaccaggaaatatccttatcatttgcaccatcagtctagaccctcatctgacctctcctatgtatttcctgttggctaatctggccttccttgatatttggtactcttccattacagcccctgaaatgctcatagacttctttgtggagaggaagataatttcttttgatggatgcattgcacagctcttcttcttacactttgctggggcttcggagatgttcttgctcacagtgatggcctttgacctctacactgctatctgccgacccctccactatgctaccatcatgaatcaacgtctctgctgtatcctggtggctctctcctggagggggggcttcattcattctatcatacaggtggctctcattgttcgacttcctttctgtgggcccaatgagttagacagttacttctgtgacatcacacaggttgtccggattgcctgtgccaacaccttcccagaggagttagtgatgatctgtagtagtggtctgatctctgtggtgtgtttgattgctctgttaatgtcctatgccttccttctggccttgctcaagaaactttcaggctcaggtgagaataccaacagggccatgtccacctgctattcccacattaccattgtggtgctaatgtttgggccatccatctacatttatgctcgcccatttgactcgttttccctagataaagtggtgtctgtgttcaatactttaatattccctttacgtaatcccattatttacacattgagaaacaaggaagtaaaggcagccatgaggaagttggtcaccaaatatattttgtgtaaagagaagtgaaagataaattatacattttatagttcccctgaggatcattgtcc

SEQ ID NO: 103634 - DNA, 1657 bp, Homo sapiens
  Payload ID: 355
  Gene Symbol: CYP2D6
  Gene Name: AC208162.1
  ENST ID: ENST00000627727
  CDS Start-End: 91-1584
gtgctgagagtgtcctgcctggtcctctgtgcctggtggggtgggggtgccaggtgtgtccagaggagcccatttggtagtgaggcaggtatggggctagaagcactggtgcccctggccgtgatagtggccatcttcctgctcctggtggacctgatgcaccggcgccaacgctgggctgcacgctactcaccaggccccctgccactgcccgggctgggcaacctgctgcatgtggacttccagaacacaccatactgcttcgaccagttgcggcgccgcttcggggacgtgttcagcctgcagctggcctggacgccggtggtcgtgctcaatgggctggcggccgtgcgcgaggcgctggtgacccacggcgaggacaccgccgaccgcccgcctgtgcccatcacccagatcctgggttttgggccgcgttcccaaggggtgttcctggcgcgctatgggcccgcgtggcgcgagcagaggcgcttctccgtctccaccttgcgcaacttgggcctgggcaagaagtcgctggagcagtgggtgaccgaggaggccgcctgcctttgtgccgccttcgccaaccactccggacgcccctttcgccccaacggtctcttggacaaagccgtgagcaacgtgatcgcctccctcacctgcgggcgccgcttcgagtacgacgaccctcgcttcctcaggctgctggacctagctcaggagggactgaaggaggagtcgggctttctgcgcgaggtgctgaatgctgtccccgtcctcctgcatatcccagcgctggctggcaaggtcctacgcttccaaaaggctttcctgacccagctggatgagctgctaactgagcacaggatgacctgggacccagcccagcccccccgagacctgactgaggccttcctggcagagatggagaaggccaaggggaaccctgagagcagcttcaatgatgagaacctgcgcatagtggtggctgacctgttctctgccgggatggtgaccacctcgaccacgctggcctggggcctcctgctcatgatcctacatccggatgtgcagcgccgtgtccaacaggagatcgacgacgtgatagggcaggtgcggcgaccagagatgggtgaccaggctcacatgccctacaccactgccgtgattcatgaggtgcagcgctttggggacatcgtccccctgggtgtgacccatatgacatcccgtgacatcgaagtacagggcttccgcatccctaagggaacgacactcatcaccaacctgtcatcggtgctgaaggatgaggccgtctgggagaagcccttccgcttccaccccgaacacttcctggatgcccagggccactttgtgaagccggaggccttcctgcctttctcagcaggccgccgtgcatgcctcggggagcccctggcccgcatggagctcttcctcttcttcacctccctgctgcagcacttcagcttctccgtggccgccggacagccccggcccagccactctcgtgtcgtcagctttctggtgaccccatccccctatgagctttgtgctgtgccccgctagaatggggtacctagtccccagcctgctccctagccagaggctctaatgtacaataaagcaatgtggtagttcc

SEQ ID NO: 103635 - DNA, 1504 bp, Homo sapiens
  Payload ID: 355
  Gene Symbol: CYP2D6
  Gene Name: AC208162.1
  ENST ID: ENST00000625759
  CDS Start-End: 91-1431
gtgctgagagtgtcctgcctggtcctctgtgcctggtggggtgggggtgccaggtgtgtccagaggagcccatttggtagtgaggcaggtatggggctagaagcactggtgcccctggccgtgatagtggccatcttcctgctcctggtggacctgatgcaccggcgccaacgctgggctgcacgctactcaccaggccccctgccactgcccgggctgggcaacctgctgcatgtggacttccagaacacaccatactgcttcgaccagttgcggcgccgcttcggggacgtgttcagcctgcagctggcctggacgccggtggtcgtgctcaatgggctggcggccgtgcgcgaggcgctggtgacccacggcgaggacaccgccgaccgcccgcctgtgcccatcacccagatcctgggttttgggccgcgttcccaaggacgcccctttcgccccaacggtctcttggacaaagccgtgagcaacgtgatcgcctccctcacctgcgggcgccgcttcgagtacgacgaccctcgcttcctcaggctgctggacctagctcaggagggactgaaggaggagtcgggctttctgcgcgaggtgctgaatgctgtccccgtcctcctgcatatcccagcgctggctggcaaggtcctacgcttccaaaaggctttcctgacccagctggatgagctgctaactgagcacaggatgacctgggacccagcccagcccccccgagacctgactgaggccttcctggcagagatggagaaggccaaggggaaccctgagagcagcttcaatgatgagaacctgcgcatagtggtggctgacctgttctctgccgggatggtgaccacctcgaccacgctggcctggggcctcctgctcatgatcctacatccggatgtgcagcgccgtgtccaacaggagatcgacgacgtgatagggcaggtgcggcgaccagagatgggtgaccaggctcacatgccctacaccactgccgtgattcatgaggtgcagcgctttggggacatcgtccccctgggtgtgacccatatgacatcccgtgacatcgaagtacagggcttccgcatccctaagggaacgacactcatcaccaacctgtcatcggtgctgaaggatgaggccgtctgggagaagcccttccgcttccaccccgaacacttcctggatgcccagggccactttgtgaagccggaggccttcctgcctttctcagcaggccgccgtgcatgcctcggggagcccctggcccgcatggagctcttcctcttcttcacctccctgctgcagcacttcagcttctccgtggccgccggacagccccggcccagccactctcgtgtcgtcagctttctggtgaccccatccccctatgagctttgtgctgtgccccgctagaatggggtacctagtccccagcctgctccctagccagaggctctaatgtacaataaagcaatgtggtagttcc

SEQ ID NO: 103636 - DNA, 831 bp, Homo sapiens
  Payload ID: 356
  Gene Symbol:
  Gene Name: AC213203.1
  ENST ID: ENST00000612315
  CDS Start-End: 157-687
agaatgctaaccccctggcatgtatctagtcagcggaggcgacggctgctgctaaacaccttacaatccacgggagggcccctcccctaccccgaagtagctattccgcagaggtggagagactcgcgtgtagctcaatgcccacgcacttagccgatgggaaatcacgaattgatgaccagttggctcttggatgtgaggaaaaatctccagagtcagagggaactctcgaagttttgcccggagcaaacggaagggtggcgttgccatcgcctaagatgggaaaatggcaggtgtcacaggttgcaggggaaggtcggagaccagctgagggccccggagccttcctggaaagagtttcccatccagcccgcctcggtttccgcatccgtcttattccttatgacgttgagggtgctggcgtctgggtcctttatgatgcagagggtgcccccgtctcaccccgggcgcctccgcgctcccgcctcctcctggcaacctggtgcgcggctccggatctggcgacccacgaccggctggtcacttgctgccacctcgcaaaggcgcatctctagtccagtggtgagctgcggccgggtcgctgtaactcgctccaggactcgggactcgtggccttggtgtccctcgcggagccctcggtgtgtcgcctgcaggctctttttttgaagaaagcagggagggaatggccttgtgagagactccaggagcaaagagcgaccctcacaaggcccaagtcctcccagagctcagggaagctgtggcttctgacggaagaagggagagaaagctccctcctgtgtgtccctggtg

SEQ ID NO: 103637 - DNA, 252 bp, Homo sapiens
  Payload ID: 357
  Gene Symbol:
  Gene Name: AC231657.1
  ENST ID: ENST00000624556
  CDS Start-End: 1-252
atggagccgcgcacagggggcgccgcgaaccctaaggggagcagaggaaggcctgggcccctcccgcccgcgtgccccagcgcccttccgctcctggcgcggctggacgcgcgccccctggctgcgagggctgcggtcgatgtggcggcgctagtacacagggcgggcgccacattgcgcctgcgccggaaggaggcctttatcgttctgggctgtaaggacaataatgtcatggatagtcgtctgccccac

SEQ ID NO: 103638 - DNA, 351 bp, Homo sapiens
  Payload ID: 358
  Gene Symbol:
  Gene Name: AC233755.1
  ENST ID: ENST00000618003
  CDS Start-End: 1-351
atgaagcacctgtggtttttcctcctgctggtggcagctcccagatgggtcctgtcccaggtgcagctgcaggagtcgggcccaggactggtgaagccttcggagaccctgtccctcacctgcactgtctctggttactccatcagcagtggttactactggggctggatccggcagcccccagggaaggggctggagtggattgggagtatctatcatagtgggagcacctactacaacccgtccctcaagagtcgagtcaccatatcagtagacacgtccaagaaccagttctccctgaagctgagctctgtgaccgccgcagacacggccgtgtattactgtgcgaga

SEQ ID NO: 103639 - DNA, 294 bp, Homo sapiens
  Payload ID: 359
  Gene Symbol:
  Gene Name: AC233755.2
  ENST ID: ENST00000619729
  CDS Start-End: 1-294
gaagtgcagctggtggagtctgggggagtcgtggtacagcctggggggtccctgagactctcctgtgcagcctctggattcacctttgatgattatgccatgcactgggtccgtcaagctccggggaagggtctggagtgggtctctcttattagttgggatggtggtagcacctactatgcagactctgtgaagggtcgattcaccatctccagagacaacagcaaaaactccctgtatctgcaaatgaacagtctgagagctgaggacaccgccttgtattactgtgcaaaa

SEQ ID NO: 103640 - DNA, 303 bp, Homo sapiens
  Payload ID: 360
  Gene Symbol:
  Gene Name: AC234582.1
  ENST ID: ENST00000624572
  CDS Start-End: 1-303
gctgggggggcggtggagcccggggccggcctgctctccggggccgaggtgacaccgtgggctgcgggcgcggtggagcccggggccggcctgctctccggggccgaggtgacaccgtgggctgggggggcggtggagcccggggcgggcctggtgtccggggccgaggtgacaccgtgggctgggggggcggtggagcccggggccggcctggtgtccggggccgaggtgacaccgtgggcttggggggcggtggagcccggggccggcctggtgtccggggccgaggtgacaccgtgggct

SEQ ID NO: 103641 - DNA, 303 bp, Homo sapiens
  Payload ID: 361
  Gene Symbol:
  Gene Name: AC234582.2
  ENST ID: ENST00000623940
  CDS Start-End: 1-303
gctgggggggcggtggagcccggggccggcctggtgtccggggccgaggtgacaccgtgggctgcgggcgcggtggagcccggggacggcctggtgtccggggccgaggtgacaccgtgggctgggggggcggtggagcccggggccggcctggtgtccggggccgaggtgacaccgtgggctgggggggcggtggagcccggggccggcctggtgtccggggccgaggtgacaccgtgggctgggggggcggtggagcccggggccggcctggtgtccggggccgaggtgacaccgtgggct

SEQ ID NO: 103642 - DNA, 1504 bp, Homo sapiens
  Payload ID: 362
  Gene Symbol:
  Gene Name: AC236040.1
  ENST ID: ENST00000606649
  CDS Start-End: 91-1431
gtgctgagagtgtcctgcctggtcctctgtgcctggtggggtgggggtgccaggtgtgtccagaggagcccatttggtagtgaggcaggtatggggctagaagcactggtgcccctggccgtgatagtggccatcttcctgctcctggtggacctgatgcaccggcgccaacgctgggctgcacgctactcaccaggccccctgccactgcccgggctgggcaacctgctgcatgtggacttccagaacacaccatactgcttcgaccagttgcggcgccgcttcggggacgtgttcagcctgcagctggcctggacgccggtggtcgtgctcaatgggctggcggccgtgcgcgaggcgctggtgacccacggcgaggacaccgccgaccgcccgcctgtgcccatcacccagatcctgggttttgggccgcgttcccaaggacgcccctttcgccccaacggtctcttggacaaagccgtgagcaacgtgatcgcctccctcacctgcgggcgccgcttcgagtacgacgaccctcgcttcctcaggctgctggacctagctcaggagggactgaaggaggagtcgggctttctgcgcgaggtgctgaatgctgtccccgtcctcctgcatatcccagcgctggctggcaaggtcctacgcttccaaaaggctttcctgacccagctggatgagctgctaactgagcacaggatgacctgggacccagcccagcccccccgagacctgactgaggccttcctggcagagatggagaaggccaaggggaaccctgagagcagcttcaatgatgagaacctgcgcatagtggtggctgacctgttctctgccgggatggtgaccacctcgaccacgctggcctggggcctcctgctcatgatcctacatccggatgtgcagcgccgtgtccaacaggagatcgacgacgtgatagggcaggtgcggcgaccagagatgggtgaccaggctcacatgccctacaccactgccgtgattcatgaggtgcagcgctttggggacatcgtccccctgggtgtgacccatatgacatcccgtgacatcgaagtacagggcttccgcatccctaagggaacgacactcatcaccaacctgtcatcggtgctgaaggatgaggccgtctgggagaagcccttccgcttccaccccgaacacttcctggatgcccagggccactttgtgaagccggaggccttcctgcctttctcagcaggccgccgtgcatgcctcggggagcccctggcccgcatggagctcttcctcttcttcacctccctgctgcagcacttcagcttctcggtgcccactggacagccccggcccagccaccatggtgtctttgctttcctggtgaccccatccccctatgagctttgtgctgtgccccgctagaatggggtacctagtccccagcctgctccctagccagaggctctaatgtacaataaagcaatgtggtagttcc

SEQ ID NO: 103643 - DNA, 1657 bp, Homo sapiens
  Payload ID: 362
  Gene Symbol:
  Gene Name: AC236040.1
  ENST ID: ENST00000607223
  CDS Start-End: 91-1584
gtgctgagagtgtcctgcctggtcctctgtgcctggtggggtgggggtgccaggtgtgtccagaggagcccatttggtagtgaggcaggtatggggctagaagcactggtgcccctggccgtgatagtggccatcttcctgctcctggtggacctgatgcaccggcgccaacgctgggctgcacgctactcaccaggccccctgccactgcccgggctgggcaacctgctgcatgtggacttccagaacacaccatactgcttcgaccagttgcggcgccgcttcggggacgtgttcagcctgcagctggcctggacgccggtggtcgtgctcaatgggctggcggccgtgcgcgaggcgctggtgacccacggcgaggacaccgccgaccgcccgcctgtgcccatcacccagatcctgggttttgggccgcgttcccaaggggtgttcctggcgcgctatgggcccgcgtggcgcgagcagaggcgcttctccgtctccaccttgcgcaacttgggcctgggcaagaagtcgctggagcagtgggtgaccgaggaggccgcctgcctttgtgccgccttcgccaaccactccggacgcccctttcgccccaacggtctcttggacaaagccgtgagcaacgtgatcgcctccctcacctgcgggcgccgcttcgagtacgacgaccctcgcttcctcaggctgctggacctagctcaggagggactgaaggaggagtcgggctttctgcgcgaggtgctgaatgctgtccccgtcctcctgcatatcccagcgctggctggcaaggtcctacgcttccaaaaggctttcctgacccagctggatgagctgctaactgagcacaggatgacctgggacccagcccagcccccccgagacctgactgaggccttcctggcagagatggagaaggccaaggggaaccctgagagcagcttcaatgatgagaacctgcgcatagtggtggctgacctgttctctgccgggatggtgaccacctcgaccacgctggcctggggcctcctgctcatgatcctacatccggatgtgcagcgccgtgtccaacaggagatcgacgacgtgatagggcaggtgcggcgaccagagatgggtgaccaggctcacatgccctacaccactgccgtgattcatgaggtgcagcgctttggggacatcgtccccctgggtgtgacccatatgacatcccgtgacatcgaagtacagggcttccgcatccctaagggaacgacactcatcaccaacctgtcatcggtgctgaaggatgaggccgtctgggagaagcccttccgcttccaccccgaacacttcctggatgcccagggccactttgtgaagccggaggccttcctgcctttctcagcaggccgccgtgcatgcctcggggagcccctggcccgcatggagctcttcctcttcttcacctccctgctgcagcacttcagcttctcggtgcccactggacagccccggcccagccaccatggtgtctttgctttcctggtgaccccatccccctatgagctttgtgctgtgccccgctagaatggggtacctagtccccagcctgctccctagccagaggctctaatgtacaataaagcaatgtggtagttcc

SEQ ID NO: 103644 - DNA, 1829 bp, Homo sapiens
  Payload ID: 363
  Gene Symbol:
  Gene Name: AC240274.1
  ENST ID: ENST00000612721
  CDS Start-End: 174-1073
aaagtgctgtggggagtgatcacatttttcacaacagtaagttaagaatttcagttactgacatccctcagtcctgatgaaacctatttgatttcaccagtttttaacccatcatatgtttgggtttcttctccccagtccctggctccacctcttctgccacaaacgtcagcatggtggtatcagccggccctttgtccagcgagaaggcagagatgaacattctagaaatgaatgagaaattgcgcccccagctggcagagaagaaacagcagttcagaaacctcaaagagaaatgttttgtaactcaactggcctgcttcctggccaaccagcagaacaaatacaaatatgaagagtgcaaagacctcataaaatctgtgctgaggaatgagcgacagttcaaggaggagaagcttgcagagcagctcaagcaagctgaggagctcaggcaatataaagtcctggttcactctcaggaacgggagctgacccagttaagggagaagttacgggaagggagagatgcctcccgctcattgaatcagcatctccaggccctcctcactccggatgagccagacaagtcccaggggcaggacctccaagaacagctggctgaggggtgtagactggcacagcaacttttccaaaagctcagcccagaaaatgacaatgatcacgatgaagatgttcaagttgaggtggctgagaaagtgcagaaatcgtctgcccccagggagatgcagaaggctgaagaaaaggaagtccctgaggactcactggaggaatgtgccatcacttgttcaaatagccatggcccttatgactccaaccagccacataggaaaaccaaaatcacatttgaggaagacaaagtcgactcaactctcattggctcatcctctcatgttgaatgggaggatgctgtacacattatcccagaaaatgaaagtgatgatgaggaagaggaagaaaaagggccagtgtctcccaggacatcggtgggatcaagtgaaaaaggaggaccaagaggcaacaggtcccaggctcagcagggagctgctggatgagaaagagcctgaagtcttgcaggactccctggatagatgttattcgactccttcaggttatcttgaactgcctgacttaggccagccctacagaagtgctgtttactcattggaggaacagtaccttggcttggctcttgacgtggacagaattaaaaaggaccaggaagaggaagaagaccaaggcccaccatgccccaggctcagcagggagctgctggaggcagtagagcctgaagtcttgcaggactcactggatagatgttattcaactccttccagttgtcttgaacagcctgactcctgcctgccctatggaagttccttttatgcattggaggaaaaacatgttggcttttctcttgacgtgggagaaattgaaaagaaggggaaggggaagaaaagaaggggaagaagatcaacgaagaaaagaaggagaaggggaagaaaagaaggggaagaagatcaaaacccaccatgccccaggctcagcggcatgctgatggaagtggaagagcctgaagtcttgcaggactcactggatagatgttattcgactccgtcaatgtactttgaactacctgactcattccagcactacagaagtgtgttttactcatttgaggaacagcacatcagcttcgcccttgacgtggacaataggtttcttactttgatgggaacaagtctccacctggtcttccagatgggagtcatattcccacagtaagcagcccttactaagccgagagatgt

SEQ ID NO: 103645 - DNA, 2116 bp, Homo sapiens
  Payload ID: 363
  Gene Symbol:
  Gene Name: AC240274.1
  ENST ID: ENST00000612640
  CDS Start-End: 72-2090
aaagtgctgtggggagtgatcacatttttcacaacatccctggctccacctcttctgccacaaacgtcagcatggtggtatcagccggcccttggtccagcgagaaggcagagacgaacattttagaaatcaacgagaaattgcgcccccagctggcagagaacaaacagcagttcagaaacctcaaagagaaatgttttgtaactcaactggccggcttcctggccaaccgacagaagaaatacaagtatgaagagtgtaaagacctcataaaatttatgctgaggaatgagcgacagttcaaggaggagaagcttgcagagcagctcaagcaagctgaggagctcaggcaatataaagtcctggttcactctcaggaacgggagctgacccagttaagggagaagttacgggaagggagagatgcctcccgctcattgaatcagcatctccaggccctcctcactccagatgagccagacaagtcccaggggcaggacctccaagaacagctggctgaggggtgtagactggcacagcaccttgtccaaaagctcagcccagaaaatgacaatgatcacgatgaagatgttcaagttgaggtggctgagaaagtgcagaaatcgtctgcccccagggagatgcagaaggctgaagaaaaggaagtccctgaggactcactggaggaatgtgccatcacttgttcaaatagccatggcccttatgactccaaccagccacataggaaaaccaaaatcacatttgaggaagacaaagtcgactcaactctcattggctcatcctctcatgttgaatgggaggatgctgtacacattatcccagaaaatgaaagtgatgatgaggaagaggaagaaaaagggccagtgtctcccaggaatctgcaggagtctgaagaggaggaagtcccccaggagtcctgggatgaaggttattcgactctctcaattcctcctgaaatgttggcctcgtaccagtcttacagcggcacatttcactcattagaggaacagcaagtctgcatggctgttgacataggcggacatcggtgggatcaagtgaaaaaggaggaccaagaggcaacaggtcccaggctcagcagggagctgctggatgagaaagggcctgaagtcttgcaggactcactggatagatgttattcaactccttcaggttatcttgaactgactgactcatgccagccctacagaagtgccttttacatattggagcaacagcgtgttggctgggctcttgacatggatgaaattgaaaagtaccaagaagtggaagaagaccaagacccatcatgccccaggctcagcagggagctgctggatgagaaagagcctgaagtcttgcaggactccctggatagatgttattcgactccttcaggttatcttgaactgcctgacttaggccagccctacagaagtgctgtttactcattggaggaacagtaccttggcttggctcttgacgtggacagaattaaaaaggaccaggaagaggaagaagaccaaggcccaccatgccccaggctcagcagggagctgctggaggcagtagagcctgaagtcttgcaggactcactggatagatgttattcaactccttccagttgtcttgaacagcctgactcctgcctgccctatggaagttccttttatgcattggaggaaaaacatgttggcttttctcttgacgtgggagaaattgaaaagaaggggaaggggaagaaaagaaggggaagaagatcaacgaagaaaagaaggagaaggggaagaaaagaaggggaagaagatcaaaacccaccatgccccaggctcagcggcatgctgatggaagtggaagagcctgaagtcttgcaggactcactggatagatgttattcgactccgtcaatgtactttgaactacctgactcattccagcactacagaagtgtgttttactcatttgaggaacagcacatcagcttcgcccttgacgtggacaataggtttcttactttgatgggaacaagtctccacctggtcttccagatgggagtcatattcccacagtaagcagcccttactaagccgagagatgt

SEQ ID NO: 103646 - DNA, 2921 bp, Homo sapiens
  Payload ID: 363
  Gene Symbol:
  Gene Name: AC240274.1
  ENST ID: ENST00000616361
  CDS Start-End: 174-2546
aaagtgctgtggggagtgatcacatttttcacaacagtaagttaagaatttcagttactgacatccctcagtcctgatgaaacctatttgatttcaccagtttttaacccatcatatgtttgggtttcttctccccagtccctggctccacctcttctgccacaaacgtcagcatggtggtatcagccggcccttggtccagcgagaaggcagagacgaacattttagaaatcaacgagaaattgcgcccccagctggcagagaacaaacagcagttcagaaacctcaaagagatgttttgtaactcaactggccggcttcctggccaaccgacagaagaaatacagcaatataaagtcctggttcactctcaggaacgggagctgacccagttaagggagaagttacgggaagggagagatgcctcccgctcattgaatcagcatctccaggccctcctcactccagatgagccagacaagtcccaggggcaggacctccaagaacagctggctgaggggtgtagactggcacagcaccttgtccaaaagctcagcccagaaaatgacgaagatgaggatgaagatgttcaagttgaggaggctgagaaagtactggaatcatctgcccccagggaggtgcagaaggctgaagaaagcaaagtccctgaggactcactggaggaatgtgccatcacttgttcaaatagccacggcccttgtgactccaaccagcctcacaagaacatcaacatcacatttgaggaagacaaagtcaactcaactctggttgtagacagagaatcctctcatgatgaatgtcaggatgctgtaaacattctcccagtccctggccccacctcttctgccacaaacgtcagcatggtggtatcagccggccctttgtccagcgagaaggcagagatgaacattctagaaatgaatgagaaattgcgcccccagctggcagagaagaaacagcagttcagaaacctcaaagagaaatgttttgtaactcaactggcctgcttcctggccaaccagcagaacaaatacaaatatgaagagtgcaaagacctcataaaatctgtgctgaggaatgagcgacagttcaaggaggagaagcttgcagagcagctcaagcaagctgaggagctcaggcaatataaagtcctggttcactctcaggaacgggagctgacccagttaagggagaagttacgggaagggagagatgcctcccgctcattgaatcagcatctccaggccctcctcactccggatgagccagacaagtcccaggggcaggacctccaagaacagctggctgaggggtgtagactggcacagcaacttttccaaaagctcagcccagaaaatgacaatgatcacgatgaagatgttcaagttgaggtggctgagaaagtgcagaaatcgtctgcccccagggagatgcagaaggctgaagaaaaggaagtccctgaggactcactggaggaatgtgccatcacttgttcaaatagccatggcccttatgactccaaccagccacataggaaaaccaaaatcacatttgaggaagacaaagtcgactcaactctcattggctcatcctctcatgttgaatgggaggatgctgtacacattatcccagaaaatgaaagtgatgatgaggaagaggaagaaaaagggccagtgtctcccaggaatctgcaggagtctgaagaggaggaagtcccccaggagtcctgggatgaaggttattcgactctctcaattcctcctgaaatgttggcctcgtaccagtcttacagcggcacatttcactcattagaggaacagcaagtctgcatggctgttgacataggcggacatcggtgggatcaagtgaaaaaggaggaccaagaggcaacaggtcccaggctcagcagggagctgctggatgagaaagggcctgaagtcttgcaggactcactggatagatgttattcaactccttcaggttatcttgaactgactgactcatgccagccctacagaagtgccttttacatattggagcaacagcgtgttggctgggctcttgacatggatgaaattgaaaagtaccaagaagtggaagaagaccaagacccatcatgccccaggctcagcagggagctgctggatgagaaagagcctgaagtcttgcaggactccctggatagatgttattcgactccttcaggttatcttgaactgcctgacttaggccagccctacagaagtgctgtttactcattggaggaacagtaccttggcttggctcttgacgtggacagaattaaaaaggaccaggaagaggaagaagaccaaggcccaccatgccccaggctcagcagggagctgctggaggcagtagagcctgaagtcttgcaggactcactggatgttattcaactccttccagttgtcttgaacagcctgactcctgcctgccctatggaagttccttttatgcattggaggaaaaacatgttggcttttctcttgacgtgggagaaattgaaaagaaggggaaggggaagaaaagaaggggaagaagatcaacgaagaaaagaaggagaaggggaagaaaagaaggggaagaagatcaaaacccaccatgccccaggctcagcggcatgctgatggaagtggaagagcctgaagtcttgcaggactcactggatagatgttattcgactccgtcaatgtactttgaactacctgactcattccagcactacagaagtgtgttttactcatttgaggaacagcacatcagcttcgcccttgacgtggacaataggtttcttactttgatgggaacaagtctccacctggtcttccagatgggagtcatattcccacagtaagcagcccttactaagccgagagatg

SEQ ID NO: 103647 - DNA, 3728 bp, Homo sapiens
  Payload ID: 363
  Gene Symbol:
  Gene Name: AC240274.1
  ENST ID: ENST00000614336
  CDS Start-End: 402-2213
gtgccatcacttgttcaaatagccacggcccttgtgactccaaccagcctcacaagaacatcaacatcacatttgaggaagacaaagtcaactcaactctggttgtagacagagaatcctctcatgatgaatgtcaggatgctgtaaacattctcccagtccctggccccacctcttctgccacaaacgtcagcatggtggtatcagccggccctttgtccagcgagaaggcagagatgaacattctagaaatgaatgagaaattgcgcccccagctggcagagaagaaacagcagttcagaaacctcaaagagaaatgttttgtaactcaactggcctgcttcctggccaaccagcagaacaaatacaaatatgaagagtgcaaagacctcataaaatctgtgctgaggaatgagcgacagttcaaggaggagaagcttgcagagcagctcaagcaagctgaggagctcaggcaatataaagtcctggttcactctcaggaacgggagctgacccagttaagggagaagttacgggaagggagagatgcctcccgctcattgaatcagcatctccaggccctcctcactccggatgagccagacaagtcccaggggcaggacctccaagaacagctggctgaggggtgtagactggcacagcaacttttccaaaagctcagcccagaaaatgacaatgatcacgatgaagatgttcaagttgaggtggctgagaaagtgcagaaatcgtctgcccccagggagatgcagaaggctgaagaaaaggaagtccctgaggactcactggaggaatgtgccatcacttgttcaaatagccatggcccttatgactccaaccagccacataggaaaaccaaaatcacatttgaggaagacaaagtcgactcaactctcattggctcatcctctcatgttgaatgggaggatgctgtacacattatcccagaaaatgaaagtgatgatgaggaagaggaagaaaaagggccagtgtctcccaggaatctgcaggagtctgaagaggaggaagtcccccaggagtcctgggatgaaggttattcgactctctcaattcctcctgaaatgttggcctcgtaccagtcttacagcggcacatttcactcattagaggaacagcaagtctgcatggctgttgacataggcggacatcggtgggatcaagtgaaaaaggaggaccaagaggcaacaggtcccaggctcagcagggagctgctggatgagaaagggcctgaagtcttgcaggactcactggatagatgttattcaactccttcaggttatcttgaactgactgactcatgccagccctacagaagtgccttttacatattggagcaacagcgtgttggctgggctcttgacatggatgaaattgaaaagtaccaagaagtggaagaagaccaagacccatcatgccccaggctcagcagggagctgctggatgagaaagagcctgaagtcttgcaggactccctggatagatgttattcgactccttcaggttatcttgaactgcctgacttaggccagccctacagaagtgctgtttactcattggaggaacagtaccttggcttggctcttgacgtggacagaattaaaaaggaccaggaagaggaagaagaccaaggcccaccatgccccaggctcagcagggagctgctggaggcagtagagcctgaagtcttgcaggactcactggatagatgttattcaactccttccagttgtcttgaacagcctgactcctgcctgccctatggaagttccttttatgcattggaggaaaaacatgttggcttttctcttgacgtgggagaaattgaaaagaaggggaaggggaagaaaagaaggggaagaagatcaacgaagaaaagaaggagaaggggaagaaaagaaggggaagaagatcaaaacccaccatgccccaggctcagcggcatgctgatggaagtggaagagcctgaagtcttgcaggactcactggatagatgttattcgactccgtcaatgtactttgaactacctgactcattccagcactacagaagtgtgttttactcatttgaggaacagcacatcagcttcgcccttgacgtggacaataggtttcttactttgatgggaacaagtctccacctggtcttccagatgggagtcatattcccacagtaagcagcccttactaagccgagagatgtcattcctgcaggcaggacctataggcacgtgaagatttgaatgaaactatagttccatttggaagcccagacataggatgggtcagtgggcatggctctattcctattctcagaccatgccagtggcaacctgtgctcagtctgaagacaatggacccaagttaggtgtgacacgttcacataactgtgcagcacatgccgggagtgatcagtcagacattttaatttgaaccacttatctctgggtagctacaaagttcctcagggatttcattttgcagtcatgtctctgagcttctatacctgctcaaggtcagtgtcatctttgtgtttagctcatccaaaggtgttaccctggtttcaatgaacctaacctcattctttgtatcttcagtgttgaattgttttagctgatccatctttaacacaggagggatccttggctgaggattgtatttcagaaccaccaactgctcttgacaattgttaacccgctaggctcctttggttagagaagccacagtccttcagcctccaattggtgtcagtacttaggaagaccacagctagatggacaaacagcattgggaggccttagccctgctcctctcgattccatcctgtagagaacaggagtcaggagccgctggcaggagacagcatgtcacccaggactctgccggtgcagaatatgaacaacgccatgttcttgcagaaaacgcttagcctgagtttcataggaggtaattaccagacaactgcagaatgtagaacactgagcaggacaactgacctgtctccttcacatagtccatatcaccacaaatcacacaacaaaaaggagaagagatattttgggttcaaaaaaagtaaaaagataatatagctgcatttctttagttattttgaaccccaaatatttcctcatctttttgttgttgtcattgatggtggtgacatggacttgtttatagaggacaggtcagctctctggctcaatgatctacattctgaagttgtctgaaaatgtcttcatgattaaattcagcctaaacgttttgccgggaacactgcagagacaatgctgtgagtttccaaccttagcccatctgcgggcagagaaggtctagtttgtccatcagcattatcatgatatcaggactggttacttggttaaggaggggtctaggagatctgtcccttttagagacaccttacttataatgaagtatttgggagggtggttttcaaaattagaaatgtcctgtattccaatgatcatcctgtaaacattttatcatttattaatcatccctgcctgtgtctattattatattcatatctctacgctggaaactttctgcctcaatgtttactgtgcctttgtttttgctagtgtgtgttgttgaaaaaaaaaacattctctgcctgagttttaatttttgtccaaagttattttaatctatacaattaaaagcttttgcctatc

SEQ ID NO: 103648 - DNA, 1088 bp, Homo sapiens
  Payload ID: 364
  Gene Symbol:
  Gene Name: AC241377.2
  ENST ID: ENST00000626088
  CDS Start-End: 41-847
ctagagggcggcgaggtctctccgcgcagcgtcccaggggatgcggcgcgcccccgactgggtgcagcggcaggccgcccccggcagcaagtgccgggtgccatggcaacggcgggaatttcccagtcggggcggccggaagcagccccagccgggctcgcggcagcgaaagcaaaatccgatctctctcccgggggagcaaaatggacgaaaggcgaccccccaggcaggggcgctgggtgccttgggaatccgaggaatcccttctctttgccagtcggaggggactagatggagccgaaggggccggagatgggccgagcgctgccccccgggggtcctcggcgccggacgcagcttacgagcgcaacgcagcaggctccattcccggccgccgccgctcagcccattacgcaaacctggcgggtccaaccaaccccgctctgccgccgctgctggaacccatgaggcgtgcttgcaggcttcgggcactacgcggggctggaaataccacgcactgccccttcgcctagacccccgctcgggccacgcgggttctgccctcaaagctggtagctgccccagacttgggggtggggggaggggaaggggcgaggctggcgccccctcccgcttttggctcccgcgttcgttgcagcagctgttgccaaatgaaccccggaatgcggacgtgcaaaccctccaccccacccccagccacacacgtcgcggtcagagaactgggaagggggcgctgggtccgaggttctggaaaagcaagaactcacctgcaaacaggcagtcctcagctctggacttctggatcacgacgtcgatatccttctgaattcggtcttgccttgaacacatccccattaaataaatccttggaaaagaagcagccgctatttccaccccacccccctcgcacgctttcagctttcgtaaatattcagttaaaaatgaaacctctggccgaggcaggggctgaaggccaagtggtttcggaagtgatcctgggtgagaggaggaggaggaggaggaggaggaggtggaggaggagggggaggtcggctttccatttccag

SEQ ID NO: 103649 - DNA, 1088 bp, Homo sapiens
  Payload ID: 365
  Gene Symbol:
  Gene Name: AC241585.2
  ENST ID: ENST00000628937
  CDS Start-End: 41-847
ctagagggcggcgaggtctctccgcgcagcgtccgaggggatgcggcgcgcccccgactgggtgcagcggcaggccgcccccggcagcaagtgccgggtgccatggcaacggcgggaatttcccggtcggggaggccggaagcagccccagccgggctcgcggcagcgaaagcaaaatccgatctctctcccgggggagcaaaatggacgaaaggcgaccccccaggcaggggcgctgggtgccttgggaatccgaggaatcccttctctttgccagtcggaggggactagatggagccgaaggggccggagatgggccgagcgctgccccccgggggtcctcggcgccgggcgcagcttacgagcgcagcgcagcaggctccattcccggccgccgccgctcagcccattacgcaaacctggcgggtccaaccaaccccgctgtgccgccgctgctggaacccaggaggcgtgcttgcaggcttcgggcactacgcggggctggaaataccacgcactgccccttcgcctagacccccgctcgggccacgcgggttctgccctcaaagctggtagctgccccagacttgggggtggggggaggggaaggggcgaggctggcgccccctcccgcttttggctcccgcgttcgttgcagcagctgttgccaaatgaaccccggaatgcggacgtgcaaaccctccaccccacccccagccacacacgtcgcggtcagagaactgggaagggggcgctgggtccgaggttctggaaaagcaagaactcacctgcaaacaggcagtcctcagctctggacttctggatcacgacgtcgatatccttctgaattcggtcttgccttgaacacatccccattaaataaatccttggaaaagaagcagccgctatttccaccccacccccctcgcacgctttcagctttcgtaaatattcagttaaaaatgaaacctctggccgaggcaggggctgaaggccaagtggtttcggaagtgatcctgggtgagaggaggaggaggaggaggaggaagaggtggaggaggagggggaggtcggctttccatttccag

SEQ ID NO: 103650 - DNA, 75 bp, Homo sapiens
  Payload ID: 366
  Gene Symbol:
  Gene Name: AC242988.1
  ENST ID: ENST00000624245
  CDS Start-End: 1-75
atatataatgtaaaaagtacaaggagactggatttgagagaatataaaaacgacagagaccctgaaaaaggatgc

SEQ ID NO: 103651 - DNA, 2042 bp, Homo sapiens
  Payload ID: 367
  Gene Symbol:
  Gene Name: AC243687.1
  ENST ID: ENST00000621228
  CDS Start-End: 622-1425
ccgggatgtgcaggccgggaggtagaggcaggctgatgggggagggaacgagcagcctgtgagacggggtgacggcggctaccagcccgggcgggcaccgggactggaagagttgcctgagcagccggctggtccggcggccaggctagggcgggggcgagcgcccagttgagcctgctggggctggaggagcgagaagggttctcttcacatttcagagcgaaccagacggacagtaaggtttggaggaagggggatcgttggaagtagcaggaagtggagagaatctggcaataggcgagaaaccgaaagaatcagaaagaagtctatgtgagtagctgaaagcattgggtgaccagaaagaaggtcgctgtaagtgaaggaagagtgaggtgtggctggatcaaagggctaagagaagcgggtctgtgtaagtggatgtgagtgaggatcaaggaaaagccgtggaagtggccgggggtcggggccgcagaagtgccagacggggccggaaagcagccgagcggagttcaaatttgagagcgtttggaaattggaagacttggtggcgaacgagggtcaggacctgcatcctgcctcagagttatcgacgtatccggaatgtgggatcagaggctggtgaagttggccctgttgcagcatctgcgggccttctatggtattaaggtgaagggtgtccgtgggcagtgcgatcgcaggagacatgaaacagcagccacggaaatagggggtaaaatatttggagtaccttttaatgcactgccccattctgctgtaccagaatatggacacattccaagctttcttgtcgatgcttgcacatctttagaagaacatattcataccgaagggctttttcggaaatcaggatctgtgattcgcctaaaagcactaaagaataaagtggatcatggtgaaggttgcctatcttctgcacctccttgtgatattgcgggacttcttaagcagttttttagggaactgccagagcccattctcccagctgatttgcatgaagcacttttgaaagctcaacagttaggcacagaggaaaagaataaagctatactgttgctctcctgtcttctggctgaccacacagttcatgtattaagatacttctttaactttctcaggaatgtttctcttagatccagtgagaataagatggatagcagcaatcttgcagtaatatttgcaccaaatcttcttcagacaagtgaaggacatgaaaagatgtcttctaacgcagaaaagaagggcgtgtaccagactttatcctggaaaagataccagccatgttgggtattgatggtctctgtgctactccatcactggaaggctttgaagaaggtgaatatgaaactcctggtgaatataagagaaagagaagacaacgtgtaggagattttgttagtggagcactaaataaatttaaacctaacagaacaccttctattacacctcaacaagaaagaattgataatgaaacaaccaccatcggttaaatttgatccaaaaatattgcatctaccagcattttcagtggataagttataatttctgaaagaccaagattggaatgactttttgtaacaagtgtgctcgcagatcgactccagtgagaagagctcggggacctcctgagccaagtttaatctcctttgctatttgtgcatggtggctggtcaccaggaggtggccaccaggcttctcctttccccgctgttctaattgctaatccagtatttgcggatagctccaaactgggatatgaccaccattgtatatgcagaccattgactggaacatcatgatctatctgcacatgactgtaaataacaactattggatgtggcacagatggaagctacataaacactctatacaatatggccaattcaccgggctccctgttagtcttgtgagcaattttaaactcttccacgattctttctctgctttggagtgtttcaattaattctccattatattacaatttacatttttattaagccttt

SEQ ID NO: 103652 - DNA, 785 bp, Homo sapiens
  Payload ID: 368
  Gene Symbol:
  Gene Name: AC243756.1
  ENST ID: ENST00000584068
  CDS Start-End: 76-570
actataaagacagtaaaaagatcagtggttatctttgcagacgccaccatcgctgtgagccctgtactatcagccatggtcaactccgtcgtcttttttgacatcaccgtcgacggcaagcccttgggccgcatctccatcaaactgtttgcagacaagattccaaagacagcagaaaactttcgtgctctgagcactggagagaaaggatttcgttataagggttcctgctttcacagaattattccagggtttatgtgtcagggtggtgacttcacacgccctaatggcaccgatgacaagtccatctatggggagaaatttgatgatgagaacctcatccgaaagcatacaggttctggcatcttgtccatggtaaatgctggacccaacacaaatggctcccagttattcatctgcactgccaagactgagtggttggatggcaagcatgtggcctttggcaaggtgaaagaacgtgtgaatattgtggaagccatggagcactttgggtacaggaatagcaagaccagcaagaagatcaccattgctgactgtggacaattctaatgagtttgacttgtgttttattttcaccaccagacccattcattctgtagctcaggagagcacccctccaccacatttgcttgcaatatcctagaatctttgtgctcttgctgcagttccctttgggttccatgttttccttgttcccttccatgcctagctggattgcagagttgagttaagtttatgattatgaaataaaaactaagtaacaa

SEQ ID NO: 103653 - DNA, 399 bp, Homo sapiens
  Payload ID: 369
  Gene Symbol:
  Gene Name: AC243790.2
  ENST ID: ENST00000612769
  CDS Start-End: 1-399
ttcactcagacatataggaggtccaggcagcatgaacagctccctggtcagagacacatggatttgctcactggttactcaaagctgattcaaagccgattaaagctgctgcttcatctggggtcccaacctccagtgggaaaaacattcttcttttcctgctggtgtcacccactgttccacggatccaaaacaacacccaatgtttggtacaaatttagtgaaacagctctttccattcttaactcatgccaagcatctcagcttggggtcaggaaaatgccaggggacatgagctcttctcctagagttagagaattctctgccttagttgcaataaaggaaaagatacacattcttcctacaaatgccaaagtaggctcaaaatttggttcctag

SEQ ID NO: 103654 - DNA, 375 bp, Homo sapiens
  Payload ID: 370
  Gene Symbol:
  Gene Name: AC243945.1
  ENST ID: ENST00000623775
  CDS Start-End: 1-375
atgactcttaacgagcatgctgccttcaagcatctgtttaacaaagcacatcttgcaccgcccttaatccatttaaccctgagtggacacagcacatgtttcagagagcacagggttggggataaggtcacagatcaacaggatcccaaggcagaggaatttttcttagtacagaacaaaatgaaaagtctcccatgtctacttctatccacacagacccggcaaccatctgatttctcaattttttccccacccttcccgcctttctattccacaaaaccgccattgtcatcatggcccatccccaatgagccgctgggcacacctcccagacggggtcgtggccgggcagaggggctcctcacttcccagtag

SEQ ID NO: 103655 - DNA, 288 bp, Homo sapiens
  Payload ID: 371
  Gene Symbol:
  Gene Name: AC245015.1
  ENST ID: ENST00000635354
  CDS Start-End: 1-288
attcctgcacaaagtctgaccagcctattaataaggcttcagggcaggaggttggacatcatcctgacccagacaccaagatccctgttaacatcttttggaaagaggcactcaatcttttatcaagcaactgcccaggtacatggagaaatcagttggttccagatgaaaggacagggatttgcactcgttatatctcatatctctaatgtgcccaaaaatgtcccggcctggttccgtgggaggggaagtggatccaactacatcagcatcagtgggctgcagcct

SEQ ID NO: 103656 - DNA, 306 bp, Homo sapiens
  Payload ID: 371
  Gene Symbol:
  Gene Name: AC245015.1
  ENST ID: ENST00000635147
  CDS Start-End: 1-306
gtgtccccacgtgtcccagagaatgtgtttctactggggactattttgttatgtcttcaaaagactctcatggacatcatcctgacccagacaccaagatccctgttaacatcttttggaaagaggcactcaatcttttatcaagcaactgcccaggtacatggagaaatcagttggttccagatgaaaggacagggatttgcactcgttatatctcatatctctaatgtgcccaaaaatgtcccggcctggttccgtgggaggggaagtggatccaactacatcagcatcagtgggctgcagcct

SEQ ID NO: 103657 - DNA, 1058 bp, Homo sapiens
  Payload ID: 372
  Gene Symbol:
  Gene Name: AC245100.1
  ENST ID: ENST00000629247
  CDS Start-End: 41-847
ctagagggcggcgaggtctctccgcgcagcgtccgaggggatgcggcgcgcccccgactgggtgcagcggcaggccgcccccggcagcaagtgccgggtgccatggcaacggcgggaatttcccggtcggggaggccggaagcagccccagccgggctcgcggcagcgaaagcaaaatccgatctctctcccgggggagcaaaatggacgaacggcgaccccccaggcaggggcgctgggtgccttgggaatccgaggaatcccttctctttgccagtcggaggggactagatggagccgaaggggccggagatgggccgagcgctgccccccgggggtcctcggcgccgggcgcagcttacgagcgcagggcagcaggctccattcccggccgccgccgctcagcccattacgcaaacctggcgggtccaaccaaccccgctctgccgccgctgctggaacccaggaggcgtgcttgcaggcttcgggcactacgcggggctggaaataccacgcactgccccttcgcctagacccccgctcgggccactcgggttctgccttcaaagctagtagctgccccagacttgggggtggggggaggggaaggggcgaggctggcgccccctcccgcttttggctcccgcgttcgttgcagcagctgtcgccaaatgaaccccggaatgcggacgtgcaaaccctccaccccacccccagccacacacgtcgcggtcggagaactgagaagggggcgctgggtccgaggttctggaaaagcaagaactcacctgcaaacaggcagtcctcagctctggacttctggatcacgacgtcgatatccttctgaattcggtcttgccttgaacacatccccattaaataaatccttggaaaagaagcagccgctatttccaccccacccccctcgcacgctttcagctttcgtaaatattcagttaaaaatgaaacctctggccgaggcaggggctgaaggccaactggtttcggaagtgatcctgggtgagaggaggagaaggaggaggaggaggaggaggtgg

SEQ ID NO: 103658 - DNA, 1133 bp, Homo sapiens
  Payload ID: 373
  Gene Symbol:
  Gene Name: AC253572.1
  ENST ID: ENST00000624419
  CDS Start-End: 373-1083
gctgcacacccgagaaagtttcagccaaacttccggcggcggctgaggcggcggccgaggagcggcggactcggggcgcggggagtcgaggcatttgcacctgggcttcggagcgtagcgccagggcctgagcctttgaagcaggaggaggggaggagagagtggggctcctctatcgggaccccctccccatgtggatctgcccaggcggcggcggcggcggcggcggaggaggaggaggaggcgaccgagaagatgcccgccctgcgtcccgctctgctgtgggcgctgctggcgctctggctgtgctgggcggcccccgcgcatgcattgcagtgtcgagatggctatgaaccctgtgtaaataaaggaatgtgtgttacctaccacagtggcacaggatactgcaaatgtccagaaggcttcttgggggaatattgtcaacatcgagacccctgtgagaagaaccgctgccagaatggtgggacttgtgtggcccaggccatgctggggaaagccacgtgccggtgtgcctcagggtttacaggagaggactgccagtactcgacacctcatccatgctttgtgtctcgaccttgcctgaatggcggcacatgccatatgctcagccgggatacctatgagtgcacctgtcaagtcgggtttacaggtaaggagtgccaatggaccgatgcctgcctgtctcatctctgtgcaaatggaagtacctgtaccactgtggccaaccagttctcctgcaaatgcctcacaggcttcacagggcagaagtgtgagactgatgtcaatgagtgtgacattccaggacactgccagcatggtggcacctgcctcaacctgcctggttcctaccagtgccagtgccttcagggcttcacaggccagtactgtgacagactgtatgtgccctgtgcacactcgccttgtgtcaatggaggcacctgtcggcagactggtgacttcacttttgagtgcaactgccttccagaaacagtgagaagaggaacagagctctgggaaagagacaggcaagtctggaatggaaaagaacacgatgagaattagacactggaaaatatgtatgtgtggttaataaagtgctttaaactgaattg

SEQ ID NO: 103659 - DNA, 1657 bp, Homo sapiens
  Payload ID: 374
  Gene Symbol:
  Gene Name: AC254560.1
  ENST ID: ENST00000625749
  CDS Start-End: 91-1584
gtgctgagagtgtcctgcctggtcctctgtgcctggtggggtgggggtgccaggtgtgtccagaggagcccagttggtagtgaggcagccatggggctagaagcactggtgcccctggccatgatagtggccatcttcctgctcctggtggacctgatgcaccggcaccaacgctgggctgcacgctacccgccaggtcccctgccactgcccgggctgggcaacttgctgcatgtggacttccagaacacaccatactgcttcgaccagttgcggcgccgcttcggggacgtgttcagcctgcagctggcctggacgccggtggtcgtgctcaatgggctggcggccgtgcgcgaggcgatggtgacccgcggcgaggacacggccgaccgcccgcctgcgcccatctaccaggtcctgggcttcgggccgcgttcccaaggggtgatcctgtcgcgctatgggcccgcgtggcgcgagcagaggcgcttctccgtgtccaccttgcgcaacttgggcctgggcaagaagtcgctggagcagtgggtgaccgaggaggccgcctgcctttgtgccgccttcgccgaccaagccggacgcccctttcgccccaacggtctcttggacaaagccgtgagcaacgtgatcgcctccctcacctgcgggcgccgcttcgagtacgacgaccctcgcttcctcaggctgctggacctagctcaggagggatcgaaggaggagtcgggcttcctgcgcgaggtgctgaatgctgtccccgtcctcctgcacatcccagcgctggctggcaaggtcctacgcttccaaaaggctttcctgacccagctggatgagctgctaactgagcacaggatgacctgggacccagcccagccaccccgagacctgactgaggccttcctggcaaagaaggagaaggccaaggggagccctgagagcagcttcaatgatgagaacctgcgcatagtggtgggtaacctgttccttgccgggatggtgaccaccttgaccacgctggcctggggcctcctgctcatgatcctacacctggatgtgcagctccgtgtccaacaggagatcgacgacgtgatagggcaggtgcggcgaccagagatgggtgaccaggctcacatgccctacaccactgccgtgattcacgaggtgcagcgctttggggacatcatccccctgagtgtgacccatatgacatcccatgacatcgaagtacagggcttccgcatccctaagggaacgacactcatcaccaacctgtcatcggtgctgaaggatgaggccgtctggaagaagcccttccgcttccaccccgaacacttcctggatgcccagggccactttgtgaagccggaggccttcctgcctttctcagcaggccgccgtgcatgcctcggggagcccctggcccgcatggagctcttcctcttcttcacctccctgctgcagcacttcagcttctccgtggccgccggacagccccggcccagccactctcgtgtcgtcagctttctggtgaccccatccccctacgagctttgtgctgtgccccgctagaatggggtacctagtccccagcctgctccctagccagaggctctaatgtacaataaagcaatgtggtagttcc

SEQ ID NO: 103660 - DNA, 1408 bp, Homo sapiens
  Payload ID: 374
  Gene Symbol:
  Gene Name: AC254560.1
  ENST ID: ENST00000629176
  CDS Start-End: 1-1335
atggggctagaagcactggtgcccctggccatgatagtggccatcttcctgctcctggtggacctgatgcaccggcaccaacgctgggctgcacgctacccgccaggtcccctgccactgcccgggctgggcaaccttcatgtggacttccagaacacaccatactgcttcgaccagttgcggcgccgcttcggggacgtgttcagcctgcagctggcctggacgccggtggtcgtgctcaatgggctggcggccgtgcgcgaggcgatggtgacccgcggcgaggacacggccgaccgcccgcctgcgcccatctaccaggtcctgggcttcgggccgcgttcccaaggacgcccctttcgccccaacggtctcttggacaaagccgtgagcaacgtgatcgcctccctcacctgcgggcgccgcttcgagtacgacgaccctcgcttcctcaggctgctggacctagctcagggatcgaaggaggagtcgggcttcctgcgcgaggtgctgaatgctgtccccgtcctcctgcacatcccagcgctggctggcaaggtcctacgcttccaaaaggctttcctgacccagctggatgagctgctaactgagcacaggatgacctgggacccagcccagccaccccgagacctgactgaggccttcctggcaaagaaggagaaggccaaggggagccctgagagcagcttcaatgatgagaacctgcgcatagtggtgggtaacctgttccttgccgggatggtgaccaccttgaccacgctggcctggggcctcctgctcatgatcctacacctggatgtgcagctccgtgtccaacaggagatcgacgacgtgatagggcaggtgcggcgaccagagatgggtgaccaggctcacatgccctacaccactgccgtgattcacgaggtgcagcgctttggggacatcatccccctgagtgtgacccatatgacatcccatgacatcgaagtacagggcttccgcatccctaagggaacgacactcatcaccaacctgtcatcggtgctgaaggatgaggccgtctggaagaagcccttccgcttccaccccgaacacttcctggatgcccagggccactttgtgaagccggaggccttcctgcctttctcagcaggccgccgtgcatgcctcggggagcccctggcccgcatggagctcttcctcttcttcacctccctgctgcagcacttcagcttctccgtggccgccggacagccccggcccagccactctcgtgtcgtcagctttctggtgaccccatccccctacgagctttgtgctgtgccccgctagaatggggtacctagtccccagcctgctccctagccagaggctctaatgtacaataaagcaatgtggtagttcc

SEQ ID NO: 103661 - DNA, 1411 bp, Homo sapiens
  Payload ID: 375
  Gene Symbol:
  Gene Name: AC254788.1
  ENST ID: ENST00000634748
  CDS Start-End: 1-1338
atggggctagaagcactggtgcccctggccatgatagtggccatcttcctgctcctggtggacctgatgcaccggcaccaacgctgggctgcacgctacccgccaggtcccctgccactgcccgggctgggcaaccttcatgtggacttccagaacacaccatactgcttcgaccagttgcggcgccgcttcggggacgtgttcagcctgcagctggcctggacgccggtggtcgtgctcaatgggctggcggccgtgcgcgaggcgatggtgacccgcggcgaggacacggccgaccgcccgcctgcgcccatctaccaggtcctgggcttcgggccgcgttcccaaggacgcccctttcgccccaacggcctcttggacaaagccgtgagcaacgtgatcgcctccctcacctgcgggcgccgcttcgagtacgacgaccctcgcttcctcaggctgctggacctagctcaggagggactgaaggaggagtcgggcttcctgcgcgaggtgctgaatgctgtccccgtcctcccgcacatcccagcgctggctggcaaggtcctacgcttccaaaaggctttcctgacccagctggatgagctgctaactgagcacaggatgacctgggacccagcccagccaccccgagacctgactgaggccttcctggcaaagaaggagaaggccaaggggagccctgagagcagcttcaatgatgagaacctgcgcatagtggtgggtaacctgttccttgccgggatggtgaccacctcgaccacgctggcctggggcctcctgctcatgatcctacacctggatgtgcagctccgtgtccaacaggagatcgacgacgtgatagggcaggtgcggcgaccagagatgggtgaccaggctcacatgccctgcaccactgccgtgattcacgaggtgcagcgctttggggacatcatccccctgagtgtgacccatatgacatcccgtgacatcgaagtacagggcttccgcatccctaagggaacgacactcatcaccaacctgtcatcggtgctgaaggatgaggccgtctggaagaagcccttccgcttccaccccgaacacttcctggatgcccagggccactttgtgaagccggaggccttcctgcctttctcagcaggccgccgtgcatgcctcggggagcccctggcccgcatggagctcttcctcttcttcacctccctgctgcagcacttcagcttctccgtggccgccggacagccccggcccagccactctcgtgtcgtcagctttctggtgaccccatccccctacgagctttgtgctgtgccccgctagaatggggtacctagtccccagcctgctccctagccagaggctctaatgtacaataaagcaatgtggtagttcc

SEQ ID NO: 103662 - DNA, 1657 bp, Homo sapiens
  Payload ID: 375
  Gene Symbol:
  Gene Name: AC254788.1
  ENST ID: ENST00000634470
  CDS Start-End: 91-1584
gtgccgagagtgtcctgcctggtcctctgtgcctggtggggtgggggtgccaggtgtgtccagaggagcccagttggtagtgaggcagccatggggctagaagcactggtgcccctggccatgatagtggccatcttcctgctcctggtggacctgatgcaccggcaccaacgctgggctgcacgctacccgccaggtcccctgccactgcccgggctgggcaacttgctgcatgtggacttccagaacacaccatactgcttcgaccagttgcggcgccgcttcggggacgtgttcagcctgcagctggcctggacgccggtggtcgtgctcaatgggctggcggccgtgcgcgaggcgatggtgacccgcggcgaggacacggccgaccgcccgcctgcgcccatctaccaggtcctgggcttcgggccgcgttcccaaggggtgatcctgtcgcgctatgggcccgcgtggcgcgagcagaggcgcttctccgtgtccactttgcgcaacttgggcctgggcaagaagtcgctggagcagtgggtgaccgaggaggccgcctgcctttgtgccgccttcgccgaccaagccggacgcccctttcgccccaacggcctcttggacaaagccgtgagcaacgtgatcgcctccctcacctgcgggcgccgcttcgagtacgacgaccctcgcttcctcaggctgctggacctagctcaggagggactgaaggaggagtcgggcttcctgcgcgaggtgctgaatgctgtccccgtcctcccgcacatcccagcgctggctggcaaggtcctacgcttccaaaaggctttcctgacccagctggatgagctgctaactgagcacaggatgacctgggacccagcccagccaccccgagacctgactgaggccttcctggcaaagaaggagaaggccaaggggagccctgagagcagcttcaatgatgagaacctgcgcatagtggtgggtaacctgttccttgccgggatggtgaccacctcgaccacgctggcctggggcctcctgctcatgatcctacacctggatgtgcagctccgtgtccaacaggagatcgacgacgtgatagggcaggtgcggcgaccagagatgggtgaccaggctcacatgccctgcaccactgccgtgattcacgaggtgcagcgctttggggacatcatccccctgagtgtgacccatatgacatcccgtgacatcgaagtacagggcttccgcatccctaagggaacgacactcatcaccaacctgtcatcggtgctgaaggatgaggccgtctggaagaagcccttccgcttccaccccgaacacttcctggatgcccagggccactttgtgaagccggaggccttcctgcctttctcagcaggccgccgtgcatgcctcggggagcccctggcccgcatggagctcttcctcttcttcacctccctgctgcagcacttcagcttctccgtggccgccggacagccccggcccagccactctcgtgtcgtcagctttctggtgaccccatccccctacgagctttgtgctgtgccccgctagaatggggtacctagtccccagcctgctccctagccagaggctctaatgtacaataaagcaatgtggtagttcc

SEQ ID NO: 103663 - DNA, 1564 bp, Homo sapiens
  Payload ID: 375
  Gene Symbol:
  Gene Name: AC254788.1
  ENST ID: ENST00000635319
  CDS Start-End: 1-1491
atggggctagaagcactggtgcccctggccatgatagtggccatcttcctgctcctggtggacctgatgcaccggcaccaacgctgggctgcacgctacccgccaggtcccctgccactgcccgggctgggcaaccttcatgtggacttccagaacacaccatactgcttcgaccagttgcggcgccgcttcggggacgtgttcagcctgcagctggcctggacgccggtggtcgtgctcaatgggctggcggccgtgcgcgaggcgatggtgacccgcggcgaggacacggccgaccgcccgcctgcgcccatctaccaggtcctgggcttcgggccgcgttcccaaggggtgatcctgtcgcgctatgggcccgcgtggcgcgagcagaggcgcttctccgtgtccactttgcgcaacttgggcctgggcaagaagtcgctggagcagtgggtgaccgaggaggccgcctgcctttgtgccgccttcgccgaccaagccggacgcccctttcgccccaacggcctcttggacaaagccgtgagcaacgtgatcgcctccctcacctgcgggcgccgcttcgagtacgacgaccctcgcttcctcaggctgctggacctagctcaggagggactgaaggaggagtcgggcttcctgcgcgaggtgctgaatgctgtccccgtcctcccgcacatcccagcgctggctggcaaggtcctacgcttccaaaaggctttcctgacccagctggatgagctgctaactgagcacaggatgacctgggacccagcccagccaccccgagacctgactgaggccttcctggcaaagaaggagaaggccaaggggagccctgagagcagcttcaatgatgagaacctgcgcatagtggtgggtaacctgttccttgccgggatggtgaccacctcgaccacgctggcctggggcctcctgctcatgatcctacacctggatgtgcagctccgtgtccaacaggagatcgacgacgtgatagggcaggtgcggcgaccagagatgggtgaccaggctcacatgccctgcaccactgccgtgattcacgaggtgcagcgctttggggacatcatccccctgagtgtgacccatatgacatcccgtgacatcgaagtacagggcttccgcatccctaagggaacgacactcatcaccaacctgtcatcggtgctgaaggatgaggccgtctggaagaagcccttccgcttccaccccgaacacttcctggatgcccagggccactttgtgaagccggaggccttcctgcctttctcagcaggccgccgtgcatgcctcggggagcccctggcccgcatggagctcttcctcttcttcacctccctgctgcagcacttcagcttctccgtggccgccggacagccccggcccagccactctcgtgtcgtcagctttctggtgaccccatccccctacgagctttgtgctgtgccccgctagaatggggtacctagtccccagcctgctccctagccagaggctctaatgtacaataaagcaatgtggtagttcc

SEQ ID NO: 103664 - DNA, 1657 bp, Homo sapiens; identical to SEQ ID NO: 103634
  Payload ID: 376
  Gene Symbol:
  Gene Name: AC254847.1
  ENST ID: ENST00000634534
  CDS Start-End: 91-1584

SEQ ID NO: 103665 - DNA, 1504 bp, Homo sapiens; identical to SEQ ID NO: 103635
  Payload ID: 376
  Gene Symbol:
  Gene Name: AC254847.1
  ENST ID: ENST00000635122
  CDS Start-End: 91-1431

SEQ ID NO: 103666 - DNA, 1012 bp, Homo sapiens
  Payload ID: 377
  Gene Symbol:
  Gene Name: AC254944.3
  ENST ID: ENST00000633373
  CDS Start-End: 146-949
gggggtcggggccgcagaagtgccagacggggccggaaagcagccgagcggagttcaaatttgagagcgtttggaaattggaagacttggtggcgaacgagggtcaggacctgcatcctgcctcagagttatcgacgtatccggaatgtgggatcagaggctggtgaagttggccctgttgcagcatctgcgggccttctatggtattaaggtgaagggtgtccgtgggcagtgcgatcgcaggagacatgaaacagcagccacggaaatagggggtaaaatatttggagtaccttttaatgcactgccccattctgctgtaccagaatatggacacattccaagctttcttgtcgatgcttgcacatctttagaagaacatattcataccgaagggctttttcggaaatcaggatctgtgattcgcctaaaagcactaaagaataaagtggatcatggtgaaggttgcctatcttctgcacctccttgtgatattgcgggacttcttaagcagttttttagggaactgccagagcccattctcccagctgatttgcatgaagcacttttgaaagctcaacagttaggcacagaggaaaagaataaagctatactgttgctctcctgtcttctggctgaccacacagttcatgtattaagatacttctttaactttctcaggaatgtttctcttagatccagtgagaataagatggatagcagcaatcttgcagtaatatttgcaccaaatcttcttcagacaagtgaaggacatgaaaagatgtcttctaacgcagaaaagaagggcgtgtaccagactttatcctggaaaagataccagccatgttgggtattgatggtctctgtgctactccatcactggaaggctttgaagaaggtgaatatgaaactcctggtgaatataagagaaagagaagacaacgtgtaggagattttgttagtggagcactaaataaatttaaacctaacagaacaccttctattacacctc

SEQ ID NO: 103667 - DNA, 1408 bp, Homo sapiens
  Payload ID: 378
  Gene Symbol:
  Gene Name: AC254995.1
  ENST ID: ENST00000626205
  CDS Start-End: 1-1335
atggggctagaagcactggtgcccctggccatgatagtggccatcttcctgctcctggtggacctgatgcaccggcaccaacgctgggctgcacgctacccgccaggtcccctgccactgcccgggctgggcaaccttcatgtggacttccagaacacaccatactgcttcgaccagttgcggcgccgcttcggggacgtgttcagcctgcagctggcctggacgccggtggtcgtgctcaatgggctggcggccgtgcgcgaggcgatggtgacccgcggcgaggacacggccgaccgcccgcctgcgcccatctaccaggtcctgggcttcgggccgcgttcccaaggacgcccctttcgccccaacggtctcttggacaaagccgtgagcaacgtgatcgcctccctcacctgcgggcgccgcttcgagtacgacgaccctcgcttcctcaggctgctggacctagctcagggatcgaaggaggagtcgggcttcctgcgcgaggtgctgaatgctgtccccgtcctcccgcacatcccagcgctggctggcaaggtcctacgcttccaaaaggctttcctgacccagctggatgagctgctaactgagcacaggatgacctgggacccagcccagccaccccgagacctgactgaggccttcctggcaaagaaggagaaggccaaggggagccctgagagcagcttcaatgatgagaacctgcgcatagtggtgggtaacctgttccttgccgggatggtgaccaccttgaccacgctggcctggggcctcctgctcatgatcctacacctggatgtgcagctccgtgtccaacaggagatcgacgacgtgatagggcaggtgcggcgaccagagatgggtgaccaggctcacatgccctacaccactgccgtgattcatgaggtgcagcgctttggggacatcgtccccctgggtgtgacccatatgacatcccgtgacatcgaagtacagggcttccgcatccctaagggaacgacactcatcaccaacctgtcatcggtgctgaaggatgaggccgtctgggagaagcccttccgcttccaccccgaacacttcctggatgcccagggccactttgtgaagccggaggccttcctgcctttctcagcaggccgccgtgcatgcctcggggagcccctggcccgcatggagctcttcctcttcttcacctccctgctgcagcacttcagcttctccgtggccgccggacagccccggcccagccactctcgtgtcgtcagctttctggtgaccccatccccctatgagctttgtgctgtgccccgctagaatggggtacctagtccccagcctgctccctagccagaggctctaatgtacaataaagcaatgtggtagttcc

SEQ ID NO: 103668 - DNA, 1657 bp, Homo sapiens
  Payload ID: 378
  Gene Symbol:
  Gene Name: AC254995.1
  ENST ID: ENST00000630405
  CDS Start-End: 91-1584
gtgctgagagtgtcctgcctggtcctctgtgcctggtggggtgggggtgccaggtgtgtccagaggagcccagttggtagtgaggcagccatggggctagaagcactggtgcccctggccatgatagtggccatcttcctgctcctggtggacctgatgcaccggcaccaacgctgggctgcacgctacccgccaggtcccctgccactgcccgggctgggcaacttgctgcatgtggacttccagaacacaccatactgcttcgaccagttgcggcgccgcttcggggacgtgttcagcctgcagctggcctggacgccggtggtcgtgctcaatgggctggcggccgtgcgcgaggcgatggtgacccgcggcgaggacacggccgaccgcccgcctgcgcccatctaccaggtcctgggcttcgggccgcgttcccaaggggtgatcctgtcgcgctatgggcccgcgtggcgcgagcagaggcgcttctccgtgtccaccttgcgcaacttgggcctgggcaagaagtcgctggagcagtgggtgaccgaggaggccgcctgcctttgtgccgccttcgccgaccaagccggacgcccctttcgccccaacggtctcttggacaaagccgtgagcaacgtgatcgcctccctcacctgcgggcgccgcttcgagtacgacgaccctcgcttcctcaggctgctggacctagctcaggagggatcgaaggaggagtcgggcttcctgcgcgaggtgctgaatgctgtccccgtcctcccgcacatcccagcgctggctggcaaggtcctacgcttccaaaaggctttcctgacccagctggatgagctgctaactgagcacaggatgacctgggacccagcccagccaccccgagacctgactgaggccttcctggcaaagaaggagaaggccaaggggagccctgagagcagcttcaatgatgagaacctgcgcatagtggtgggtaacctgttccttgccgggatggtgaccaccttgaccacgctggcctggggcctcctgctcatgatcctacacctggatgtgcagctccgtgtccaacaggagatcgacgacgtgatagggcaggtgcggcgaccagagatgggtgaccaggctcacatgccctacaccactgccgtgattcatgaggtgcagcgctttggggacatcgtccccctgggtgtgacccatatgacatcccgtgacatcgaagtacagggcttccgcatccctaagggaacgacactcatcaccaacctgtcatcggtgctgaaggatgaggccgtctgggagaagcccttccgcttccaccccgaacacttcctggatgcccagggccactttgtgaagccggaggccttcctgcctttctcagcaggccgccgtgcatgcctcggggagcccctggcccgcatggagctcttcctcttcttcacctccctgctgcagcacttcagcttctccgtggccgccggacagccccggcccagccactctcgtgtcgtcagctttctggtgaccccatccccctatgagctttgtgctgtgccccgctagaatggggtacctagtccccagcctgctccctagccagaggctctaatgtacaataaagcaatgtggtagttcc

SEQ ID NO: 103669 - DNA, 3316 bp, Homo sapiens
  Payload ID: 379
  Gene Symbol: AACS
  Gene Name: acetoacetyl-CoA synthetase
  Uniprot ID: Q86V21
  ENST ID: ENST00000316519
  CDS Start-End: 207-2225
ggcctgcggggcggggcctgggccaagcggcccgcaggaggcggcggcggccgttcagtcccttgttccccgccgccgccgtcgctgacccagcccgccaggcgctcctgaccgtcgcttcctccggtcccaggtccccggccctcgcctcagccccggcccctggtccccagccctcgtcgcagccccggccgcccgccgccgccatgtccaaggaggagcgccccggtcgggaggagatcctggagtgccaggtgatgtgggagcctgacagtaagaagaacacgcagatggaccgcttccgggcggctgtgggcgccgcctgcggcctggcgctggagagttatgatgacttgtaccattggtccgttgagtcatattcagacttctgggcagagttctggaaattcagtggaattgtcttctcacgtgtgtatgatgaggttgtggacacatcgaaaggaatcgcagatgtccccgagtggttcaaaggcagtcggctcaactatgcagaaaacctcctgcggcacaaagagaatgacagagttgccctttacattgcaagggaaggcaaagaggaaattgtgaaggtgacttttgaagagctgaggcaagaagtggctttgtttgcagcagcaatgaggaaaatgggtgtgaagaaaggagatcgggttgttggttatttacccaacagtgagcacgctgtcgaggcgatgctggctgcggcaagcattggtgccatctggagctccacgtccccggacttcggtgtgaatggtgtgctggaccggttttctcaaattcagccaaagctcatcttctctgtggaggctgttgtctataatggcaaagagcacaaccacatggaaaagctgcagcaggtggttaaaggcctaccagacttgaagaaagtggtggtgattccttatgtgtcctccagagagaacatagacctttcaaagattccaaacagtgtgtttctggatgactttcttgccaccggcaccagtgagcaggccccgcagctggagttcgagcagctgcccttcagccacccactgttcatcatgttctcatcgggcaccacgggcgcacccaagtgcatggtgcattccgctgggggcaccctcatccagcatctgaaggagcacctgctgcacggcaacatgaccagcagtgacatcctcctgtgctacaccacggtcggctggatgatgtggaactggatggtgtcccttctggccacaggagcggccatggtcttgtacgatggctcccccctggtgcccacgcccaatgtgctctgggacctggttgacaggataggcatcactgtcctggtaactggggccaagtggctgtcagtgctggaagagaaggccatgaagccggtggaaacccacagtctccagatgctccacacgatcctgtccactggctccccactgaaagcccagagctacgagtatgtctacaggtgcatcaagagcagcatcctcctgggctccatctcaggaggcaccgacatcatctcctgcttcatgggccacaatttttctcttcctgtgtataaaggggagattcaggcccggaacctgggcatggccgtggaagcgtggaacgaggaaggaaaggcggtctggggagagagcggcgagctggtgtgtactaagccgatcccttgccagcccacacacttctggaacgatgagaacggcaacaagtacaggaaggcgtatttctccaaattcccaggtatctgggctcatggcgactactgcagaatcaaccccaagaccgggggcatcgtcatgcttggccggagtgacggcaccctcaaccccaacggggtgcggttcggcagctcggaaatctataacattgtggaatccttcgaggaggtggaggacagcctgtgtgtcccccagtataacaagtacagggaggagagggtgatcctcttcctgaagatggcctccgggcacgccttccagcctgacttggttaagaggatccgtgacgccatccgcatgggcttgtctgcgcgacacgtgcccagcctcatcctggaaaccaagggcatcccgtatacgctcaacggcaagaaagtggaagttgccgtcaaacagatcatcgctggaaaagccgtggagcaaggaggtgctttctcgaaccccgagaccctggatctgtaccgggacatccctgagctgcagggcttctgagtcagactggctggcgtgtcactcagccgcacccgtgtgcactgtaacttttgtgtgctcaagaaattatacagaaacctacagctgttgtaaaaggatgctcgcaccaagtgttctgtaggcttggggagggatcgtttctctgttttgttaaatctggtgggtacctggatcttccacacgagtgggattctggccttcagagaccaggagggagtgtctgggccgcaggtgtggcactgtggtgagagtgtgtgtctttgcacacacagtgcagcgggaacggtggggctggctggtgctgaagacagacacactcctgagccaaggtcttgtcttcaacctccccgtcccgttgtcccattttgctctgtgaaggtgcaaatccctttcttcccttcccatctcaggctctcctgttttccctcagggtccagtatgcctttgagctttagctgttagaaaggaacccccgtgacttgacacagctttcacagctggctgctaggaccggcgggctgggtgttcacgtgtgtctgtgtcatggatgcaatgcaggccctggaggactgtgcgtcacccgtcaaccagagcgtgcctccgggccagcttccctccaaggaatgagtggatttcatacaggatctctttattgcacagactgaatggctttacatgtttctaatgtgaattaggcatgtgaagcagtgggtgtccacccgtgtccctcatgggtgagccctccagctgtgagcccaggcagtgtggtcaccgagtgaggaccctcctcaccaggaaccgcatccctgtgctgcctccacctgagagttgctagggggttcttgtcgagatcatgtcatcagcacccctaagtcaagtcacgggtttccatagccaggcagttggtatgtacaattcagttcagcgtatgaacttgtatctctaatctgatgtccatttttatattttttgaaactgagcacaatgaaatcctttcttgaatcattttccttttggattataaaaatatgggggaaagtgctatgatgaattttatgcaataaatgtatacatgtgtgcacatgcaccca

SEQ ID NO: 103670 - DNA, 1235 bp, Homo sapiens
  Payload ID: 379
  Gene Symbol: AACS
  Gene Name: acetoacetyl-CoA synthetase
  ENST ID: ENST00000418937
  CDS Start-End: 152-808
cagtcccttgttccccgccgccgccgtcgctgacccagcccgccaggcgctcctgaccgtcgcttcctccggtcccaggtccccggccctcgcctcagccccggcccctggtccccagccctcgtcgcagccccggccgcccgccgccgccatgtccaaggaggagcgccccggtcgggaggagatcctggagtgccaggtgatgtgggagcctgacagtaagaagaacacgcagatggaccgcttccgggcggctgtgggcgccgcctgcggcctggcgctggagagttatgatgacttgtaccattggtccgttgagtcatattcagacttctgggcagagttctggaaattcagtggaattgtcttctcacgtgtgtatgatgaggttgtggacacatcgaaaggaatcgcagatgtccccgagtggttcaaaggcagtcggctcaactatgcagaaaacctcctgcggcacaaagagaatgacagagttgccctttacattgcaaatcagcacaagaaaccaaaccactggaaacaggcagtgagtggccctgcccaggctacagagcagggcctcccttctgccatcgtgggaaggaccagcagcccctgtgcagttggtaaagatcatggcagtccagttcccaccgagacttactgggacacatcttccggggctggggcccaggcttccatgtattttcaaagcccatgggcacttctgatgcacattcctggtgaagagccatggagcaacgtctcgacgtaccatatggggctggggaaggcaaagaggaaattgtgaaggtgacttttgaagagctgaggcaagaagtggctttgtttgcagcagcaatgaggaaaatgggtgtgaagaaaggagatcgggttgttggttatttacccaacagtgagcacgctgtcgaggcgatgctggctgcggcaagcattggtgccatctggagctccacgtccccggacttcggtgtgaatggtgtgctggaccggttttctcaaattcagccaaagctcatcttctctgtggaggctgttgtctataatggcaaagagcacaaccacatggaaaagctgcagcaggtggttaaaggcctaccagacttgaagaaagtggtggtgattccttatgtgtcctccagagagaacatagacctttcaaagattccaaacagtgtgtttctggatgactttcttgccaccggcaccagtgagca

SEQ ID NO: 103671 - DNA, 2172 bp, Homo sapiens
  Payload ID: 380
  Gene Symbol: ACHE
  Gene Name: acetylcholinesterase (Yt blood group)
  Uniprot ID: P22303
  ENST ID: ENST00000241069
  CDS Start-End: 108-1952
gtcagagtcggctcagcctgcgccggggaacatcggccgcctccagctcccggcgcggcccggcccggcccggctcggccgcctcagacgccgcctgccctgcagccatgaggcccccgcagtgtctgctgcacacgccttccctggcttccccactccttctcctcctcctctggctcctgggtggaggagtgggggctgagggccgggaggatgcagagctgctggtgacggtgcgtgggggccggctgcggggcattcgcctgaagacccccgggggccctgtctctgctttcctgggcatcccctttgcggagccacccatgggaccccgtcgctttctgccaccggagcccaagcagccttggtcaggggtggtagacgctacaaccttccagagtgtctgctaccaatatgtggacaccctatacccaggttttgagggcaccgagatgtggaaccccaaccgtgagctgagcgaggactgcctgtacctcaacgtgtggacaccatacccccggcctacatcccccacccctgtcctcgtctggatctatgggggtggcttctacagtggggcctcctccttggacgtgtacgatggccgcttcttggtacaggccgagaggactgtgctggtgtccatgaactaccgggtgggagcctttggcttcctggccctgccggggagccgagaggccccgggcaatgtgggtctcctggatcagaggctggccctgcagtgggtgcaggagaacgtggcagccttcgggggtgacccgacatcagtgacgctgtttggggagagcgcgggagccgcctcggtgggcatgcacctgctgtccccgcccagccggggcctgttccacagggccgtgctgcagagcggtgcccccaatggaccctgggccacggtgggcatgggagaggcccgtcgcagggccacgcagctggcccaccttgtgggctgtcctccaggcggcactggtgggaatgacacagagctggtagcctgccttcggacacgaccagcgcaggtcctggtgaaccacgaatggcacgtgctgcctcaagaaagcgtcttccggttctccttcgtgcctgtggtagatggagacttcctcagtgacaccccagaggccctcatcaacgcgggagacttccacggcctgcaggtgctggtgggtgtggtgaaggatgagggctcgtattttctggtttacggggccccaggcttcagcaaagacaacgagtctctcatcagccgggccgagttcctggccggggtgcgggtcggggttccccaggtaagtgacctggcagccgaggctgtggtcctgcattacacagactggctgcatcccgaggacccggcacgcctgagggaggccctgagcgatgtggtgggcgaccacaatgtcgtgtgccccgtggcccagctggctgggcgactggctgcccagggtgcccgggtctacgcctacgtctttgaacaccgtgcttccacgctctcctggcccctgtggatgggggtgccccacggctacgagatcgagttcatctttgggatccccctggacccctctcgaaactacacggcagaggagaaaatcttcgcccagcgactgatgcgatactgggccaactttgcccgcacaggggatcccaatgagccccgagaccccaaggccccacaatggcccccgtacacggcgggggctcagcagtacgttagtctggacctgcggccgctggaggtgcggcgggggctgcgcgcccaggcctgcgccttctggaaccgcttcctccccaaattgctcagcgccaccgacacgctcgacgaggcggagcgccagtggaaggccgagttccaccgctggagctcctacatggtgcactggaagaaccagttcgaccactacagcaagcaggatcgctgctcagacctgtgaccccggcgggacccccatgtcctccgctccgcccggccccctagctgtatatactatttatttcagggctgggctataacacagacgagccccagactctgcccatccccaccccaccccgacgtcccccggggctcccggtcctctgcatgtctcaggctgagctccctcccccgcggtgccttcgcccctctgggctgccaataaactgttacagcca

SEQ ID NO: 103672 - DNA, 2956 bp, Homo sapiens
  Payload ID: 380
  Gene Symbol: ACHE
  Gene Name: acetylcholinesterase (Yt blood group)
  Uniprot ID: P22303
  ENST ID: ENST00000302913
  CDS Start-End: 140-1993
ggggtgtgtgcggggggccggaggcggcggctgtcagagtcggctcagcctgcgccggggaacatcggccgcctccagctcccggcgcggcccggcccggcccggctcggccgcctcagacgccgcctgccctgcagccatgaggcccccgcagtgtctgctgcacacgccttccctggcttccccactccttctcctcctcctctggctcctgggtggaggagtgggggctgagggccgggaggatgcagagctgctggtgacggtgcgtgggggccggctgcggggcattcgcctgaagacccccgggggccctgtctctgctttcctgggcatcccctttgcggagccacccatgggaccccgtcgctttctgccaccggagcccaagcagccttggtcaggggtggtagacgctacaaccttccagagtgtctgctaccaatatgtggacaccctatacccaggttttgagggcaccgagatgtggaaccccaaccgtgagctgagcgaggactgcctgtacctcaacgtgtggacaccatacccccggcctacatcccccacccctgtcctcgtctggatctatgggggtggcttctacagtggggcctcctccttggacgtgtacgatggccgcttcttggtacaggccgagaggactgtgctggtgtccatgaactaccgggtgggagcctttggcttcctggccctgccggggagccgagaggccccgggcaatgtgggtctcctggatcagaggctggccctgcagtgggtgcaggagaacgtggcagccttcgggggtgacccgacatcagtgacgctgtttggggagagcgcgggagccgcctcggtgggcatgcacctgctgtccccgcccagccggggcctgttccacagggccgtgctgcagagcggtgcccccaatggaccctgggccacggtgggcatgggagaggcccgtcgcagggccacgcagctggcccaccttgtgggctgtcctccaggcggcactggtgggaatgacacagagctggtagcctgccttcggacacgaccagcgcaggtcctggtgaaccacgaatggcacgtgctgcctcaagaaagcgtcttccggttctccttcgtgcctgtggtagatggagacttcctcagtgacaccccagaggccctcatcaacgcgggagacttccacggcctgcaggtgctggtgggtgtggtgaaggatgagggctcgtattttctggtttacggggccccaggcttcagcaaagacaacgagtctctcatcagccgggccgagttcctggccggggtgcgggtcggggttccccaggtaagtgacctggcagccgaggctgtggtcctgcattacacagactggctgcatcccgaggacccggcacgcctgagggaggccctgagcgatgtggtgggcgaccacaatgtcgtgtgccccgtggcccagctggctgggcgactggctgcccagggtgcccgggtctacgcctacgtctttgaacaccgtgcttccacgctctcctggcccctgtggatgggggtgccccacggctacgagatcgagttcatctttgggatccccctggacccctctcgaaactacacggcagaggagaaaatcttcgcccagcgactgatgcgatactgggccaactttgcccgcacaggggatcccaatgagccccgagaccccaaggccccacaatggcccccgtacacggcgggggctcagcagtacgttagtctggacctgcggccgctggaggtgcggcgggggctgcgcgcccaggcctgcgccttctggaaccgcttcctccccaaattgctcagcgccaccgcctcggaggctcccagcacctgcccaggcttcacccatggggaggctgctccgaggcccggcctccccctgcccctcctcctcctccaccagcttctcctcctcttcctctcccacctccggcggctgtgaacacggcctcttcccctacggccacaggggcccctcctctaatgagtggtcggaccgtggggaagggccccactcagggatctcagacctagtgctcccttcctcctcaaaccgagagactcacactggacagggcaggaggagggggccgtgcctcccacccttctcagggacccccacgcctttgttgtttgaatggaaatggaaaagccagtattcttttataaaattatcttttggaacctgagcctgacattggggggaagtgggaggccccggacggggtagcaccccccattggggctataacggtcaaccatttctgtctcttctttttcccccaacctccccctcctgtcccctctgttcccgtcttccggtcattcttttctcctcctctctccttcctgctgtccttctccggccccgcctctgccctcatcctccctctcgtctttcgcacattctcctgatcctcttgccaccgtcccacgtggtcgcctgcatttctccgtgcgtcctccctgcactcatacccccccttcaacccgcccaaatgtccgatccccgaccttcctcgtgccgtcctcccctcccgcctcgctgggcgccctggccgcagacacgctcgacgaggcggagcgccagtggaaggccgagttccaccgctggagctcctacatggtgcactggaagaaccagttcgaccactacagcaagcaggatcgctgctcagacctgtgaccccggcgggacccccatgtcctccgctccgcccggccccctagctgtatatactatttatttcagggctgggctataacacagacgagccccagactctgcccatccccaccccaccccgacgtcccccggggctcccggtcctctgcatgtctcaggctgagctccctcccccgcggtgccttcgcccctctgggctgccaataaactgttacagcc

SEQ ID NO: 103673 - DNA, 1496 bp, Homo sapiens
  Payload ID: 380
  Gene Symbol: ACHE
  Gene Name: acetylcholinesterase (Yt blood group)
  ENST ID: ENST00000454485
  CDS Start-End: 2-1213
catgaggcccccgcagtgtctgctgcacacgccttccctggcttccccactccttctcctcctcctctggctcctgggtggaggagtgggggctgagggccgggaggatgcagagctgctggtgacggtgcgtgggggccggctgcggggcattcgcctgaagacccccgggggccctgtctctgctttcctgggcatcccctttgcggagccacccatgggaccccgtcgctttctgccaccggagcccaagcagccttggtcaggggtggtagacgctacaaccttccagagtgtctgctaccaatatgtggacaccctatacccaggttttgagggcaccgagatgtggaaccccaaccgtgagctgagcgaggactgcctgtacctcaacgtgtggacaccatacccccggcctacatcccccacccctgtcctcgtctggatctatgggggtggcttctacagtggggcctcctccttggacgtgtacgatggccgcttcttggtacaggccgagaggactgtgctggtgtccatgaactaccgggtgggagcctttggcttcctggccctgccggggagccgagaggccccgggcaatgtgggtctcctggatcagaggctggccctgcagtgggtgcaggagaacgtggcagccttcgggggtgacccgacatcagtgacgctgtttggggagagcgcgggagccgcctcggtgggcatgcacctgctgtccccgcccagccggggcctgttccacagggccgtgctgcagagcggtgcccccaatggaccctgggccacggtgggcatgggagaggcccgtcgcagggccacgcagctggcccaccttgtgggctgtcctccaggcggcactggtgggaatgacacagagctggtagcctgccttcggacacgaccagcgcaggtcctggtgaaccacgaatggcacgtgctgcctcaagaaagcgtcttccggttctccttcgtgcctgtggtagatggagacttcctcagtgacaccccagaggccctcatcaacgcgggagacttccacggcctgcaggtgctggtgggtgtggtgaaggatgagggctcgtattttctggtttacggggccccaggcttcagcaaagacaacgagtctctcatcagccgggccgagttcctggccggggtgcgggtcggggttccccagggatcccaatgagccccgagaccccaaggccccacaatggcccccgtacacggcgggggctcagcagtacgttagtctggacctgcggccgctggaggtgcggcgggggctgcgcgcccaggcctgcgccttctggaaccgcttcctccccaaattgctcagcgccaccgacacgctcgacgaggcggagcgccagtggaaggccgagttccaccgctggagctcctacatggtgcactggaagaaccagttcgaccactacagcaagcaggatcgctgctcagacctgtgaccc

SEQ ID NO: 103674 - DNA, 2218 bp, Homo sapiens
  Payload ID: 380
  Gene Symbol: ACHE
  Gene Name: acetylcholinesterase (Yt blood group)
  Uniprot ID: P22303
  ENST ID: ENST00000412389
  CDS Start-End: 157-2001
ctctcccctcatctttgccaacctgccccacctcctctgcagctgagcgataacccttgggccgacagtgccctaatctcctccctcctggcttctcgaccgacccttcaccctttccctttctttctcccagcagacgccgcctgccctgcagccatgaggcccccgcagtgtctgctgcacacgccttccctggcttccccactccttctcctcctcctctggctcctgggtggaggagtgggggctgagggccgggaggatgcagagctgctggtgacggtgcgtgggggccggctgcggggcattcgcctgaagacccccgggggccctgtctctgctttcctgggcatcccctttgcggagccacccatgggaccccgtcgctttctgccaccggagcccaagcagccttggtcaggggtggtagacgctacaaccttccagagtgtctgctaccaatatgtggacaccctatacccaggttttgagggcaccgagatgtggaaccccaaccgtgagctgagcgaggactgcctgtacctcaacgtgtggacaccatacccccggcctacatcccccacccctgtcctcgtctggatctatgggggtggcttctacagtggggcctcctccttggacgtgtacgatggccgcttcttggtacaggccgagaggactgtgctggtgtccatgaactaccgggtgggagcctttggcttcctggccctgccggggagccgagaggccccgggcaatgtgggtctcctggatcagaggctggccctgcagtgggtgcaggagaacgtggcagccttcgggggtgacccgacatcagtgacgctgtttggggagagcgcgggagccgcctcggtgggcatgcacctgctgtccccgcccagccggggcctgttccacagggccgtgctgcagagcggtgcccccaatggaccctgggccacggtgggcatgggagaggcccgtcgcagggccacgcagctggcccaccttgtgggctgtcctccaggcggcactggtgggaatgacacagagctggtagcctgccttcggacacgaccagcgcaggtcctggtgaaccacgaatggcacgtgctgcctcaagaaagcgtcttccggttctccttcgtgcctgtggtagatggagacttcctcagtgacaccccagaggccctcatcaacgcgggagacttccacggcctgcaggtgctggtgggtgtggtgaaggatgagggctcgtattttctggtttacggggccccaggcttcagcaaagacaacgagtctctcatcagccgggccgagttcctggccggggtgcgggtcggggttccccaggtaagtgacctggcagccgaggctgtggtcctgcattacacagactggctgcatcccgaggacccggcacgcctgagggaggccctgagcgatgtggtgggcgaccacaatgtcgtgtgccccgtggcccagctggctgggcgactggctgcccagggtgcccgggtctacgcctacgtctttgaacaccgtgcttccacgctctcctggcccctgtggatgggggtgccccacggctacgagatcgagttcatctttgggatccccctggacccctctcgaaactacacggcagaggagaaaatcttcgcccagcgactgatgcgatactgggccaactttgcccgcacaggggatcccaatgagccccgagaccccaaggccccacaatggcccccgtacacggcgggggctcagcagtacgttagtctggacctgcggccgctggaggtgcggcgggggctgcgcgcccaggcctgcgccttctggaaccgcttcctccccaaattgctcagcgccaccgacacgctcgacgaggcggagcgccagtggaaggccgagttccaccgctggagctcctacatggtgcactggaagaaccagttcgaccactacagcaagcaggatcgctgctcagacctgtgaccccggcgggacccccatgtcctccgctccgcccggccccctagctgtatatactatttatttcagggctgggctataacacagacgagccccagactctgcccatccccaccccaccccgacgtcccccggggctcccggtcctctgcatgtctcaggctgagctccctcccccgcggtgccttcgcccctctgggctgccaataaactgttacag

SEQ ID NO: 103675 - DNA, 585 bp, Homo sapiens
  Payload ID: 380
  Gene Symbol: ACHE
  Gene Name: acetylcholinesterase (Yt blood group)
  ENST ID: ENST00000441605
  CDS Start-End: 110-585
gtccctgcgtttgtctgtgcctgtcactgcatgaggtcgtccgtctgcgcgtgtctgtctccacgggcttctgtccgtctgtctgtcacacgccgcctgccctgcagccatgaggcccccgcagtgtctgctgcacacgccttccctggcttccccactccttctcctcctcctctggctcctgggtggaggagtgggggctgagggccgggaggatgcagagctgctggtgacggtgcgtgggggccggctgcggggcattcgcctgaagacccccgggggccctgtctctgctttcctgggcatcccctttgcggagccacccatgggaccccgtcgctttctgccaccggagcccaagcagccttggtcaggggtggtagacgctacaaccttccagagtgtctgctaccaatatgtggacaccctatacccaggttttgagggcaccgagatgtggaaccccaaccgtgagctgagcgaggactgcctgtacctcaacgtgtggacaccatacccccggcctacatcccccacccctgtcctcgtctggatctatgggggtggcttctacagtggggcctc

SEQ ID NO: 103676 - DNA, 1194 bp, Homo sapiens
  Payload ID: 380
  Gene Symbol: ACHE
  Gene Name: acetylcholinesterase (Yt blood group)
  ENST ID: ENST00000426415
  CDS Start-End: 2-1194
catgaggcccccgcagtgtctgctgcacacgccttccctggcttccccactccttctcctcctcctctggctcctgggtggaggagtgggggctgagggccgggaggatgcagagctgctggtgacggtgcgtgggggccggctgcggggcattcgcctgaagacccccgggggccctgtctctgctttcctgggcatcccctttgcggagccacccatgggaccccgtcgctttctgccaccggagcccaagcagccttggtcaggggtggtagacgctacaaccttccagagtgtctgctaccaatatgtggacaccctatacccaggttttgagggcaccgagatgtggaaccccaaccgtgagctgagcgaggactgcctgtacctcaacgtgtggacaccatacccccggcctacatcccccacccctgtcctcgtctggatctatgggggtggcttctacagtggggcctcctccttggacgtgtacgatggccgcttcttggtacaggccgagaggactgtgctggtgtccatgaactaccgggtgggagcctttggcttcctggccctgccggggagccgagaggccccgggcaatgtgggtctcctggatcagaggctggccctgcagtgggtgcaggagaacgtggcagccttcgggggtgacccgacatcagtgacgctgtttggggagagcgcgggagccgcctcggtgggcatgcacctgctgtccccgcccagccggggcctgttccacagggccgtgctgcagagcggtgcccccaatggaccctgggccacggtgggcatgggagaggcccgtcgcagggccacgcagctggcccaccttgtgggctgtcctccaggcggcactggtgggaatgacacagagctggtagcctgccttcggacacgaccagcgcaggtcctggtgaaccacgaatggcacgtgctgcctcaagaaagcgtcttccggttctccttcgtgcctgtggtagatggagacttcctcagtgacaccccagaggccctcatcaacgcgggagacttccacggcctgcagacacgctcgacgaggcggagcgccagtggaaggccgagttccaccgctggagctcctacatggtgcactggaagaaccagttcgaccactacagcaagcaggatcgctgctcagacctgtgaccc

SEQ ID NO: 103677 - DNA, 1305 bp, Homo sapiens
  Payload ID: 380
  Gene Symbol: ACHE
  Gene Name: acetylcholinesterase (Yt blood group)
  ENST ID: ENST00000430554
  CDS Start-End: 2-1305
catgaggcccccgcagtgtctgctgcacacgccttccctggcttccccactccttctcctcctcctctggctcctgggtggaggagtgggggctgagggccgggaggatgcagagctgctggtgacggtgcgtgggggccggctgcggggcattcgcctgaagacccccgggggccctgtctctgctttcctgggcatcccctttgcggagccacccatgggaccccgtcgctttctgccaccggagcccaagcagccttggtcaggggtggtagacgctacaaccttccagagtgtctgctaccaatatgtggacaccctatacccaggttttgagggcaccgagatgtggaaccccaaccgtgagctgagcgaggactgcctgtacctcaacgtgtggacaccatacccccggcctacatcccccacccctgtcctcgtctggatctatgggggtggcttctacagtggggcctcctccttggacgtgtacgatggccgcttcttggtacaggccgagaggactgtgctggtgtccatgaactaccgggtgggagcctttggcttcctggccctgccggggagccgagaggccccgggcaatgtgggtctcctggatcagaggctggccctgcagtgggtgcaggagaacgtggcagccttcgggggtgacccgacatcagtgacgctgtttggggagagcgcgggagccgcctcggtgggcatgcacctgctgtccccgcccagccggggcctgttccacagggccgtgctgcagagcggtgcccccaatggaccctgggccacggtgggcatgggagaggcccgtcgcagggccacgcagctggcccaccttgtgggctgtcctccaggcggcactggtgggaatgacacagagctggtagcctgccttcggacacgaccagcgcaggtcctggtgaaccacgaatggcacgtgctgcctcaagaaagcgtcttccggttctccttcgtgcctgtggtagatggagacttcctcagtgacaccccagaggccctcatcaacgcgggagacttccacggcctgcaggtgctggtgggtgtggtgaaggatgagggctcgtattttctggtttacggggccccaggcttcagcaaagacaacgagtctctcatcagccgggccgagttcctggccgggacacgctcgacgaggcggagcgccagtggaaggccgagttccaccgctggagctcctacatggtgcactggaagaaccagttcgaccactacagcaagcaggatcgctgctcagacctgtgaccc

SEQ ID NO: 103678 - DNA, 153 bp, Homo sapiens
  Payload ID: 380
  Gene Symbol: ACHE
  Gene Name: acetylcholinesterase (Yt blood group)
  ENST ID: ENST00000445236
  CDS Start-End: 70-153
cctcgcccagcagccttgcgcgtgctaccacgctgtcctgccttctcagacgccgcctgccctgcagccatgaggcccccgcagtgtctgctgcacacgccttccctggcttccccactccttctcctcctcctctggctcctgggtggagga

SEQ ID NO: 103679 - DNA, 1906 bp, Homo sapiens
  Payload ID: 380
  Gene Symbol: ACHE
  Gene Name: acetylcholinesterase (Yt blood group)
  Uniprot ID: P22303
  ENST ID: ENST00000419336
  CDS Start-End: 106-1686
cagagtcggctcagcctgcgccggggaacatcggccgcctccagctcccggcgcggcccggcccggcccggctcggccgcctcagacgccgcctgccctgcagccatgaggcccccgcagtgtctgctgcacacgccttccctggcttccccactccttctcctcctcctctggctcctgggtggaggagtgggggctgagggccgggaggatgcagagctgctggtgacggtgcgtgggggccggctgcggggcattcgcctgaagacccccgggggccctgtctctgctttcctgggcatcccctttgcggagccacccatgggaccccgtcgctttctgccaccggagcccaagcagccttggtcaggggtggtagacgctacaaccttccagagtgtctgctaccaatatgtggacaccctatacccaggttttgagggcaccgagatgtggaaccccaaccgtgagctgagcgaggactgcctgtacctcaacgtgtggacaccatacccccggcctacatcccccacccctgtcctcgtctggatctatgggggtggcttctacagtggggcctcctccttggacgtgtacgatggccgcttcttggtacaggccgagaggactgtgctggtgtccatgaactaccgggtgggagcctttggcttcctggccctgccggggagccgagaggccccgggcaatgtgggtctcctggatcagaggctggccctgcagtgggtgcaggagaacgtggcagccttcgggggtgacccgacatcagtgacgctgtttggggagagcgcgggagccgcctcggtgggcatgcacctgctgtccccgcccagccggggcctgttccacagggccgtgctgcagagcggtgcccccaatggaccctgggccacggtgggcatgggagaggcccgtcgcagggccacgcagctggcccaccttgtgggctgtcctccaggcggcactggtgggaatgacacagagctggtagcctgccttcggacacgaccagcgcaggtcctggtgaaccacgaatggcacgtgctgcctcaagaaagcgtcttccggttctccttcgtgcctgtggtagatggagacttcctcagtgacaccccagaggccctcatcaacgcgggagacttccacggcctgcagctggctgggcgactggctgcccagggtgcccgggtctacgcctacgtctttgaacaccgtgcttccacgctctcctggcccctgtggatgggggtgccccacggctacgagatcgagttcatctttgggatccccctggacccctctcgaaactacacggcagaggagaaaatcttcgcccagcgactgatgcgatactgggccaactttgcccgcacaggggatcccaatgagccccgagaccccaaggccccacaatggcccccgtacacggcgggggctcagcagtacgttagtctggacctgcggccgctggaggtgcggcgggggctgcgcgcccaggcctgcgccttctggaaccgcttcctccccaaattgctcagcgccaccgacacgctcgacgaggcggagcgccagtggaaggccgagttccaccgctggagctcctacatggtgcactggaagaaccagttcgaccactacagcaagcaggatcgctgctcagacctgtgaccccggcgggacccccatgtcctccgctccgcccggccccctagctgtatatactatttatttcagggctgggctataacacagacgagccccagactctgcccatccccaccccaccccgacgtcccccggggctcccggtcctctgcatgtctcaggctgagctccctcccccgcggtgccttcgcccctctgggctgccaataaactgttacagcca

SEQ ID NO: 103680 - DNA, 2179 bp, Homo sapiens
  Payload ID: 380
  Gene Symbol: ACHE
  Gene Name: acetylcholinesterase (Yt blood group)
  Uniprot ID: P22303
  ENST ID: ENST00000411582
  CDS Start-End: 84-1937
gaacatcggccgcctccagctcccggcgcggcccggcccggcccggctcggccgcctcagcagacgccgcctgccctgcagccatgaggcccccgcagtgtctgctgcacacgccttccctggcttccccactccttctcctcctcctctggctcctgggtggaggagtgggggctgagggccgggaggatgcagagctgctggtgacggtgcgtgggggccggctgcggggcattcgcctgaagacccccgggggccctgtctctgctttcctgggcatcccctttgcggagccacccatgggaccccgtcgctttctgccaccggagcccaagcagccttggtcaggggtggtagacgctacaaccttccagagtgtctgctaccaatatgtggacaccctatacccaggttttgagggcaccgagatgtggaaccccaaccgtgagctgagcgaggactgcctgtacctcaacgtgtggacaccatacccccggcctacatcccccacccctgtcctcgtctggatctatgggggtggcttctacagtggggcctcctccttggacgtgtacgatggccgcttcttggtacaggccgagaggactgtgctggtgtccatgaactaccgggtgggagcctttggcttcctggccctgccggggagccgagaggccccgggcaatgtgggtctcctggatcagaggctggccctgcagtgggtgcaggagaacgtggcagccttcgggggtgacccgacatcagtgacgctgtttggggagagcgcgggagccgcctcggtgggcatgcacctgctgtccccgcccagccggggcctgttccacagggccgtgctgcagagcggtgcccccaatggaccctgggccacggtgggcatgggagaggcccgtcgcagggccacgcagctggcccaccttgtgggctgtcctccaggcggcactggtgggaatgacacagagctggtagcctgccttcggacacgaccagcgcaggtcctggtgaaccacgaatggcacgtgctgcctcaagaaagcgtcttccggttctccttcgtgcctgtggtagatggagacttcctcagtgacaccccagaggccctcatcaacgcgggagacttccacggcctgcaggtgctggtgggtgtggtgaaggatgagggctcgtattttctggtttacggggccccaggcttcagcaaagacaacgagtctctcatcagccgggccgagttcctggccggggtgcgggtcggggttccccaggtaagtgacctggcagccgaggctgtggtcctgcattacacagactggctgcatcccgaggacccggcacgcctgagggaggccctgagcgatgtggtgggcgaccacaatgtcgtgtgccccgtggcccagctggctgggcgactggctgcccagggtgcccgggtctacgcctacgtctttgaacaccgtgcttccacgctctcctggcccctgtggatgggggtgccccacggctacgagatcgagttcatctttgggatccccctggacccctctcgaaactacacggcagaggagaaaatcttcgcccagcgactgatgcgatactgggccaactttgcccgcacaggggatcccaatgagccccgagaccccaaggccccacaatggcccccgtacacggcgggggctcagcagtacgttagtctggacctgcggccgctggaggtgcggcgggggctgcgcgcccaggcctgcgccttctggaaccgcttcctccccaaattgctcagcgccaccgcctcggaggctcccagcacctgcccaggcttcacccatggggaggctgctccgaggcccggcctccccctgcccctcctcctcctccaccagcttctcctcctcttcctctcccacctccggcggctgtgaacacggcctcttcccctacggccacaggggcccctcctctaatgagtggtcggaccgtggggaagggccccactcagggatctcagacctagtgctcccttcctcctcaaaccgagagactcacactggacagggcaggaggagggggccgtgcctcccacccttctcagggacccccacgcctttgttgtttgaatggaaatggaaaagccagtattcttttataaaattatcttttggaa

SEQ ID NO: 103681 - DNA, 1364 bp, Homo sapiens
  Payload ID: 380
  Gene Symbol: ACHE
  Gene Name: acetylcholinesterase (Yt blood group)
  ENST ID: ENST00000440755
  CDS Start-End: 2-1081
catgaggcccccgcagtgtctgctgcacacgccttccctggcttccccactccttctcctcctcctctggctcctgggtggaggagtgggggctgagggccgggaggatgcagagctgctggtgacggtgcgtgggggccggctgcggggcattcgcctgaagacccccgggggccctgtctctgctttcctgggcatcccctttgcggagccacccatgggaccccgtcgctttctgccaccggagcccaagcagccttggtcaggggtggtagacgctacaaccttccagagtgtctgctaccaatatgtggacaccctatacccaggttttgagggcaccgagatgtggaaccccaaccgtgagctgagcgaggactgcctgtacctcaacgtgtggacaccatacccccggcctacatcccccacccctgtcctcgtctggatctatgggggtggcttctacagtggggcctcctccttggacgtgtacgatggccgcttcttggtacaggccgagaggactgtgctggtgtccatgaactaccgggtgggagcctttggcttcctggccctgccggggagccgagaggccccgggcaatgtgggtctcctggatcagaggctggccctgcagtgggtgcaggagaacgtggcagccttcgggggtgacccgacatcagtgacgctgtttggggagagcgcgggagccgcctcggtgggcatgcacctgctgtccccgcccagccggggcctgttccacagggccgtgctgcagagcggtgcccccaatggaccctgggccacggtgggcatgggagaggcccgtcgcagggccacgcagctggcccaccttgtgggctgtcctccaggcggcactggtgggaatgacacagagctggtagcctgccttcggacacgaccagcgcaggtcctggtgaaccacgaatggcacgtgctgcctcaagaaagcgtcttccggttctccttcgtgcctgtggtagatggagacttcctcagtgacaccccagaggccctcatcaacgcgggagacttccacggcctgcagggatcccaatgagccccgagaccccaaggccccacaatggcccccgtacacggcgggggctcagcagtacgttagtctggacctgcggccgctggaggtgcggcgggggctgcgcgcccaggcctgcgccttctggaaccgcttcctccccaaattgctcagcgccaccgacacgctcgacgaggcggagcgccagtggaaggccgagttccaccgctggagctcctacatggtgcactggaagaaccagttcgaccactacagcaagcaggatcgctgctcagacctgtgaccc

SEQ ID NO: 103682 - DNA, 2159 bp, Homo sapiens
  Payload ID: 380
  Gene Symbol: ACHE
  Gene Name: acetylcholinesterase (Yt blood group)
  Uniprot ID: P22303
  ENST ID: ENST00000428317
  CDS Start-End: 95-1939
tctactccgccgctgcaggtctttgggtcgcgtctgtcactgcgctctgtcgtcggtcggcgtctggcactggaacgccgcctgccctgcagccatgaggcccccgcagtgtctgctgcacacgccttccctggcttccccactccttctcctcctcctctggctcctgggtggaggagtgggggctgagggccgggaggatgcagagctgctggtgacggtgcgtgggggccggctgcggggcattcgcctgaagacccccgggggccctgtctctgctttcctgggcatcccctttgcggagccacccatgggaccccgtcgctttctgccaccggagcccaagcagccttggtcaggggtggtagacgctacaaccttccagagtgtctgctaccaatatgtggacaccctatacccaggttttgagggcaccgagatgtggaaccccaaccgtgagctgagcgaggactgcctgtacctcaacgtgtggacaccatacccccggcctacatcccccacccctgtcctcgtctggatctatgggggtggcttctacagtggggcctcctccttggacgtgtacgatggccgcttcttggtacaggccgagaggactgtgctggtgtccatgaactaccgggtgggagcctttggcttcctggccctgccggggagccgagaggccccgggcaatgtgggtctcctggatcagaggctggccctgcagtgggtgcaggagaacgtggcagccttcgggggtgacccgacatcagtgacgctgtttggggagagcgcgggagccgcctcggtgggcatgcacctgctgtccccgcccagccggggcctgttccacagggccgtgctgcagagcggtgcccccaatggaccctgggccacggtgggcatgggagaggcccgtcgcagggccacgcagctggcccaccttgtgggctgtcctccaggcggcactggtgggaatgacacagagctggtagcctgccttcggacacgaccagcgcaggtcctggtgaaccacgaatggcacgtgctgcctcaagaaagcgtcttccggttctccttcgtgcctgtggtagatggagacttcctcagtgacaccccagaggccctcatcaacgcgggagacttccacggcctgcaggtgctggtgggtgtggtgaaggatgagggctcgtattttctggtttacggggccccaggcttcagcaaagacaacgagtctctcatcagccgggccgagttcctggccggggtgcgggtcggggttccccaggtaagtgacctggcagccgaggctgtggtcctgcattacacagactggctgcatcccgaggacccggcacgcctgagggaggccctgagcgatgtggtgggcgaccacaatgtcgtgtgccccgtggcccagctggctgggcgactggctgcccagggtgcccgggtctacgcctacgtctttgaacaccgtgcttccacgctctcctggcccctgtggatgggggtgccccacggctacgagatcgagttcatctttgggatccccctggacccctctcgaaactacacggcagaggagaaaatcttcgcccagcgactgatgcgatactgggccaactttgcccgcacaggggatcccaatgagccccgagaccccaaggccccacaatggcccccgtacacggcgggggctcagcagtacgttagtctggacctgcggccgctggaggtgcggcgggggctgcgcgcccaggcctgcgccttctggaaccgcttcctccccaaattgctcagcgccaccgacacgctcgacgaggcggagcgccagtggaaggccgagttccaccgctggagctcctacatggtgcactggaagaaccagttcgaccactacagcaagcaggatcgctgctcagacctgtgaccccggcgggacccccatgtcctccgctccgcccggccccctagctgtatatactatttatttcagggctgggctataacacagacgagccccagactctgcccatccccaccccaccccgacgtcccccggggctcccggtcctctgcatgtctcaggctgagctccctcccccgcggtgccttcgcccctctgggctgccaataaactgttacagcca

SEQ ID NO: 103683 - DNA, 1472 bp, Homo sapiens
  Payload ID: 380
  Gene Symbol: ACHE
  Gene Name: acetylcholinesterase (Yt blood group)
  ENST ID: ENST00000442452
  CDS Start-End: 2-169
catgaggcccccgcagtgtctgctgcacacgccttccctggcttccccactccttctcctcctcctctggctcctgggtggaggagtgggggctgagggccgggaggatgcagagctgctggtgacggttttgagggcaccgagatgtggaaccccaaccgtgagctgagcgaggactgcctgtacctcaacgtgtggacaccatacccccggcctacatcccccacccctgtcctcgtctggatctatgggggtggcttctacagtggggcctcctccttggacgtgtacgatggccgcttcttggtacaggccgagaggactgtgctggtgtccatgaactaccgggtgggagcctttggcttcctggccctgccggggagccgagaggccccgggcaatgtgggtctcctggatcagaggctggccctgcagtgggtgcaggagaacgtggcagccttcgggggtgacccgacatcagtgacgctgtttggggagagcgcgggagccgcctcggtgggcatgcacctgctgtccccgcccagccggggcctgttccacagggccgtgctgcagagcggtgcccccaatggaccctgggccacggtgggcatgggagaggcccgtcgcagggccacgcagctggcccaccttgtgggctgtcctccaggcggcactggtgggaatgacacagagctggtagcctgccttcggacacgaccagcgcaggtcctggtgaaccacgaatggcacgtgctgcctcaagaaagcgtcttccggttctccttcgtgcctgtggtagatggagacttcctcagtgacaccccagaggccctcatcaacgcgggagacttccacggcctgcagactggctgcatcccgaggacccggcacgcctgagggaggccctgagcgatgtggtgggcgaccacaatgtcgtgtgccccgtggcccagctggctgggcgactggctgcccagggtgcccgggtctacgcctacgtctttgaacaccgtgcttccacgctctcctggcccctgtggatgggggtgccccacggctacgagatcgagttcatctttgggatccccctggacccctctcgaaactacacggcagaggagaaaatcttcgcccagcgactgatgcgatactgggccaactttgcccgcacaggggatcccaatgagccccgagaccccaaggccccacaatggcccccgtacacggcgggggctcagcagtacgttagtctggacctgcggccgctggaggtgcggcgggggctgcgcgcccaggcctgcgccttctggaaccgcttcctccccaaattgctcagcgccaccgacacgctcgacgaggcggagcgccagtggaaggccgagttccaccgctggagctcctacatggtgcactggaagaaccagttcgaccactacagcaagcaggatcgctgctcagacctgtgaccc

SEQ ID NO: 103684 - DNA, 1761 bp, Homo sapiens
  Payload ID: 381
  Gene Symbol: ACAT1
  Gene Name: acetyl-CoA acetyltransferase 1
  Uniprot ID: P24752
  ENST ID: ENST00000265838
  CDS Start-End: 92-1375
gcggtgcccgcgccgggccgctaggggtgcggggttggggaggaggccgctagtctacgcctgtggagccgatactcagccctctgcgaccatggctgtgctggcggcacttctgcgcagcggcgcccgcagccgcagccccctgctccggaggctggtgcaggaaataagatatgtggaacggagttatgtatcaaaacccactttgaaggaagtggtcatagtaagtgctacaagaacacccattggatcttttttaggcagcctttccttgctgccagccactaagcttggttccattgcaattcagggagccattgaaaaggcagggattccaaaagaagaagtgaaagaagcatacatgggtaatgttctacaaggaggtgaaggacaagctcctacaaggcaggcagtattgggtgcaggcttacctatttctactccatgtaccaccataaacaaagtttgtgcttcaggaatgaaagccatcatgatggcctctcaaagtcttatgtgtggacatcaggatgtgatggtggcaggtgggatggagagcatgtccaatgttccatatgtaatgaacagaggatcaacaccatatggtggggtaaagcttgaagatttgattgtaaaagacgggctaactgatgtctacaataaaattcatatgggcagctgtgctgagaatacagcaaagaagctgaatattgcacgaaatgaacaggacgcttatgctattaattcttataccagaagtaaagcagcatgggaagctgggaaatttggaaatgaagttattcctgtcacagttacagtaaaaggtcaaccagatgtagtggtgaaagaagatgaagaatataaacgtgttgattttagcaaagttccaaagctgaagacagttttccagaaagaaaatggcacagtaacagctgccaatgccagtacactgaatgatggagcagctgctctggttctcatgacggcagatgcagcgaagaggctcaatgttacaccactggcaagaatagtagcatttgctgacgctgctgtagaacctattgattttccaattgctcctgtatatgctgcatctatggttcttaaagatgtgggattgaaaaaagaagatattgcaatgtgggaagtaaatgaagcctttagtctggttgtactagcaaacattaaaatgttggagattgatccccaaaaagtgaatatcaatggaggagctgtttctctgggacatccaattgggatgtctggagccaggattgttggtcatttgactcatgccttgaagcaaggagaatacggtcttgccagtatttgcaatggaggaggaggtgcttctgccatgctaattcagaagctgtagacaacctctgctatttaaggagacaaccctatgtgaccagaaggcctgctgtaatcagtgtgactactgtgggtcagcttatattcagataagctgtttcattttttattattttctatgttaacttttaaaaatcaaaatgatgaaatcccaaaacattttgaaattaaaaataaatttcttcttctgcttttttcttggtaaccttgaaaagtttgatacatttttgcattctgagtctatacttatcgaaatatggtagaaataccaatgtgtaatattagtgacttacataagtagctagaagtttccatttgtgagaacacatttatatttttgaggattgttaaaggtcaagtgaatgctctttataggtaatttacatt

SEQ ID NO: 103685 - DNA, 1345 bp, Homo sapiens
  Payload ID: 381
  Gene Symbol: ACAT1
  Gene Name: acetyl-CoA acetyltransferase 1
  Uniprot ID: P24752
  ENST ID: ENST00000299355
  CDS Start-End: 41-529
agtctacgcctgtggagccgatactcagccctctgcgaccatggctgtgctggcggcacttctgcgcagcggcgcccgcagccgcagccccctgctccggaggctggtgcaggaaataagatatgtggaacggagttatgtatcaaaacccactttgaaggaagtggtcatagtaagtgctacaagaacacccattggatcttttttaggcagcctttccttgctgccagccactaagcttggttccattgcaattcagggagccattgaaaaggcagggattccaaaagaagaagtgaaagaagcatacatgggtaatgttctacaaggaggtgaaggacaagctcctacaaggcaggcagtattgggtgcaggcttacctatttctactccatgtaccaccataaacaaagtttgtgcttcaggaatgaaagccatcatgatggcctctcaaagtcttatgtgtggacatcagatcaagcaagagacaggctccttagcaaaaatatgctgtcatgtcaggaggtgagacctggacacacagaagaatcaagattctctcagatctgagcccttcatttttcagatgaagatttttttcagtgtgtctgagacagccacagagttacagggctgagcatctgccatgtgacagtcattggaaatagagtggtgaacaaaacatttaaaaaaatctgtacatgtgcaggtctctgttggaaaaatgcctaaaagaaatgctgagtcaggatttgaacattttggtatttgcaaatgctttccataaaagttgtaccagttagactttccaaaaattgtgtgacttgtctggatctgcaccaccactgggtggtaccaaacccttgtcaaactggtaggtgaaaaacggtcaccagatttagtttcagaactgtttgtcatggaaagttttgtcttaattgaagtattgtggttctctagcaaatgccatttgtactatattgaaatactttcatttaatattattttattcatttgtggatatatacagtgacttataggcattcttggaagtgctttgttttgaatatttatgaccttagaaaacagtcagttttactttataatgaagaattgataccttattttctgtcacttattattgccatcacccccagtaaaaagtacaagtgaataaaacttagatgagaactgattaagaatttctctatttcggaataggcaaaatatttatgtttctttggtatagagcttgcttgtctgtatgcctgattaaagactgtaagaagatattattggctttatgtttacattaatgttttatattaaactgtttttaactagc

SEQ ID NO: 103686 - DNA, 493 bp, Homo sapiens
  Payload ID: 381
  Gene Symbol: ACAT1
  Gene Name: acetyl-CoA acetyltransferase 1
  ENST ID: ENST00000527942
  CDS Start-End: 330-493
aggacagtcacgcgacgggttctggtccaaaaaccgcctaagtgctccgataacacccagggactcgcctatttttacagcgcgtttctacttccaaggtctcggcgtaatcatcttaatgagcgttactggaaataagatatgtggaacggagttatgtatcaaaacccactttgaaggaagtggtcatagtaagtgctacaagaacacccattggatcttttttaggcagcctttccttgctgccagccactaagcttggttccattgcaattcagggagccattgaaaaggcagggattccaaaagaagaagtgaaagaagcatacatgggtaatgttctacaaggaggtgaaggacaagctcctacaaggcaggcagtattgggtgcaggcttacctatttctactccatgtaccaccataaacaaagtttgtgcttcaggaatgaaagccatcatgatggcctctcaaagtcttatgtgtggacatca

SEQ ID NO: 103687 - DNA, 2258 bp, Homo sapiens
  Payload ID: 381
  Gene Symbol: ACAT1
  Gene Name: acetyl-CoA acetyltransferase 1
  ENST ID: ENST00000531813
  CDS Start-End: 24-449
ccgatactcagccctctgcgaccatggctgtgctggcggcacttctgcgcagcggcgcccgcagccgcagccccctgctccggaggctggtgcaggaaataagatatgtggaacggagttatgtatcaaaacccactttgaaggaagtggtcatagtaagtgctacaagaacacccattggatcttttttaggcagcctttccttgctgccagccactaagcttggttccattgcaattcagggagccattgaaaaggcagggattccaaaagaagaagtgaaagaagcatacatgggtaatgttctacaaggaggtgaaggacaagctcctacaaggcaggcagtattgggtgcaggatgtgatggtggcaggtgggatggagagcatgtccaatgttccatatgtaatgaacagaggatcaacaccatatggtggggtaaagcttgaagatttgattgtaaaagacgggctaactgatgtctacaataaaattcatatgggcagctgtgctgagaatacagcaaagaagctgaatattgcacgaaatgaacaggacgcttatgctattaattcttataccagaagtaaagcagcatgggaagctgggaaatttggaaatgaagttattcctgtcacagttacagtaaaaggtcaaccagatgtagtggtgaaagaagatgaagaatataaacgtgttgattttagcaaagttccaaagctgaagacagttttccagaaagaaaatggcacagtaacagctgccaatgccagtacactgaatgatggagcagctgctctggttctcatgacggcagatgcagcgaagaggctcaatgttacaccactggcaagaatagtaggtaaggccaggcgaggtggctcacacctgtaatcccagcactttcggaggttgaggtgggaggattgcttgagccccggagttcgaaatcagcctgggcaatatagtgagacttcgtctctacaaaaagttaaaaaattagctgagcatggtggcatgtgcctgtactaccatctactcgggaagctgaggtgggaggatgccttgagcccaggagtttgaggttgcagtgaactgagattgtaccactgcactccagcctgggtgacagagcgagaccctgtcttaaaaaaaaataaggtttctaaacatctataagctcttcatgaaattgagtttacttgttagatatagccaactccaatattaagtattactacctaggttgtacttgtggcagaatttaattgatacatatttcaattgagatagaagctcctttaatattttcattatactttatataagattaagctttaagggctgggcacagtggttcacgcctgtaaccccagcattttgggaggataaggcaggattgcttgaggcctggagtttgagaccagcctgggcaacacagtgagaccccacctctgaaagaaaaaaattagccaggtgtggtagcatgcctgtagtcccagttacgtaggaggctaaggctgacgatcatttgagcccaagatgtcaaagctgcagccagcctaggcaacagagcaagatcttgtctctttttctttttttttaaattaagctttaaaaaacttcctgtcctgtatgataaatagcagaaaataaagtacatgcattttcctacagaggcagctatgtaggaaaaaaagaatatgggattaggagtccagaaatacaaaatttacatgtgtggtgttttagtatttattaactctgtggccttgggcaagttctcaatgtccttaagccgatttttagctgcagaaatctgtcttgccttcttcctaaggacttaacagatgctattttgttactttataaaaagccttataacttcattttttttcttagcttagatcatggtttcttaacctcagcactattgacttttgcactaagtaattctttgttgtagggactgttctatgcattgtagatgtttagcagaatccttagtctttacccagtggcatctgaactattctgacaaccaaaaacatctctaggtggtgccaatgttcctagaggcaaatacccccaaactcccccccaatgaaaatcagtgtcttagattactggagtaattttataaagtgtagaatcctagaaaaggaagacatatatttacatatattaaaggggctaggaaatgtgcatttaatgggctaaacttggcttgtgcatattctatacagtaaaaaaaaaaa

SEQ ID NO: 103688 - DNA, 508 bp, Homo sapiens
  Payload ID: 381
  Gene Symbol: ACAT1
  Gene Name: acetyl-CoA acetyltransferase 1
  ENST ID: ENST00000528370
  CDS Start-End: 1-409
taagcttggttccattgcaattcagggagccattgaaaaggcagggattccaaaagaagaagtgaaagaagcatacatgggtaatgttctacaaggaggtgaaggacaagctcctacaaggcaggcagtattgggtgcaggcttacctatttctactccatgtaccaccataaacaaagtttgtgcttcaggaatgaaagccatcatgatggcctctcaaagtcttatgtgtggacatcaggatgtgatggtggcaggtgggatggagagcatgtccaatgttccatatgtaatgaacagaggatcaacaccatatggtggggtaaagcttgaagatttgattgtaaaagacgggctaactgatgtctacaataaaattcatatggtaaatgtgatttttagtggataaatgctatctaatgtccaatactgtttgatttttcttactctatgtactttacaaactgaactgaaagatgggctctataaatgttgattttagccgtgt

SEQ ID NO: 103689 - DNA, 3180 bp, Homo sapiens
  Payload ID: 382
  Gene Symbol: ACAT2
  Gene Name: acetyl-CoA acetyltransferase 2
  Uniprot ID: Q9BWD1
  ENST ID: ENST00000367048
  CDS Start-End: 1761-2954
ggtgtgatctcggctcactgaaacctctgcctcctaggttcaagcgattttcccatgtcagcctccccagtagctgggattacaggcgcacggcaccacgcccggctaatttttctattttatggtagaaacgggatatcaccatgttggccaggctggtgtcaaactgctgacctcaaatgatccgccctcctcggcctcccaaagtgctgggattacaggtgtgagccaaggtgcccgacctgatgtgcttgtaagaatttaaatgaagagggtcagtcagcttaggagacgaggttagatgtaaggatttcagacttgtcagtatacaggtggtgattgatgccgtaggaatgactggtattacccagggagctggtgcaaagtaggagccttggggaacatgttaaggggatgtgagagtaagcccacaaagactcagaagtggccagggagtaaggggaaaatgggatagaatagagcaaaagccacgggaggcattccttgaattccttggactcagatatgttaggggacaggaaacacattgaagacaactgaagagacttcagtgtgctgctgagttcttagcagagtagacagctgatttcaccactattccagaccctaaagatttctcctgaaattgcactgttatgcaatttttttccttctctattgccccacctctggggcctacactctttaccttctctgatttatctgacccatccgcatatctctgcaaagtcttaatgtaggtttccaggatttaatgattctttcaatcaactttaaagttcttcaggaagattctccaggtccgtcaacagttttccccttcatgactttgtgacaaagctttcttgttccactatccaggtgttcccaacaagttgctgtaacggtggcccctcataagcttgcctggaaaccctagaaagctcagaaaaattatgaactttgcccagtaagaggctgggaagtcagaaagggttttaaacaaaactgaccccacttgttacatgctcctttcactgtccaaacgtcaaccaaaggaacttttgtgacgctaagacgctcccggcgtcctcacccgttcacagccagagttgatcttagaaggcagggggctcgcaccgagacgctcctagcaagcccctcacgcgagcgaatgactggcgccaggagaaacgcataggacctcccgaagccgccgagagcaaaaggacccatcagagctgtgctgagacccgccgcgggccgggctcgcactcgagattctcgcccgtgggattccagtcctgagctgaacgagagataagtctttgtcaccccccagtctttactgtttcgagaaaccctaagattttttaaaaaaaagcccaagacgtcaagtcggggaactccaacattggggtgtccagaaacactggggtttcaggcgctctgtaaatgcgtccgaggtccgcggttctgcccgcaagcccagaccccggcctcacttccgccccgcgccccgcgccccggcctcacttccgccccgcgccccgcgccccgcgccccgcgcgcctccgcccgcccctgctccggccttgcgcctgcgcacagtgggatgcgcggggaggtggtgcgcggggaggtggagggcgaggggcggggctacctcaggtcccgcccgcggcaggcctgtgggctgcgaggaggagctttgcctagcttgcaggcagcgcagggcagacggcggcaggagaagcaagatgaatgcaggctcagatcctgtggtcatcgtctcggcggcgcggaccatcataggttccttcaatggtgccttagctgctgttcctgtccaggacctgggctccactgtcatcaaagaagtcttgaagagggccactgtggctccggaagatgtgtctgaggtcatctttggacatgtcttggcagcaggctgtgggcagaatcctgttagacaagccagtgtgggtgcaggaattccctactctgttccagcatggagctgccagatgatctgtgggtcaggcctaaaagctgtgtgccttgcagtccagtcaatagggataggagactccagcattgtggttgcaggaggcatggaaaatatgagcaaggctcctcacttggcttacttgagaacaggagtaaagataggtgagatgccactgactgacagtatactctgtgatggtcttacagatgcatttcacaactgtcatatgggtattacagctgaaaatgtagccaaaaaatggcaagtgagtagagaagatcaggacaaggttgcagttctgtcccagaacaggacagagaatgcacagaaagctggccattttgacaaagagattgtaccagttttggtgtcaactagaaaaggtcttattgaagttaaaacagatgagtttcctcgccatgggagcaacatagaagccatgtccaagctaaagccttactttcttactgatggaacgggaacagtcaccccagccaatgcttcaggaataaatgatggtgctgcagctgtcgttcttatgaagaagtcagaagctgataaacgtgggcttacacctttagcacggatagtttcctggtcccaagtgggtgtggagccttccattatgggaataggaccaattccagccataaagcaagctgttacaaaagcaggttggtcactggaagatgttgacatatttgaaatcaatgaagcctttgcagctgtctctgctgcaatagttaaagaacttggattaaacccagagaaggtcaatattgaaggaggggctatagccttgggccaccctcttggagcatctggctgtcgaattcttgtgaccctgttacacacactggagagaatgggcagaagtcgtggtgttgcagccctgtgcattgggggtgggatgggaatagcaatgtgtgttcagagagaatgaattgcttaaactttgaacaacctcaatttctttttaaactaataaagtactaggttgcaatatgtgaaatcagaggaccaaagtacagatggaaaccatttcctacatcacaaaaacccaagtttacagcttgtactttactttaatgtgtaatactcaactcaaggtacaagacaattgcatttaacattgttataaataaaaggaacatcagatcaatcattaa

SEQ ID NO: 103690 - DNA, 1540 bp, Homo sapiens
  Payload ID: 383
  Gene Symbol: ACAA1
  Gene Name: acetyl-CoA acyltransferase 1
  Uniprot ID: P09110
  ENST ID: ENST00000301810
  CDS Start-End: 208-1203
gggttcccaggccgactctccttgtggttggctgaggctggaggtggacgggacttttggagggtcgctcgcgtctgttcgcagagctgtgggcggagttgaggccttggaggctgagatgtggttctgcgcgtgtgcggacggctgtctgttaactccgcggtcagttcccggactggtggctggtctgcagggttgacctgcgcaatgcagaggctgcaggtagtgctgggccacctgaggggtccggccgattccggctggatgccgcaggccgcgccttgcctgagcggtgccccgcaggcctcggccgcggacgtggtggtggtgcacgggcggcgcacggccatctgccgggcgggccgcggcggcttcaaggacaccacccccgacgagcttctctcggcagtcatgaccgcggttctcaaggacgtgaatctgaggccggaacagctgggggacatctgtgtcggaaatgtgctgcagcctggggccggggcaatcatggcccgaatcgcccagtttctgagtgacatcccggagactgtgcctttgtccactgtcaatagacagtgttcgtcggggctacaggcagtggccagcatagcaggtggcatcagaaatgggtcttatgacattggcatggcctgtgggataacctctgagaatgtggctgagcggtttggcatttcacgggagaagcaggatacctttgccctggcttcccagcagaaggcagcaagagcccagagcaagggctgtttccaagctgagattgtgcctgtgaccaccacggtccatgatgacaagggcaccaagaggagcatcactgtgacccaggatgagggtatccgccccagcaccaccatggagggcctggccaaactgaagcctgccttcaagaaagatggttctaccacagctgggctgacagtgagtgacgtggacatcttcgagatcaatgaggcctttgcaagccaggctgcctactgtgtggagaagctacgactcccccctgagaaggtgaaccccctggggggtgcagtggccttagggcacccactgggctgcactggggcacgacaggtcatcacgctgctcaatgagctgaagcgccgtgggaagagggcatacggagtggtgtccatgtgcatcgggactggaatgggagccgctgccgtctttgaataccctgggaactgagtgaggtcccaggctggaggcgctacgcagacagtcctgctgctctagcagcaaggcagtaacaccacaaaagcaaaaccacatgggaaaactcagcactggtggtggtggcagtggacagatcaaggcacttcaactcatttggaaaatgtgaacactgatgacatggtataggagtgggtggggtgttgagccacccatcagaccctctttagctgtgcaagataaaagcagcctgggtcacccaggccacaaggccatggttaattcttaaggcaaggcaaatccatggatgagaagtgcaatgggcatagtaaaagtgcatgaatttatctta

SEQ ID NO: 103691 - DNA, 1785 bp, Homo sapiens
  Payload ID: 383
  Gene Symbol: ACAA1
  Gene Name: acetyl-CoA acyltransferase 1
  Uniprot ID: P09110
  ENST ID: ENST00000333167
  CDS Start-End: 174-1448
aggctggaggtggacgggacttttggagggtcgctcgcgtctgttcgcagagctgtgggcggagttgaggccttggaggctgagatgtggttctgcgcgtgtgcggacggctgtctgttaactccgcggtcagttcccggactggtggctggtctgcagggttgacctgcgcaatgcagaggctgcaggtagtgctgggccacctgaggggtccggccgattccggctggatgccgcaggccgcgccttgcctgagcggtgccccgcaggcctcggccgcggacgtggtggtggtgcacgggcggcgcacggccatctgccgggcgggccgcggcggcttcaaggacaccacccccgacgagcttctctcggcagtcatgaccgcggttctcaaggacgtgaatctgaggccggaacagctgggggacatctgtgtcggaaatgtgctgcagcctggggccggggcaatcatggcccgaatcgcccagtttctgagtgacatcccggagactgtgcctttgtccactgtcaatagacagtgttcgtcggggctacaggcagtggccagcatagcaggtggcatcagaaatgggtcttatgacattggcatggcctgtggggtggagtccatgtccctggctgacagagggaaccctggaaatattacttcgcgcttgatggagaaggagaaggccagagattgcctgattcctatggggataacctctgagaatgtggctgagcggtttggcatttcacgggagaagcaggatacctttgccctggcttcccagcagaaggcagcaagagcccagagcaagggctgtttccaagctgagattgtgcctgtgaccaccacggtccatgatgacaagggcaccaagaggagcatcactgtgacccaggatgagggtatccgccccagcaccaccatggagggcctggccaaactgaagcctgccttcaagaaagatggttctaccacagctggaaactctagccaggtgagtgatggggcagctgccatcctgctggcccggaggtccaaggcagaagagttgggccttcccatccttggggtcctgaggtcttatgcagtggttggggtcccacctgacatcatgggcattggacctgcctatgccatcccagtagctttgcaaaaagcagggctgacagtgagtgacgtggacatcttcgagatcaatgaggcctttgcaagccaggctgcctactgtgtggagaagctacgactcccccctgagaaggtgaaccccctggggggtgcagtggccttagggcacccactgggctgcactggggcacgacaggtcatcacgctgctcaatgagctgaagcgccgtgggaagagggcatacggagtggtgtccatgtgcatcgggactggaatgggagccgctgccgtctttgaataccctgggaactgagtgaggtcccaggctggaggcgctacgcagacagtcctgctgctctagcagcaaggcagtaacaccacaaaagcaaaaccacatgggaaaactcagcactggtggtggtggcagtggacagatcaaggcacttcaactcatttggaaaatgtgaacactgatgacatggtataggagtgggtggggtgttgagccacccatcagaccctctttagctgtgcaagataaaagcagcctgggtcacccaggccacaaggccatggttaattcttaaggcaaggcaaatccatggatgagaagtgcaatgggcatagtaaaagtgcatgaatttatctta

SEQ ID NO: 103692 - DNA, 1328 bp, Homo sapiens
  Payload ID: 383
  Gene Symbol: ACAA1
  Gene Name: acetyl-CoA acyltransferase 1
  ENST ID: ENST00000440176
  CDS Start-End: 62-427
gtctgttaactccgcggtcagttcccggactggtggctggtctgcagggttgacctgcgcaatgcagaggctgcaggtagtgctgggccacctgaggggtccggccgattccggctggatgccgcaggccgcgccttgcctgagcggtgccccgcaggcctcggccgcggacgtggtggtggtgcacgggcggcgcacggccatctgccgggcgggccgcggcggcttcaaggacaccacccccgacgagcttctctcggcagtcatgaccgcggttctcaaggacgtgaatctgaggccggaacagctgggggacatctgtgtcgatcaacatggagtttcttatgtcttccttttctacatacacacggaaatgtgctgcagcctggggccggggcaatcatggcccgaatcgcccagtttctgagtgacatcccggagactgtgcctttgtccactgtcaatagacagtgttcgtcggggctacaggcagtggccagcatagcagggtggagtccatgtccctggctgacagagggaaccctggaaatattacttcgcgcttgatggagaaggagaaggccagagattgcctgattcctatggggataacctctgagaatgtggctgagcggtttggcatttcacgggagaagcaggatacctttgccctggcttcccagcagaaggcagcaagagcccagagcaagggctgtttccaagctgagattgtgcctgtgaccaccacggtccatgatgacaagggcaccaagaggagcatcactgtgacccaggatgagggtatccgccccagcaccaccatggagggcctggccaaactgaagcctgccttcaagaaagatggttctaccacagctggtgagactggtccggggtaggggtatgagaaagcaggccatggccatgctgggtgctgtactctgggaacctggaatagaccaggcccctctgcaaagtagaagtgggagggctgggatctcctcatccccaccccgatgccttcttaccccaacagtttgcccctaggaaactctagccaggtgagtgatggggcagctgccatcctgctggcccggaggtccaaggcagaagagttgggccttcccatccttggggtcctgaggtcttatgcagtggttggggtcccacctgacatcatgggcattggacctgcctatgccatcccagtagctttgcaaaaagcaggtaaggtggctccttcatatagtatctgggtcccacctggatcctgcagctgccctgcatgctgttgccaggggcatgagggtggtcctgtgggtgctgca

SEQ ID NO: 103693 - DNA, 927 bp, Homo sapiens
  Payload ID: 383
  Gene Symbol: ACAA1
  Gene Name: acetyl-CoA acyltransferase 1
  ENST ID: ENST00000452171
  CDS Start-End: 1-713
aggcagtggccagcatagcaggtggcatcagaaatgggtcttatgacattggcatggcctgtggggtggagtccatgtccctggctgacagagggaaccctggaaatattacttcgcgcttgatggagaaggagaaggccagagattgcctgattcctatggggataacctctgagaatgtggctgagcggtttggcatttcacgggagaagcaggatacctttgccctggcttcccagcagaaggcagcaagagcccagagcaagggctgtttccaagctgagattgtgcctgtgaccaccacggtccatgatgacaagggcaccaagaggagcatcactgtgacccaggatgagggtatccgccccagcaccaccatggagggcctggccaaactgaagcctgccttcaagaaagatggttctaccacagctgggctgacagtgagtgacgtggacatcttcgagatcaatgaggcctttgcaagccaggctgcctactgtgtggagaagctacgactcccccctgagaaggtgaaccccctggggggtgcagtggccttagggcacccactgggctgcactggggcacgacaggtcatcacgctgctcaatgagctgaagcgccgtgggaagagggcatacggagtggtgtccatgtgcatcgggactggaatgggagccgctgccgtctttgaataccctgggaactgagtgaggtcccaggctggaggcgctacgcagacagtcctgctgctctagcagcaaggcagtaacaccacaaaagcaaaaccacatgggaaaactcagcactggtggtggtggcagtggacagatcaaggcacttcaactcatttggaaaatgtgaacactgatgacatggtataggagtgggtggggtgttgagccacccatcagaccctcttta

SEQ ID NO: 103694 - DNA, 1570 bp, Homo sapiens
  Payload ID: 383
  Gene Symbol: ACAA1
  Gene Name: acetyl-CoA acyltransferase 1
  ENST ID: ENST00000450296
  CDS Start-End: 91-1242
gatgtggttctgcgcgtgtgcggacggctgtctgttaactccgcggtcagttcccggactggtggctggtctgcagggttgacctgcgcaatgcagaggctgcaggtagtgctgggccacctgaggggtccggccgattccggctggatgccgcaggccgcgccttgcctgagcggtgccccgcaggcctcggccgcggacgtggtggtggtgcacgggcggcgcacggccatctgccgggcgggccgcggcggcttcaaggacaccacccccgacgagcttctctcggcagtcatgaccgcggttctcaaggacgtgaatctgaggccggaacagctgggggacatctgtgtcggaaatgtgctgcagcctggggccggggcaatcatggcccgaatcgcccagtttctgagggtggagtccatgtccctggctgacagagggaaccctggaaatattacttcgcgcttgatggagaaggagaaggccagagattgcctgattcctatggggataacctctgagaatgtggctgagcggtttggcatttcacgggagaagcaggatacctttgccctggcttcccagcagaaggcagcaagagcccagagcaagggctgtttccaagctgagattgtgcctgtgaccaccacggtccatgatgacaagggcaccaagaggagcatcactgtgacccaggatgagggtatccgccccagcaccaccatggagggcctggccaaactgaagcctgccttcaagaaagatggttctaccacagctggaaactctagccaggtgagtgatggggcagctgccatcctgctggcccggaggtccaaggcagaagagttgggccttcccatccttggggtcctgaggtcttatgcagtggttggggtcccacctgacatcatgggcattggacctgcctatgccatcccagtagctttgcaaaaagcagggctgacagtgagtgacgtggacatcttcgagatcaatgaggcctttgcaagccaggctgcctactgtgtggagaagctacgactcccccctgagaaggtgaaccccctggggggtgcagtggccttagggcacccactgggctgcactggggcacgacaggtcatcacgctgctcaatgagctgaagcgccgtgggaagagggcatacggagtggtgtccatgtgcatcgggactggaatgggagccgctgccgtctttgaataccctgggaactgagtgaggtcccaggctggaggcgctacgcagacagtcctgctgctctagcagcaaggcagtaacaccacaaaagcaaaaccacatgggaaaactcagcactggtggtggtggcagtggacagatcaaggcacttcaactcatttggaaaatgtgaacactgatgacatggtataggagtgggtggggtgttgagccacccatcagaccctctttagctgtgcaagataaaagcagcctgggtcacccaggccacaaggccatggttaattcttaaggcaaggcaaatccatggatgagaagtgcaatgggcatagtaaaagtgcatgaa

SEQ ID NO: 103695 - DNA, 877 bp, Homo sapiens
  Payload ID: 383
  Gene Symbol: ACAA1
  Gene Name: acetyl-CoA acyltransferase 1
  ENST ID: ENST00000423611
  CDS Start-End: 103-444
cttggaggctgagatgtggttctgcgcgtgtgcggacggctgtctgttaactccgcggtcagttcccggactggtggctggtctgcagggttgacctgcgcaatgcagaggctgcaggtagtgctgggccacctgaggggtccggccgattccggctggatgccgcaggccgcgccttgcctgagcggtgccccgcaggcctcggccgcggacgtggtggtggtgcacgggcggcgcacggccatctgccgggcgggccgcggcggcttcaaggacaccacccccgacgagcttctctcggcagtcatgaccgcggttctcaaggacgtgaatctgaggccggaacagctgggggacatctgtgtcgtgacatcccggagactgtgcctttgtccactgtcaatagacagtgttcgtcggggctacaggcagtggccagcatagcagggtggagtccatgtccctggctgacagagggaaccctggaaatattacttcgcgcttgatggagaaggagaaggccagagattgcctgattcctatggggataacctctgagaatgtggctgagcggtttggcatttcacgggagaagcaggatacctttgccctggcttcccagcagaaggcagcaagagcccagagcaagggctgtttccaagctgagattgtgcctgtgaccaccacggtccatgatgacaagggcaccaagaggagcatcactgtgacccaggatgagggtatccgccccagcaccaccatggagggcctggccaaactgaagcctgccttcaagaaagatggttctaccacagctggtgagactggtccggggtaggggtatgagaaagcaggccatggccatgctgggtgctgt

SEQ ID NO: 103696 - DNA, 869 bp, Homo sapiens
  Payload ID: 383
  Gene Symbol: ACAA1
  Gene Name: acetyl-CoA acyltransferase 1
  ENST ID: ENST00000421218
  CDS Start-End: 1-869
tgaggccggaacagctgggggacatctgtgtcggaaatgtgctgcagcctggggccggggcaatcatggcccgaatcgcccagtttctgagtgacatcccggagactgtgcctttgtccactgtcaatagacagtgttcgtcggggctacaggcagtggccagcatagcaggtggcatcagaaatgggtcttatgacattggcatggcctgtgggataacctctgagaatgtggctgagcggtttggcatttcacgggagaagcaggatacctttgccctggcttcccagcagaaggcagcaagagcccagagcaagggctgtttccaagctgagattgtgcctgtgaccaccacggtccatgatgacaagggcaccaagaggagcatcactgtgacccaggatgagggtatccgccccagcaccaccatggagggcctggccaaactgaagcctgccttcaagaaagatggttctaccacagctggaaactctagccaggtgagtgatggggcagctgccatcctgctggcccggaggtccaaggcagaagagttgggccttcccatccttggggtcctgaggtcttatgcagtggttggggtcccacctgacatcatgggcattggacctgcctatgccatcccagtagctttgcaaaaagcagggctgacagtgagtgacgtggacatcttcgagatcaatgaggcctttgcaagccaggctgcctactgtgtggagaagctacgactcccccctgagaaggtgaaccccctggggggtgcagtggccttagggcacccactgggctgcactggggcacgacaggtcatcacgctgctcaatgagctgaagcgccgtgggaagagg

SEQ ID NO: 103697 - DNA, 737 bp, Homo sapiens
  Payload ID: 383
  Gene Symbol: ACAA1
  Gene Name: acetyl-CoA acyltransferase 1
  ENST ID: ENST00000418880
  CDS Start-End: 58-399
gttaactccgcggtcagttcccggactggtggctggtctgcagggttgacctgcgcaatgcagaggctgcaggtagtgctgggccacctgaggggtccggccgattccggctggatgccgcaggccgcgccttgcctgagcggtgccccgcaggcctcggccgcggacgtggtggtggtgcacgggcggcgcacggccatctgccgggcgggccgcggcggcttcaaggacaccacccccgacgagcttctctcggcagtcatgaccgcggttctcaaggacgtgaatctgaggccggaacagctgggggacatctgtgtcgtgacatcccggagactgtgcctttgtccactgtcaatagacagtgttcgtcggggctacaggcagtggccagcatagcagggtggagtccatgtccctggctgacagagggaaccctggaaatattacttcgcgcttgatggagaaggagaaggccagagattgcctgattcctatggggataacctctgagaatgtggctgagcggtttggcatttcacgggagaagcaggatacctttgccctggcttcccagcagaagtgagtgctgattggggaggaatgtttaaagggctggagagtgaggttttgagtctatctaagtggtctgaagtggcaccatttcgtggttactgctgggcagtgagtgctttccaggccttgtgccacccaggttgggggtgggaagtaggaag

SEQ ID NO: 103698 - DNA, 915 bp, Homo sapiens
  Payload ID: 383
  Gene Symbol: ACAA1
  Gene Name: acetyl-CoA acyltransferase 1
  ENST ID: ENST00000447223
  CDS Start-End: 38-403
ccggactggtggctggtctgcagggttgacctgcgcaatgcagaggctgcaggtagtgctgggccacctgaggggtccggccgattccggctggatgccgcaggccgcgccttgcctgagcggtgccccgcaggcctcggccgcggacgtggtggtggtgcacgggcggcgcacggccatctgccgggcgggccgcggcggcttcaaggacaccacccccgacgagcttctctcggcagtcatgaccgcggttctcaaggacgtgaatctgaggccggaacagctgggggacatctgtgtcgatcaacatggagtttcttatgtcttccttttctacatacacacggaaatgtgctgcagcctggggccggggcaatcatggcccgaatcgcccagtttctgagtgacatcccggagactgtgcctttgtccactgtcaatagacagtgttcgtcggggctacaggcagtggccagcatagcaggtggcatcagaaatgggtcttatgacattggcatggcctgtggggtggagtccatgtccctggctgacagagggaaccctggaaatattacttcgcgcttgatggagaaggagaaggccagagattgcctgattcctatggggataacctctgagaatgtggctgagcggtttggcatttcacgggagaagcaggatacctttgccctggcttcccagcagaaggcagcaagagcccagagcaagggctgtttccaagctgagattgtgcctgtgaccaccacggtccatgatgacaagggcaccaagaggagcatcactgtgacccaggatgagggtatccgccccagcaccaccatggagggcctggccaaactgaagcctgccttcaagaaagatggttctaccacagctggtgagactggtccgggg

SEQ ID NO: 103699 - DNA, 1944 bp, Homo sapiens
  Payload ID: 383
  Gene Symbol: ACAA1
  Gene Name: acetyl-CoA acyltransferase 1
  ENST ID: ENST00000411549
  CDS Start-End: 208-669
gggttcccaggccgactctccttgtggttggctgaggctggaggtggacgggacttttggagggtcgctcgcgtctgttcgcagagctgtgggcggagttgaggccttggaggctgagatgtggttctgcgcgtgtgcggacggctgtctgttaactccgcggtcagttcccggactggtggctggtctgcagggttgacctgcgcaatgcagaggctgcaggtagtgctgggccacctgaggggtccggccgattccggctggatgccgcaggccgcgccttgcctgagcggtgccccgcaggcctcggccgcggacgtggtggtggtgcacgggcggcgcacggccatctgccgggcgggccgcggcggcttcaaggacaccacccccgacgagcttctctcggcagtcatgaccgcggttctcaaggacgtgaatctgaggccggaacagctgggggacatctgtgtcggaaatgtgctgcagcctggggccggggcaatcatggcccgaatcgcccagtttctgagtgacatcccggagactgtgcctttgtccactgtcaatagacagtgttcgtcggggctacaggcagtggccagcatagcagggtggagtccatgtccctggctgacagagggaaccctggaaatattacttcgcgcttgatggagaaggagaaggccagagattgcctgattcctatggggataacctctgagaatgtggctgagcggtttggcatttcacgggagaagcaggatacctttgccctggcttcccagcagaaggcagcaagagcccagagcaagggctgtttccaagctgagattgtgcctgtgaccaccacggtccatgatgacaagggcaccaagaggagcatcactgtgacccaggatgagggtatccgccccagcaccaccatggagggcctggccaaactgaagcctgccttcaagaaagatggttctaccacagctggtgagactggtccggggtaggggtatgagaaagcaggccatggccatgctgggtgctgtactctgggaacctggaatagaccaggcccctctgcaaagtagaagtgggagggctgggatctcctcatccccaccccgatgccttcttaccccaacagtttgcccctaggaaactctagccaggtgagtgatggggcagctgccatcctgctggcccggaggtccaaggcagaagagttgggccttcccatccttggggtcctgaggtcttatgcagtggttggggtcccacctgacatcatgggcattggacctgcctatgccatcccagtagctttgcaaaaagcagggctgacagtgagtgacgtggacatcttcgagatcaatgaggcctttgcaagccaggctgcctactgtgtggagaagctacgactcccccctgagaaggtgaaccccctggggggtgcagtggccttagggcacccactgggctgcactggggcacgacaggtcatcacgctgctcaatgagctgaagcgccgtgggaagagggcatacggagtggtgtccatgtgcatcgggactggaatgggagccgctgccgtctttgaataccctgggaactgagtgaggtcccaggctggaggcgctacgcagacagtcctgctgctctagcagcaaggcagtaacaccacaaaagcaaaaccacatgggaaaactcagcactggtggtggtggcagtggacagatcaaggcacttcaactcatttggaaaatgtgaacactgatgacatggtataggagtgggtggggtgttgagccacccatcagaccctctttagctgtgcaagataaaagcagcctgggtcacccaggccacaaggccatggttaattcttaaggcaaggcaaatccatggatgagaagtgcaatgggcatagtaaaagtgcatgaatttatctta

SEQ ID NO: 103700 - DNA, 1760 bp, Homo sapiens
  Payload ID: 383
  Gene Symbol: ACAA1
  Gene Name: acetyl-CoA acyltransferase 1
  ENST ID: ENST00000625927
  CDS Start-End: 208-549
gggttcccaggccgactctccttgtggttggctgaggctggaggtggacgggacttttggagggtcgctcgcgtctgttcgcagagctgtgggcggagttgaggccttggaggctgagatgtggttctgcgcgtgtgcggacggctgtctgttaactccgcggtcagttcccggactggtggctggtctgcagggttgacctgcgcaatgcagaggctgcaggtagtgctgggccacctgaggggtccggccgattccggctggatgccgcaggccgcgccttgcctgagcggtgccccgcaggcctcggccgcggacgtggtggtggtgcacgggcggcgcacggccatctgccgggcgggccgcggcggcttcaaggacaccacccccgacgagcttctctcggcagtcatgaccgcggttctcaaggacgtgaatctgaggccggaacagctgggggacatctgtgtcgtgacatcccggagactgtgcctttgtccactgtcaatagacagtgttcgtcggggctacaggcagtggccagcatagcaggtggcatcagaaatgggtcttatgacattggcatggcctgtggggtggagtccatgtccctggctgacagagggaaccctggaaatattacttcgcgcttgatggagaaggagaaggccagagattgcctgattcctatggggataacctctgagaatgtggctgagcggtttggcatttcacgggagaagcaggatacctttgccctggcttcccagcagaaggcagcaagagcccagagcaagggctgtttccaagctgagattgtgcctgtgaccaccacggtccatgatgacaagggcaccaagaggagcatcactgtgacccaggatgagggtatccgccccagcaccaccatggagggcctggccaaactgaagcctgccttcaagaaagatggttctaccacagctggaaactctagccaggtgagtgatggggcagctgccatcctgctggcccggaggtccaaggcagaagagttgggccttcccatccttggggtcctgaggtcttatgcagtggttggggtcccacctgacatcatgggcattggacctgcctatgccatcccagtagctttgcaaaaagcagggctgacagtgagtgacgtggacatcttcgagatcaatgaggcctttgcaagccaggctgcctactgtgtggagaagctacgactcccccctgagaaggtgaaccccctggggggtgcagtggccttagggcacccactgggctgcactggggcacgacaggtcatcacgctgctcaatgagctgaagcgccgtgggaagagggcatacggagtggtgtccatgtgcatcgggactggaatgggagccgctgccgtctttgaataccctgggaactgagtgaggtcccaggctggaggcgctacgcagacagtcctgctgctctagcagcaaggcagtaacaccacaaaagcaaaaccacatgggaaaactcagcactggtggtggtggcagtggacagatcaaggcacttcaactcatttggaaaatgtgaacactgatgacatggtataggagtgggtggggtgttgagccacccatcagaccctctttagctgtgcaagataaaagcagcctgggtcacccaggccacaaggccatggttaattcttaaggcaaggcaaatccatggatgagaagtgcaatgggcatagtaaaagtgcatgaatttatctt

SEQ ID NO: 103701 - DNA, 1862 bp, Homo sapiens
  Payload ID: 383
  Gene Symbol: ACAA1
  Gene Name: acetyl-CoA acyltransferase 1
  ENST ID: ENST00000627515
  CDS Start-End: 208-573
gggttcccaggccgactctccttgtggttggctgaggctggaggtggacgggacttttggagggtcgctcgcgtctgttcgcagagctgtgggcggagttgaggccttggaggctgagatgtggttctgcgcgtgtgcggacggctgtctgttaactccgcggtcagttcccggactggtggctggtctgcagggttgacctgcgcaatgcagaggctgcaggtagtgctgggccacctgaggggtccggccgattccggctggatgccgcaggccgcgccttgcctgagcggtgccccgcaggcctcggccgcggacgtggtggtggtgcacgggcggcgcacggccatctgccgggcgggccgcggcggcttcaaggacaccacccccgacgagcttctctcggcagtcatgaccgcggttctcaaggacgtgaatctgaggccggaacagctgggggacatctgtgtcgatcaacatggagtttcttatgtcttccttttctacatacacacggaaatgtgctgcagcctggggccggggcaatcatggcccgaatcgcccagtttctgagtgacatcccggagactgtgcctttgtccactgtcaatagacagtgttcgtcggggctacaggcagtggccagcatagcaggtggcatcagaaatgggtcttatgacattggcatggcctgtggggtggagtccatgtccctggctgacagagggaaccctggaaatattacttcgcgcttgatggagaaggagaaggccagagattgcctgattcctatggggataacctctgagaatgtggctgagcggtttggcatttcacgggagaagcaggatacctttgccctggcttcccagcagaaggcagcaagagcccagagcaagggctgtttccaagctgagattgtgcctgtgaccaccacggtccatgatgacaagggcaccaagaggagcatcactgtgacccaggatgagggtatccgccccagcaccaccatggagggcctggccaaactgaagcctgccttcaagaaagatggttctaccacagctggaaactctagccaggtgagtgatggggcagctgccatcctgctggcccggaggtccaaggcagaagagttgggccttcccatccttggggtcctgaggtcttatgcagtggttggggtcccacctgacatcatgggcattggacctgcctatgccatcccagtagctttgcaaaaagcagggctgacagtgagtgacgtggacatcttcgagatcaatgaggcctttgcaagccaggctgcctactgtgtggagaagctacgactcccccctgagaaggtgaaccccctggggggtgcagtggccttagggcacccactgggctgcactggggcacgacaggtcatcacgctgctcaatgagctgaagcgccgtgggaagagggcatacggagtggtgtccatgtgcatcgggactggaatgggagccgctgccgtctttgaataccctgggaactgagtgaggtcccaggctggaggcgctacgcagacagtcctgctgctctagcagcaaggcagtaacaccacaaaagcaaaaccacatgggaaaactcagcactggtggtggtggcagtggacagatcaaggcacttcaactcatttggaaaatgtgaacactgatgacatggtataggagtgggtggggtgttgagccacccatcagaccctctttagctgtgcaagataaaagcagcctgggtcacccaggccacaaggccatggttaattcttaaggcaaggcaaatccatggatgagaagtgcaatgggcatagtaaaagtgcatgaatttatctt

SEQ ID NO: 103702 - DNA, 3350 bp, Homo sapiens
  Payload ID: 384
  Gene Symbol: ACAA2
  Gene Name: acetyl-CoA acyltransferase 2
  Uniprot ID: P42765
  ENST ID: ENST00000285093
  CDS Start-End: 477-1670
acaggacgttcggtcccgcccccagctggcggccgcggccgcccgcgcgccaagttcctcagcccttggctcctgcccagtgtttagggtgttggcggagacaaaggggaagagtcatcgcctgtcggggctaggatatgatgggtgagaggtgtcaaaccaaattctctcggtttggaaacggagaaaatctaaaaatgaggatgtgaggaaagagtccgctctcaaggcgcgttgtggtctatccgagccccgtcccctgggctccctcgggctggggtgaggcgggcagcgctacgcgtggggtaggaccatcttacgctgggaccccgccaaggagccccaggaagtaggtgaaagggcaggggcgtggctctcggggcgccacccacgctcttgaaatctgggtgattgcgagcggccgctcagcgtcccccacaccacagacccgcgccgccgacgacccagcagccgccatggctctgctccgaggtgtgtttgtagttgctgctaagcgaacgccctttggagcttacggaggccttctgaaagacttcactgctactgacttgtctgaatttgctgccaaggctgccttgtctgctggcaaagtctcacctgaaacagttgacagtgtgattatgggcaatgtcctgcagagttcttcagatgctatatatttggcaaggcatgttggtttgcgtgtgggaatcccaaaggagaccccagctctcacgattaataggctctgtggttctggttttcagtccattgtgaatggatgtcaggaaatttgtgttaaagaagctgaagttgttttatgtggaggaaccgaaagcatgagccaagctccctactgtgtcagaaatgtgcgttttggaaccaagcttggatcagatatcaagctggaagattctttatgggtatcattaacagatcagcatgtccagctccccatggcaatgactgcagagaatcttgctgtaaaacacaaaataagcagagaagaatgtgacaaatatgccctgcagtcacagcagagatggaaagctgctaatgatgctggctactttaatgatgaaatggcaccaattgaagtgaagacaaagaaaggaaaacagacaatgcaggtagacgagcatgctcggccccaaaccaccctggaacagttacagaaacttcctccagtattcaagaaagatggaactgttactgcagggaatgcatcgggtgtagctgatggtgctggagctgttatcatagctagtgaagatgctgttaagaaacataacttcacaccactggcaagaattgtgggctactttgtatctggatgtgatccctctatcatgggtattggtcctgtccctgctatcagtggggcactgaagaaagcaggactgagtcttaaggacatggatttggtagaggtgaatgaagcttttgctccccagtacttggctgttgagaggagtttggatcttgacataagtaaaaccaatgtgaatggaggagccattgctttgggtcacccactgggaggatctggatcaagaattactgcacacctggttcacgaattaaggcgtcgaggtggaaaatatgccgttggatcagcttgcattggaggtggccaaggtattgctgtcatcattcagagcacagcctgaagagaccagtgagctcactgtgacccatccttactctacttggccaggccacagtaaaacaagtgaccttcagagcagctgccacaactggccatgccctgccattgaaacagtgattaagtttgatcaagccatggtgacacaaaaatgcattgatcatgaataggagcccatgctagaagtacattctctcagatttgaaccagtgaaatatgatgtatttctgagctaaaactcaactatagaagacattaaaagaaatcgtattcttgccaagtaaccaccacttctgccttagataatatgattataaggaaatcaaataaatgttgccttaacttcagttaatattttcctgtcatttatatttttaaaaattttaaattgtgataagatacacattacataaactttaccatcttaacccttttttagcgtacaattcactggtattaagtacattcacatttttatacaaacatccccactttttatcaacagaactttttcagtcaccacacatggaaacaataactcctgattctcccatcccccatcccctgacaaccaccagtgtattttgtttctataaatttgatgactcgaggtacctcataagtgaaattataaatatctgtcctttcgtgactggcttattttactttactttatataatgttctcaagattcatccaccttatggtgtagcatgtgtcagaatttccttctttttaaaggctgaataatattctgctgtgtgtataaaccttacttccttcttcccagcttaaaggccatctttcatcctttattttctccctttaaaatgcccccacaacacttccattgctttatttgtctgttctaagactggatatctagtagggcaaggccctattcttgttaacttcatcaaagagccactggaaattttaattaagattaaattgaatttatgggttatacatttattggggggaaatttttttttttttttttgagacagagtctcgctctgtcctccaggctggagtgcagtggcgcgatctcagcttactgcaagctccgcctcctgggttcatgccattctcctgcctcagcctccccagtagctgggactacaggcgcctgccactacgcccggctaattttttgtatttttagtagagatggggtttcaccgtgttagccaggatggtctcgatctcctgacctcgtgatccacccgcctcggcctcccaaagaagtgctgggattacaggcgtgagccactgcacccggccttttttttttttttttgagatagcatcttgctctgtcacccaggcagaattgcagtggcacagtcatggctcactgaataatagatgttaaataatactagatgttaaataatagtatcataagtacctacactgtttcctcaaccctttgcttatatggtttccttcatttgattaaaaagctgaagtggcacatacatccccctttctgtcatagagaggcagatgacaagcggcctacccacggtttgggataatggactagtggcaacaggcaagtccagcttttattgtttgggatccttactgagaagcagcaggcttcctctactgtcataaaaatattaaaaagtaagagccctgtataatttctcataataaaacaatgttttgcaga

SEQ ID NO: 103703 - DNA, 727 bp, Homo sapiens
  Payload ID: 384
  Gene Symbol: ACAA2
  Gene Name: acetyl-CoA acyltransferase 2
  ENST ID: ENST00000586485
  CDS Start-End: 356-727
agctggcggccgcggccgcccgcgcgccaagttcctcagcccttggctcctgcccagtgtttagggtgttggcggagacaaaggggaagagtcatcgcctgtcggggctaggatatgatgggtgagaggtgtcaaaccaaattctctcggtttggaaacggagaaaatctaaaaatgaggatgtgaggaaagagtccgctctcaaggtgtgtttgtagttgctgctaagcgaacgccctttggagcttacggaggccttctgaaagacttcactgctactgacttgtctgaatttgctgccaaggctgccttgtctgctggcaaagtctcacctgaaacagttgacagtgtgattatgggcaatgtcctgcagagttcttcagatgctatatatttggcaaggcatgttggtttgcgtgtgggaatcccaaaggagaccccagctctcacgattaataggctctgtggttctggttttcagtccattgtgaatggatgtcaggaaatttgtgttaaagaagctgaagttgttttatgtggaggaaccgaaagcatgagccaagctccctactgtgtcagaaatgtgcgttttggaaccaagcttggatcagatatcaagctggaagattctttatgggtatcattaacagatcagcatgtccagctccccatggcaatgactgcagagaatcttgctgtaaaacacaaaataagcagagaagaatgt

SEQ ID NO: 103704 - DNA, 538 bp, Homo sapiens
  Payload ID: 384
  Gene Symbol: ACAA2
  Gene Name: acetyl-CoA acyltransferase 2
  ENST ID: ENST00000585948
  CDS Start-End: 286-538
tcagtcaacaagaagaaccggctcctaggtttttattagcacccatcccagtacttggcaggaggttttcgctcgacagatcatagctctcctactgctcctagctttgttgggaatgtttgtgtattttttcaaggtgtgtttgtagttgctgctaagcgaacgccctttggagcttacggaggccttctgaaagacttcactgctactgacttgtctgaatttgctgccaaggctgccttgtctgctggcaaagtctcacctgaaacagttgacagtgtgattatgggcaatgtcctgcagagttcttcagatgctatatatttggcaaggcatgttggtttgcgtgtgggaatcccaaaggagaccccagctctcacgattaataggctctgtggttctggttttcagtccattgtgaatggatgtcaggaaatttgtgttaaagaagctgaagttgttttatgtggaggaaccgaaagcatgagccaagctccctactgtgtcagaaatgtgcgttttggaaccaagcttggat

SEQ ID NO: 103705 - DNA, 1657 bp, Homo sapiens
  Payload ID: 384
  Gene Symbol: ACAA2
  Gene Name: acetyl-CoA acyltransferase 2
  ENST ID: ENST00000587994
  CDS Start-End: 131-1315
gttcggtcccgcccccagctggcggccgcggccgcccgcgcgccaagttcctcagcccttggctcctgcccagtgtttagggtgttggcggagacaaaggggaagagtcatcgcctgtcggggctaggatatgatgggtgtgtttgtagttgctgctaagcgaacgccctttggagcttacggaggccttctgaaagacttcactgctactgacttgtctgaatttgctgccaaggctgccttgtctgctggcaaagtctcacctgaaacagttgacagtgtgattatgggcaatgtcctgcagagttcttcagatgctatatatttggcaaggcatgttggtttgcgtgtgggaatcccaaaggagaccccagctctcacgattaataggctctgtggttctggttttcagtccattgtgaatggatgtcaggaaatttgtgttaaagaagctgaagttgttttatgtggaggaaccgaaagcatgagccaagctccctactgtgtcagaaatgtgcgttttggaaccaagcttggatcagatatcaagctggaagattctttatgggtatcattaacagatcagcatgtccagctccccatggcaatgactgcagagaatcttgctgtaaaacacaaaataagcagagaagaatgtgacaaatatgccctgcagtcacagcagagatggaaagctgctaatgatgctggctactttaatgatgaaatggcaccaattgaagtgaagacaaagaaaggaaaacagacaatgcaggtagacgagcatgctcggccccaaaccaccctggaacagttacagaaacttcctccagtattcaagaaagatggaactgttactgcagggaatgcatcgggtgtagctgatggtgctggagctgttatcatagctagtgaagatgctgttaagaaacataacttcacaccactggcaagaattgtgggctactttgtatctggatgtgatccctctatcatgggtattggtcctgtccctgctatcagtggggcactgaagaaagcaggactgagtcttaaggacatggatttggtagaggtgaatgaagcttttgctccccagtacttggctgttgagaggagtttggatcttgacataagtaaaaccaatgtgaatggaggagccattgctttgggtcacccactgggaggatctggatcaagaattactgcacacctggttcacgaattaaggcgtcgaggtggaaaatatgccgttggatcagcttgcattggaggtggccaaggtattgctgtcatcattcagagcacagcctgaagagaccagtgagctcactgtgacccatccttactctacttggccaggccacagtaaaacaagtgaccttcagagcagctgccacaactggccatgccctgccattgaaacagtgattaagtttgatcaagccatggtgacacaaaaatgcattgatcatgaataggagcccatgctagaagtacattctctcagatttgaaccagtgaaatatgatgtatttctgagctaaaactcaactatagaagacattaaaagaaatcgtattcttgccaagtaaccaccacttctgccttagataatatgattataaggaaatcaaataaatgttgccttaacttc

SEQ ID NO: 103706 - DNA, 1840 bp, Homo sapiens
  Payload ID: 384
  Gene Symbol: ACAA2
  Gene Name: acetyl-CoA acyltransferase 2
  ENST ID: ENST00000589432
  CDS Start-End: 468-1496
gatggagaggcctgcagaaatggtagctggtgttctgctggaagacctgccctgctcccatttcccttctgttgctttagattagagcggtcactctatacctaagttctagggttatgaacttgtttaaaacaactgtgtaataaactcccttttcaaaacaagtgggcacagtcaatggaatcttactttaaggatgtacgagtcgaagaacattgaggtggaatacatatcgaggccctgagacaggaaaaagcttggcaggatctaagaaccaagcattttggtgctccagggccctgtgggctctgtaagaaggtgtgtttgtagttgctgctaagcgaacgccctttggagcttacggaggccttctgaaagacttcactgctactgacttgtctgaatttgctgccaaggctgccttgtctgctggcaaagtctcacctgaaacagttgacagtgtgattatgggcaatgtcctgcagagttcttcagatgctatatatttggcaaggcatgttggtttgcgtgtgggaatcccaaaggagaccccagctctcacgattaataggctctgtggttctggttttcagtccattgtgaatggatgtcaggaaatttgtgttaaagaagctgaagttgttttatgtggaggaaccgaaagcatgagccaagctccctactgtgtcagaaatgtgcgttttggaaccaagcttggatcagatatcaagctggaagattctttatgggtatcattaacagatcagcatgtccagctccccatggcaatgactgcagagaatcttgctgtaaaacacaaaataagcagagaagaatgtgacaaatatgccctgcagtcacagcagagatggaaagctgctaatgatgctggctactttaatgatgaaatggcaccaattgaagtgaagacaaagaaaggaaaacagacaatgcaggtagacgagcatgctcggccccaaaccaccctggaacagttacagaaacttcctccagtattcaagaaagatggaactgttactgcagggaatgcatcgggtgtagctgatggtgctggagctgttatcatagctagtgaagatgctgttaagaaacataacttcacaccactggcaagaattgtgggctactttgtatctggatgtgatccctctatcatgggtattggtcctgtccctgctatcagtggggcactgaagaaagcaggactgagtcttaaggacatggatttggtagaggtgaatgaagcttttgctccccagtacttggctgttgagaggagtttggatcttgacataagtaaaaccaatgtgaatggaggagccattgctttgggtcacccactgggaggatctggatcaagaattactgcacacctggttcacgaattaaggcgtcgaggtggaaaatatgccgttggatcagcttgcattggaggtggccaaggtattgctgtcatcattcagagcacagcctgaagagaccagtgagctcactgtgacccatccttactctacttggccaggccacagtaaaacaagtgaccttcagagcagctgccacaactggccatgccctgccattgaaacagtgattaagtttgatcaagccatggtgacacaaaaatgcattgatcatgaataggagcccatgctagaagtacattctctcagatttgaaccagtgaaatatgatgtatttctgagctaaaactcaactatagaagacattaaaagaaatcgtattcttgccaagtaaccaccacttctgccttagataatatgattataaggaaatcaaataaatgttgccttaacttcag

SEQ ID NO: 103707 - DNA, 639 bp, Homo sapiens
  Payload ID: 384
  Gene Symbol: ACAA2
  Gene Name: acetyl-CoA acyltransferase 2
  ENST ID: ENST00000586100
  CDS Start-End: 422-639
gttcggtcccgcccccagctggcggccgcggccgcccgcgcgccaagttcctcagcccttggctcctgcccagtgtttagggtgttggcggagacaaaggggaagagtcatcgcctgtcggggctaggatatgatgggtgagaggtgtcaaaccaaattctctcggtttggaaacggagaaaatctaaaaatgaggatgtgaggaaagagtccgctctcaaggcgcgttgtggtctatccgagccccgtcccctgggctccctcgggctggggtgtgtttgtagttgctgctaagcgaacgccctttggagcttacggaggccttctgaaagacttcactgctactgacttgtctgaatttgctgccaaggctgccttgtctgctggcaaagtctcacctgaaacagttgacagtgtgattatgggcaatgtcctgcagagttcttcagatgctatatatttggcaaggcatgttggtttgcgtgtgggaatcccaaaggagaccccagctctcacgattaataggctctgtggttctggttttcagtccattgtgaatggatgtcaggaaatttgtgttaaagaagctgaagttgttttatgtggaggaaccgaaagcatgagccaagctccctactg

SEQ ID NO: 103708 - DNA, 1626 bp, Homo sapiens
  Payload ID: 385
  Gene Symbol: ACACA
  Gene Name: acetyl-CoA carboxylase alpha
  ENST ID: ENST00000616352
  CDS Start-End: 1267-1626
gccctcttggccttttcccggtccccgccgcgcgcctgctgctgtccccgtgcccgaggactgggaggatggggctgagccgcttgcctgacttttgatccgaccagtaatcactttgcccgtgtggcgcgtggcccgttgcctgaggcttcctggcgcgtggggctgtttggtcccctccggagtgcggtgaggcgggccgagccgggactgcctgggtttggggataacgttcccatctccacccctgttgcagcaagggaaattgaggctgagggaactgggcccagggacggcgagccgtggcgcctctccagtccgggccccgaagggctgctcgtggatgaaccagactgattttaaggggtgaagagggtgcgtttcaatcagatgctcctggaacgtcgaaattgtcttctttggaaagaaccatcccctctttgggcttcagaggcccaaattgaggcgcaatgatgagaggatgtggtggtctactctgatgtcaatcttgagggctagggtcttgctatgtcacccagcctggagtggaattgtgtgatcaagactcactgaagcctccaactcctgggctcaagcaatcctcccacctcagccacccaagtagctgggactacaggctggagtgcaatggcatgatcttggctcactgcaacctccgcctcccggattcaacggattctcctgcctcagcctcctgagtagctgggattataggtgcctgccacaacacccaggaccagacttatgaagtggccttcctgaggagattttctgaccttatggtatgaagttccttcaggctcttaattctggataaactggagtgattaacaagagcaaagagacatagtattcagataaggactttgtgtcttatttttcttttatatcacaactggagccacagttgtgggcaaggcactgactttcttgatgaattctgtccatctgtaaagcagctatatatcccactggaggctttgcctctcagagacaacgtgaagacggataagcaggcatcaggagcagagtggcctctcagctggtcagattctccgaagaaggatcctctaggctgggcacggtggctcacacctataatcccagcactttgggaggccgaggcaggtggatcacgaggtcaggagttcgaggccagcctggccaatatggtctttttggaagtggatatctactcagacagtaagaattataagagctgtaagagctcattttggaggaataatggatgaaccatctcccttggcccaacctctggagctgaaccagcactctcgattcataataggttctgtgtctgaagataactcagaggatgagatcagcaacctggtgaagttggacctactggaggagaaggagggctccttgtcacctgcttctgttggctcagatacactctctgatttggggatctctagcctacaggatggcttggccttgcacataaggtccagcatgtctggcttgcacctagtaaagcagggccgagacagaaagaaaatagattctcaacgagatttcactgtggcttctccagcagaatttgttactcgctttgggggaaataaagtgattgagaag

SEQ ID NO: 103709 - DNA, 9554 bp, Homo sapiens
  Payload ID: 385
  Gene Symbol: ACACA
  Gene Name: acetyl-CoA carboxylase alpha
  Uniprot ID: Q13085
  ENST ID: ENST00000614428
  CDS Start-End: 192-7232
cggcctggtgctgcacgcctgtcagccatcgcccgagccgccggcgtctcctcccgcccagcagttcctccacgcaggggctccggaatcgcccgaccgcacacgttgccaccctgaggtctttttggaagtggatatctactcagacagtaagaattataagagctgtaagagctcattttggaggaataatggatgaaccatctcccttggcccaacctctggagctgaaccagcactctcgattcataataggttctgtgtctgaagataactcagaggatgagatcagcaacctggtgaagttggacctactggaggagaaggagggctccttgtcacctgcttctgttggctcagatacactctctgatttggggatctctagcctacaggatggcttggccttgcacataaggtccagcatgtctggcttgcacctagtaaagcagggccgagacagaaagaaaatagattctcaacgagatttcactgtggcttctccagcagaatttgttactcgctttgggggaaataaagtgattgagaaggttcttattgctaacaatggcattgcagcagtgaaatgcatgcggtctatccgtaggtggtcttatgaaatgtttcgaaatgaacgtgcaattagattcgttgtcatggtcacacctgaagaccttaaagccaatgcagaatacattaagatggcagatcactatgtgccagtgcctggaggaccaaacaacaacaactatgcaaatgtggaattaattcttgatattgctaaaaggatcccagtacaagcagtgtgggctggctggggtcatgcttctgagaatcccaaactaccggaacttctcttgaaaaatggcattgccttcatgggtcctccaagccaggccatgtgggctttaggggataagattgcatcttccatagtggctcaaactgcaggtatcccaactcttccctggagcggcagtggtcttcgtgtggactggcaggaaaatgatttttcaaaacgtatcttaaatgttccccaggagctatatgaaaaaggttatgtgaaagatgtggatgatgggctacaggcagctgaggaagttggatatccagtaatgatcaaggcctcagagggaggaggagggaagggaattagaaaagtcaacaatgcagatgacttccctaatctcttcagacaggttcaagctgaagttcctggatctcccatatttgtgatgagactagccaaacaatctcgtcatctggaggtgcagatcttagcggaccaatatggcaatgctatctctttgtttggtcgtgattgctctgtacaacgcaggcatcagaagattattgaagaagcacctgctactattgctactccagcagtatttgaacacatggaacagtgtgcggtgaaacttgccaaaatggtgggttatgtgagtgctgggactgtggaatacctgtacagccaggatggcagcttctactttctggaattgaatcctcggctgcaggtagagcacccttgtacagagatggtggctgatgtcaatctccctgcagcacagctccagattgccatggggattcctctatatagaatcaaggatatccgtatgatgtatggggtatctccctggggtgattctcccattgattttgaagattctgcacacgttccttgtccaaggggccatgttattgctgctcggatcactagtgaaaatccagatgagggttttaagcccagctcaggaacagttcaggagctaaatttccgcagcaataagaatgtttggggatatttcagtgttgctgctgcagggggacttcatgaatttgctgattctcagtttggtcactgcttttcttggggagaaaacagagaagaggcaatttcaaacatggtggtggctttgaaggagctgtctattcggggtgactttcgaactacagttgaatacctgatcaaattgttagagactgaaagctttcagatgaacagaattgatactggctggctggacagactgatagcagaaaaagtacaggctgagcgacctgacaccatgttgggggttgtgtgtggtgccctccacgtggcagatgtgagcctgcggaatagcgtctctaacttccttcactccttagaaaggggtcaagtccttcctgctcatacacttctgaatacagtagatgttgaacttatctatgagggagtcaagtatgtacttaaggtgactcgacagtcccccaactcctatgtggtgatcatgaatggctcatgtgtagaagtagatgtacatcggctgagtgacggtggactgctcttgtcctatgatggcagcagttatactacgtatatgaaagaggaagtggatagatatcgcatcacaattggcaataaaacctgtgtgtttgagaaggaaaatgacccatcggtgatgcgctcaccttctgctgggaagttaatccagtacattgtagaagatggaggtcatgtgtttgccggccagtgctatgctgagattgaggtaatgaagatggtaatgaccttaacagctgtggagtctggctgtatccattacgtcaagcgacctggagcagctcttgaccctggctgtgtactagccaaaatgcaactggacaaccccagcaaggttcagcaggctgaacttcacacaggtagtctgccacggatccagagcacggcactcagaggcgagaaactccatcgagtgttccattatgtcctggataatctggtcaatgtaatgaatggatactgccttccagatcctttctttagcagcaaggtaaaagactgggtagagcgattgatgaaaaccctcagagatccctccctgcctctcctagaattgcaagatattatgaccagtgtgtctggccgcattccccccaatgtggagaagtctatcaagaaggaaatggctcagtatgctagcaacatcacatcagtcctctgtcagtttcccagccagcagattgcaaacatcctagatagccatgcagctacattgaaccggaaatctgaacgggaagtcttctttatgaatactcagagcattgttcagctggtacagaggtaccgaagtggcatccgaggccacatgaaggctgtggtgatggatctgctccggcagtacctgcgagtagagacacaattccagaatggtcactatgacaaatgtgtattcgccctccgagaagagaataaaagtgacatgaacactgtactgaactacatcttctctcacgctcaagtcaccaagaagaatcttctggtcacaatgcttattgatcagttgtgtggccgggaccctactctcactgatgagctgctgaatattctcacagagctaactcaactcagtaagaccaccaatgccaaagtagcacttcgagcacgccaggttcttattgcctcccatttgccatcatatgagcttcgccataaccaagtagagtctatcttcctatcagctattgacatgtatggacatcaattttgcattgagaacctgcagaaactcatcctatcagaaacatctatttttgatgtcctaccaaacttcttctatcacagcaaccaagtagtgaggatggcagctctggaggtgtatgttcgaagggcttatattgcctatgaacttaacagcgtacaacaccgccagcttaaggacaacacctgtgtggtggaattccagttcatgctgcccacatctcatccaaacagagggaacatccctacgctaaacagaatgtccttctcctccaacctcaaccactatggcatgacccatgtagctagtgtcagcgatgtactgttggacaactcattcactccaccttgtcagcggatgggcggaatggtctcttttcggacttttgaagattttgtcaggatctttgatgaagtgatgggctgcttctctgactccccaccccagagtcccacattccctgaggcaggtcacacgtctctttatgatgaggataaggttcccagggatgaaccaattcacattctcaatgtggctatcaagactgactgtgatattgaggatgacaggctggcagctatgttcagagaatttacccagcaaaataaagctaccctggttgaccatgggatccggcgccttactttcctggttgcacaaaaggatttcagaaagcaggtcaactatgaggtggatcggagatttcatagagaattccctaaattttttacattccgagcaagggataagtttgaggaggatcgtatctatcgtcatctggagcctgctctggctttccagttagagctgaaccggatgagaaattttgacctcactgccattccatgtgctaatcacaagatgcacctgtatctcggggcagccaaggtggaagtgggcacagaagtgacagactacaggttctttgttcgtgcaatcatcaggcattctgatctggtcaccaaggaagcttcttttgaatatctgcaaaatgaaggggagcggctactcctggaagccatggatgagttggaagttgcttttaacaatacaaatgtccgcactgactgtaaccacatcttcctcaactttgtgcccacggttatcatggacccatcaaagattgaggaatccgtgcggagcatggtaatgcggtatggaagtcgcctgtggaaattgcgcgtcctccaggcagaactgaaaatcaacattcgcctgacgccaactggaaaagcaattcccatccgcctcttcctgacaaacgagtctggctattacttggatatcagcctatacaaggaagtgactgactccaggacagcacagatcatgtttcaggcatatggagacaaacagggaccactgcatggaatgttaatcaatactccatatgtgaccaaagacctgctgcaatcaaagaggttccaggcacaatccttagggacaacatacatatatgatatcccagagatgtttcggcagtccctgatcaaactctgggagtctatgtccactcaagcatttcttccatctccccctctgccttctgacatgctgacttacactgaactggtactggatgatcaaggtcagctggtccacatgaacaggcttccaggaggaaatgagattggcatggtagcttggaaaatgacctttaaaagtcctgaatatccagaaggccgagatatcattgttattggcaatgacatcacataccgaattgggtcctttgggcctcaagaggatttgttatttctcagagcttccgaacttgctagggcagaaggtattccacgcatctatgtatcagccaacagtggagcaagaatcggactggcagaagaaattcgccatatgtttcatgtggcctgggtagatcctgaggatccttacaagggatacaggtatttatatctgactcctcaagattataagagagtcagtgctctcaactctgtccattgtgaacacgtggaagatgaaggagaatccaggtacaagataacagatattattgggaaagaagagggaattggacccgagaaccttcgaggttctggaatgattgctggagaatcctcattggcctataatgagatcattaccatcagcctggtgacgtgccgggccattgggattggggcttaccttgtccggctgggacagagaaccatccaggttgagaattctcacttaattctaacaggagctggagccctcaacaaagtcctcgggcgggaagtgtacacctccaataaccagctggggggcatccagattatgcacaacaatggggtgacccactgcactgtgtgtgatgactttgaaggggttttcactgtcctgcactggctgtcttacatgcccaagagcgtgcacagttcagttcctcttctgaactcaaaggatcctatagacagaatcatcgagtttgttcccacaaagaccccatacgatcctcgatggatgctagcaggccgtcctcacccaacccaaaaaggtcagtggttgagtggcttttttgactatggatctttctcagagattatgcagccctgggcacagactgtggtggttggtagagccaggctaggaggaatacctgtgggagttgttgctgtagaaacccgaacagtagaactaagtatcccagctgatccagcaaacctggattctgaagccaagataatccagcaggctggccaggtttggttcccagattctgcgtttaagacgtatcaggccatcaaggacttcaaccgggaagggctgcctctgatggtctttgccaactggagaggcttctctggtggaatgaaagatatgtacgaccaagtgctgaagtttggtgcttacattgtggatggcttgagggagtgctgccagcctgtgctggtttacattcctccccaggctgagctgcggggtggctcctgggtggtgattgactcctccatcaacccccggcacatggagatgtatgctgaccgagaaagcaggggatctgttctggagccagaagggacagtagaaatcaaattccgcagaaaggatctggtgaaaaccatgcgtcgggtggacccagtctacatccacttggctgagcgattggggaccccagagctaagcacagctgagcggaaggagttggagaacaagttgaaggagcgggaggaattcctaattcccatttaccatcaggtagccgtgcagtttgctgacttgcacgacacaccaggccggatgcaggagaagggtgttattagcgatatcctggattggaaaacatcccgtaccttcttctactggcggctgaggcgtcttctgctggaggacctggtcaagaagaaaatccacaatgccaaccctgagctgactgatggccagattcaagccatgttaaggcgctggtttgtggaagtggaaggaacagtgaaggcttatgtttgggacaataataaggatctggcggagtggctagagaaacagctgacagaggaggatggtgttcactcggtaatagaggaaaacatcaaatgcatcagcagagactacgtcctcaagcaaatccgcagcttggtccaggccaatccagaggttgccatggattccatcatccatatgacgcagcacatatcacccactcagcgagcagaagtcatacggatcctctccacaatggattccccttccacgtaggaagagcttcctgcctgtccctgccctgtctctggagaaaagggctagagctgccttttacaactgtaaccactgtaatgagaaggcacaggagacccagcactggagtcaaatggcattttacttcctctcgtttcaggttatgcatgacatcctgggatgtaagatcacagaatccccctccagcccaccagtcacacctaccccattcagtatttattaccctggccaggcctagtcctccactccctgcacaggactgagaaggcaatgaaaggtacaaacatgtaccatgaggtcttactaaccaaagtagggctgcccctcctgtcctgacagccccttggcctcccagcatggggaagcgtgaggagttgcccagcagtgagcagcccccctcactcctggccccatgagccgcagccacaggcagcagaggagggctaaggagaggaggaagcctcaagtccattgtttattaccccgactcttagcccagcacacagtaggcactggagaggaatgattcccagtttaaccacactacggtaccttttatgaagaaaaattagagcataaaatctactacaagctccataggaactcaaagatgagggcaaaactgtgagccaagaagcagagaaagaaaatagaaccagttattcttgatttaggggacctcaaccttgggttcagtctctgaggacaaagggaaaggtagttgttggcctgcctctcgcctgcacgtcactgctggactagctgtcgcatgtggctgggagctgcaaggccagtgcttgaggggccccagcagttccacaggtggtgaagcctgagttggcagaggaggagccagaagagaactgccctttctgcactggtggaaactagttatttatgccatgtggagagccagtgagatagatagatagtctgtttgttttgaggacttggaaagttgttcctatgaagcctggagcttggatggttttgagaggttaatggtgcctccacactcactcttccctagttccaggattactgtcctagcagctaacggttctactctcttccccagagtgtagacaggcagcaggtctccccacagctctgaaaggaccctggtgacagctacaccctcagcaccaggagctggccttcctgatgagggaggcttccaggaaacacagaatccacatgaccttaagattatttacaactcagtcatggtgctgctgtcctccaggcttactggcccctcctgactggcatcaggggcttcctcaggtggtggagagagtttactttcaacaactagtttattcaagaaaagaacttactgattcctctgttcctaaagcaagagtggcaggtgatcagggctggtgtagcatccggttcctttagtgcagctaactgcatttgtcactgatgaccaaggaggaaatcactaagacatttgagaagcagtggtatgaacgttcttggacaagccacagttctgagccttaaccctgtagtttgcacacaagaacgagctccacctccccttcttcaggaggaatctgtgcggatagattggctggacttttcaatggttctgggttgcaggtgggcactgtatggctgggtatggagcggacagcccccaggagtcagagcctcagcccggctgccctggtggaaggtacaggtgttcagcaccttcagaaaagggcataaagtggtgggggacaattctcagtccaggaaaatgcattgaccattgctggctatttgcttacctagtaagaattggattcatttttgaccagattattcttctatgcttttttgcaataaatcaaatcccacatatctacaagtggtatgaagtcctgcaccccccaggaggcctgtccaggcatgtcttcagaggcagggtgggttacactcatttacctcccctctccccaccaaattatgacacaaacgagtatgtttcctctctagaaccctgtaatgcctcctcccccatccccagagctccttactgtaggtcttaccctggacaaggattttttcaagttggaggcacagaacatgagcaatctgacattcccacagcccctcaaacatgcaaggctactaaggcaggaggagtataaatgatggatattgaccaagacctgcttggacggagaccgccatattatctgttctcttcgttcacaaaacagccttcacttgtctcagaatttgatggacacatactgtgatgagcaggagcttcagatgcactctttacacattttgttgaaataaacctctacatttgtagaa

SEQ ID NO: 103710 - DNA, 9962 bp, Homo sapiens
  Payload ID: 385
  Gene Symbol: ACACA
  Gene Name: acetyl-CoA carboxylase alpha
  Uniprot ID: Q13085
  ENST ID: ENST00000619487
  CDS Start-End: 483-7634
gccctcttggccttttcccggtccccgccgcgcgcctgctgctgtccccgtgcccgaggactgggaggatggggctgagccgcttgcctgacttttgatccgaccagtaatcactttgcccgtgtggcgcgtggcccgttgcctgaggcttcctggcgcgtggggctgtttggtcccctccggagtgcggtgaggcgggccgagccgggactgcctgggtttggggataacgttcccatctccacccctgttgcagcaagggaaattgaggctgagggaactgggcccagggacggcgagccgtggctgcctctccagtccgggccccgaagggctgctcgtggatgaaccagactgattttaaggggtgaagagggtgcgtttcaatcagatgcttctggaacgtcgaaattgtcttctttggaaagaaccatcccctctttgggcttcagaggcccaaattgaggcgcaatgatgagaggatgtggtggtctactctgatgtcaatcttgagggctaggtctttctggaagtggatatctactcagacagtaagaattataagagctgtaagagctcattttggaggaataatggatgaaccatctcccttggcccaacctctggagctgaaccagcactctcgattcataataggttctgtgtctgaagataactcagaggatgagatcagcaacctggtgaagttggacctactggaggagaaggagggctccttgtcacctgcttctgttggctcagatacactctctgatttggggatctctagcctacaggatggcttggccttgcacataaggtccagcatgtctggcttgcacctagtaaagcagggccgagacagaaagaaaatagattctcaacgagatttcactgtggcttctccagcagaatttgttactcgctttgggggaaataaagtgattgagaaggttcttattgctaacaatggcattgcagcagtgaaatgcatgcggtctatccgtaggtggtcttatgaaatgtttcgaaatgaacgtgcaattagattcgttgtcatggtcacacctgaagaccttaaagccaatgcagaatacattaagatggcagatcactatgtgccagtgcctggaggaccaaacaacaacaactatgcaaatgtggaattaattcttgatattgctaaaaggatcccagtacaagcagtgtgggctggctggggtcatgcttctgagaatcccaaactaccggaacttctcttgaaaaatggcattgccttcatgggtcctccaagccaggccatgtgggctttaggggataagattgcatcttccatagtggctcaaactgcaggtatcccaactcttccctggagcggcagtggtcttcgtgtggactggcaggaaaatgatttttcaaaacgtatcttaaatgttccccaggagctatatgaaaaaggttatgtgaaagatgtggatgatgggctacaggcagctgaggaagttggatatccagtaatgatcaaggcctcagagggaggaggagggaagggaattagaaaagtcaacaatgcagatgacttccctaatctcttcagacaggttcaagctgaagttcctggatctcccatatttgtgatgagactagccaaacaatctcgtcatctggaggtgcagatcttagcggaccaatatggcaatgctatctctttgtttggtcgtgattgctctgtacaacgcaggcatcagaagattattgaagaagcacctgctactattgctactccagcagtatttgaacacatggaacagtgtgcggtgaaacttgccaaaatggtgggttatgtgagtgctgggactgtggaatacctgtacagccaggatggcagcttctactttctggaattgaatcctcggctgcaggtagagcacccttgtacagagatggtggctgatgtcaatctccctgcagcacagctccagattgccatggggattcctctatatagaatcaaggatatccgtatgatgtatggggtatctccctggggtgattctcccattgattttgaagattctgcacacgttccttgtccaaggggccatgttattgctgctcggatcactagtgaaaatccagatgagggttttaagcccagctcaggaacagttcaggagctaaatttccgcagcaataagaatgtttggggatatttcagtgttgctgctgcagggggacttcatgaatttgctgattctcagtttggtcactgcttttcttggggagaaaacagagaagaggcaatttcaaacatggtggtggctttgaaggagctgtctattcggggtgactttcgaactacagttgaatacctgatcaaattgttagagactgaaagctttcagatgaacagaattgatactggctggctggacagactgatagcagaaaaagtacaggctgagcgacctgacaccatgttgggggttgtgtgtggtgccctccacgtggcagatgtgagcctgcggaatagcgtctctaacttccttcactccttagaaaggggtcaagtccttcctgctcatacacttctgaatacagtagatgttgaacttatctatgagggagtcaagtatgtacttaaggtgactcgacagtcccccaactcctatgtggtgatcatgaatggctcatgtgtagaagtagatgtacatcggctgagtgacggtggactgctcttgtcctatgatggcagcagttatactacgtatatgaaagaggaagtggatagatatcgcatcacaattggcaataaaacctgtgtgtttgagaaggaaaatgacccatcggtgatgcgctcaccttctgctgggaagttaatccagtacattgtagaagatggaggtcatgtgtttgccggccagtgctatgctgagattgaggtaatgaagatggtaatgaccttaacagctgtggagtctggctgtatccattacgtcaagcgacctggagcagctcttgaccctggctgtgtactagccaaaatgcaactggacaaccccagcaaggttcagcaggctgaacttcacacaggtagtctgccacggatccagagcacggcactcagaggcgagaaactccatcgagtgttccattatgtcctggataatctggtcaatgtaatgaatggatactgccttccagatcctttctttagcagcaaggtaaaagactgggtagagcgattgatgaaaaccctcagagatccctccctgcctctcctagaattgcaagatattatgaccagtgtgtctggccgcattccccccaatgtggagaagtctatcaagaaggaaatggctcagtatgctagcaacatcacatcagtcctctgtcagtttcccagccagcagattgcaaacatcctagatagccatgcagctacattgaaccggaaatctgaacgggaagtcttctttatgaatactcagagcattgttcagctggtacagaggtaccgaagtggcatccgaggccacatgaaggctgtggtgatggatctgctccggcagtacctgcgagtagagacacaattccagaatggtcactatgacaaatgtgtattcgccctccgagaagagaataaaagtgacatgaacactgtactgaactacatcttctctcacgctcaagtcaccaagaagaatcttctggtcacaatgcttattgatcagttgtgtggccgggaccctactctcactgatgagctgctgaatattctcacagagctaactcaactcagtaagaccaccaatgccaaagtagcacttcgagcacgccaggttcttattgcctcccatttgccatcatatgagcttcgccataaccaagtagagtctatcttcctatcagctattgacatgtatggacatcaattttgcattgagaacctgcagaaactcatcctatcagaaacatctatttttgatgtcctaccaaacttcttctatcacagcaaccaagtagtgaggatggcagctctggaggtgtatgttcgaagggcttatattgcctatgaacttaacagcgtacaacaccgccagcttaaggacaacacctgtgtggtggaattccagttcatgctgcccacatctcatccaaacagagggaacatccctacgctaaacagaatgtccttctcctccaacctcaaccactatggcatgacccatgtagctagtgtcagcgatgtactgttggacaactcattcactccaccttgtcagcggatgggcggaatggtctcttttcggacttttgaagattttgtcaggatctttgatgaagtgatgggctgcttctctgactccccaccccagagtcccacattccctgaggcaggtcacacgtctctttatgatgaggataaggttcccagggatgaaccaattcacattctcaatgtggctatcaagactgactgtgatattgaggatgacaggctggcagctatgttcagagaatttacccagcaaaataaagctaccctggttgaccatgggatccggcgccttactttcctggttgcacaaaaggatttcagaaagcaggtcaactatgaggtggatcggagatttcatagagaattccctaaattttttacattccgagcaagggataagtttgaggaggatcgtatctatcgtcatctggagcctgctctggctttccagttagagctgaaccggatgagaaattttgacctcactgccattccatgtgctaatcacaagatgcacctgtatctcggggcagccaaggtggaagtgggcacagaagtgacagactacaggttctttgttcgtgcaatcatcaggcattctgatctggtcaccaaggaagcttcttttgaatatctgcaaaatgaaggggagcggctactcctggaagccatggatgagttggaagttgcttttaacaatacaaatgtccgcactgactgtaaccacatcttcctcaactttgtgcccacggttatcatggacccatcaaagattgaggaatccgtgcggagcatggtaatgcggtatggaagtcgcctgtggaaattgcgcgtcctccaggcagaactgaaaatcaacattcgcctgacgccaactggaaaagcaattcccatccgcctcttcctgacaaacgagtctggctattacttggatatcagcctatacaaggaagtgactgactccaggacagcacagatcatgtttcaggcatatggagacaaacagggaccactgcatggaatgttaatcaatactccatatgtgaccaaagacctgctgcaatcaaagaggttccaggcacaatccttagggacaacatacatatatgatatcccagagatgtttcggcagtccctgatcaaactctgggagtctatgtccactcaagcatttcttccatctccccctctgccttctgacatgctgacttacactgaactggtactggatgatcaaggtcagctggtccacatgaacaggcttccaggaggaaatgagattggcatggtagcttggaaaatgacctttaaaagtcctgaatatccagaaggccgagatatcattgttattggcaatgacatcacataccgaattgggtcctttgggcctcaagaggatttgttatttctcagagcttccgaacttgctagggcagaaggtattccacgcatctatgtatcagccaacagtggagcaagaatcggactggcagaagaaattcgccatatgtttcatgtggcctgggtagatcctgaggatccttacaagggatacaggtatttatatctgactcctcaagattataagagagtcagtgctctcaactctgtccattgtgaacacgtggaagatgaaggagaatccaggtacaagataacagatattattgggaaagaagagggaattggacccgagaaccttcgaggttctggaatgattgctggagaatcctcattggcctataatgagatcattaccatcagcctggtgacgtgccgggccattgggattggggcttaccttgtccggctgggacagagaaccatccaggttgagaattctcacttaattctaacaggagctggagccctcaacaaagtcctcgggcgggaagtgtacacctccaataaccagctggggggcatccagattatgcacaacaatggggtgacccactgcactgtgtgtgatgactttgaaggggttttcactgtcctgcactggctgtcttacatgcccaagagcgtgcacagttcagttcctcttctgaactcaaaggatcctatagacagaatcatcgagtttgttcccacaaagaccccatacgatcctcgatggatgctagcaggccgtcctcacccaacccaaaaaggtcagtggttgagtggcttttttgactatggatctttctcagagattatgcagccctgggcacagactgtggtggttggtagagccaggctaggaggaatacctgtgggagttgttgctgtagaaacccgaacagtagaactaagtatcccagctgatccagcaaacctggattctgaagccaagataatccagcaggctggccaggtttggttcccagattctgcgtttaagacgtatcaggccatcaaggacttcaaccgggaagggctgcctctgatggtctttgccaactggagaggcttctctggtggaatgaaagatatgtacgaccaagtgctgaagtttggtgcttacattgtggatggcttgagggagtgctgccagcctgtgctggtttacattcctccccaggctgagctgcggggtggctcctgggtggtgattgactcctccatcaacccccggcacatggagatgtatgctgaccgagaaagcaggggatctgttctggagccagaagggacagtagaaatcaaattccgcagaaaggatctggtgaaaaccatgcgtcgggtggacccagtctacatccacttggctgagcgattggggaccccagagctaagcacagctgagcggaaggagttggagaacaagttgaaggagcgggaggaattcctaattcccatttaccatcaggtagccgtgcagtttgctgacttgcacgacacaccaggccggatgcaggagaagggtgttattagcgatatcctggattggaaaacatcccgtaccttcttctactggcggctgaggcgtcttctgctggaggacctggtcaagaagaaaatccacaatgccaaccctgagctgactgatggccagattcaagccatgttaaggcgctggtttgtggaagtggaaggaacagtgaaggcttatgtttgggacaataataaggatctggcggagtggctagagaaacagctgacagaggaggatggtgttcactcggtaatagaggaaaacatcaaatgcatcagcagagactacgtcctcaagcaaatccgcagcttggtccaggccaatccagaggttgccatggattccatcatccatatgacgcagcacatatcacccactcagcgagcagaagtcatacggatcctctccacaatggattccccttccacgtaggaagagcttcctgcctgtccctgccctgtctctggagaaaagggctagagctgccttttacaactgtaaccactgtaatgagaaggcacaggagacccagcactggagtcaaatggcattttacttcctctcgtttcaggttatgcatgacatcctgggatgtaagatcacagaatccccctccagcccaccagtcacacctaccccattcagtatttattaccctggccaggcctagtcctccactccctgcacaggactgagaaggcaatgaaaggtacaaacatgtaccatgaggtcttactaaccaaagtagggctgcccctcctgtcctgacagccccttggcctcccagcatggggaagcgtgaggagttgcccagcagtgagcagcccccctcactcctggccccatgagccgcagccacaggcagcagaggagggctaaggagaggaggaagcctcaagtccattgtttattaccccgactcttagcccagcacacagtaggcactggagaggaatgattcccagtttaaccacactacggtaccttttatgaagaaaaattagagcataaaatctactacaagctccataggaactcaaagatgagggcaaaactgtgagccaagaagcagagaaagaaaatagaaccagttattcttgatttaggggacctcaaccttgggttcagtctctgaggacaaagggaaaggtagttgttggcctgcctctcgcctgcacgtcactgctggactagctgtcgcatgtggctgggagctgcaaggccagtgcttgaggggccccagcagttccacaggtggtgaagcctgagttggcagaggaggagccagaagagaactgccctttctgcactggtggaaactagttatttatgccatgtggagagccagtgagatagatagatagtctgtttgttttgaggacttggaaagttgttcctatgaagcctggagcttggatggttttgagaggttaatggtgcctccacactcactcttccctagttccaggattactgtcctagcagctaacggttctactctcttccccagagtgtagacaggcagcaggtctccccacagctctgaaaggaccctggtgacagctacaccctcagcaccaggagctggccttcctgatgagggaggcttccaggaaacacagaatccacatgaccttaagattatttacaactcagtcatggtgctgctgtcctccaggcttactggcccctcctgactggcatcaggggcttcctcaggtggtggagagagtttactttcaacaactagtttattcaagaaaagaacttactgattcctctgttcctaaagcaagagtggcaggtgatcagggctggtgtagcatccggttcctttagtgcagctaactgcatttgtcactgatgaccaaggaggaaatcactaagacatttgagaagcagtggtatgaacgttcttggacaagccacagttctgagccttaaccctgtagtttgcacacaagaacgagctccacctccccttcttcaggaggaatctgtgcggatagattggctggacttttcaatggttctgggttgcaggtgggcactgtatggctgggtatggagcggacagcccccaggagtcagagcctcagcccggctgccctggtggaaggtacaggtgttcagcaccttcagaaaagggcataaagtggtgggggacaattctcagtccaggaaaatgcattgaccattgctggctatttgcttacctagtaagaattggattcatttttgaccagattattcttctatgcttttttgcaataaatcaaatcccacatatctacaagtggtatgaagtcctgcaccccccaggaggcctgtccaggcatgtcttcagaggcagggtgggttacactcatttacctcccctctccccaccaaattatgacacaaacgagtatgtttcctctctagaaccctgtaatgcctcctcccccatccccagagctccttactgtaggtcttaccctggacaaggattttttcaagttggaggcacagaacatgagcaatctgacattcccacagcccctcaaacatgcaaggctactaaggcaggaggagtataaatgatggatattgaccaagacctgcttggacggagaccgccatattatctgttctcttcgttcacaaaacagccttcacttgtctcagaatttgatggacacatactgtgatgagcaggagcttcagatgcactctttacacattttgttgaaataaacctctacatttgtagaagagtta

SEQ ID NO: 103711 - DNA, 1064 bp, Homo sapiens
  Payload ID: 385
  Gene Symbol: ACACA
  Gene Name: acetyl-CoA carboxylase alpha
  ENST ID: ENST00000615918
  CDS Start-End: 483-827
gccctcttggccttttcccggtccccgccgcgcgcctgctgctgtccccgtgcccgaggactgggaggatggggctgagccgcttgcctgacttttgatccgaccagtaatcactttgcccgtgtggcgcgtggcccgttgcctgaggcttcctggcgcgtggggctgtttggtcccctccggagtgcggtgaggcgggccgagccgggactgcctgggtttggggataacgttcccatctccacccctgttgcagcaagggaaattgaggctgagggaactgggcccagggacggcgagccgtggctgcctctccagtccgggccccgaagggctgctcgtggatgaaccagactgattttaaggggtgaagagggtgcgtttcaatcagatgcttctggaacgtcgaaattgtcttctttggaaagaaccatcccctctttgggcttcagaggcccaaattgaggcgcaatgatgagaggatgtggtggtctactctgatgtcaatcttgagggctaggtctttctggaagtggatatctactcagacagtaagaattataagagctgtaagagctcattttggaggaataatggatgaaccatctcccttggcccaacctctggagctgaaccagcactctcgattcataataggttctgtgtctgaagataactcagaggatgagatcagcaacctggtgaagttggacctactggaggagaaggagggctccttgtcacctgcttctgttggctcagatacactctctgatttggggatctctagcctacaggatggcttggccttgcacataagactttgaaatactcgtgggatatgaagtggaggtgcctagagggttgaagataatgaggacagatgaagaaatgtttgattgtgccatacttacagttgctgattttcaaggtccagcatgtctggcttgcacctagtaaagcagggccgagacagaaagaaaatagattctcaacgagatttcactgtggcttctccagcagaatttgttactcgctttgggggaaataaagtgattgagaag

SEQ ID NO: 103712 - DNA, 662 bp, Homo sapiens
  Payload ID: 385
  Gene Symbol: ACACA
  Gene Name: acetyl-CoA carboxylase alpha
  ENST ID: ENST00000614789
  CDS Start-End: 537-662
cggcctggtgctgcacgcctgtcagccatcgcccgagccgccggcgtctcctcccgcccagcagttcctccacgcaggggctccggaatcgcccgaccgcacacgttgccaccctgaggtctttttggaagtggatatctactcagacagtaagaattataagagctgtaagagctcattttggaggaataatggatgaaccatctcccttggcccaacctctggagctgaaccagcactctcgattcataataggttctgtgtctgaagataactcagaggatgagatcagcaacctggtgaagttggacctactggaggagaaggagggctccttgtcacctgcttctgttggctcagatacactctctgatttggggatctctagcctacaggatggcttggccttgcacataagactttgaaatactcgtgggatatgaagtggaggtgcctagagggttgaagataatgaggacagatgaagaaatgtttgattgtgccatacttacagttgctgattttcaaggtccagcatgtctggcttgcacctagtaaagcagggccgagacagaaagaaaatagattctcaacgagatttcactgtggcttctccagcagaatttgttactcgctttgggggaaataaagtgattgagaag

SEQ ID NO: 103713 - DNA, 9624 bp, Homo sapiens
  Payload ID: 385
  Gene Symbol: ACACA
  Gene Name: acetyl-CoA carboxylase alpha
  Uniprot ID: Q13085
  ENST ID: ENST00000611803
  CDS Start-End: 436-7302
ggcagccaggagaggcagtggagcttttctccgttgactgtcagaagaaagtgactgttgttgaaaatgtttgctgcaactaaaggagagctgctaagatctactttctagttaaacaagcttttatatttctccccggctcctctcagttcccttgggaaatcaactaattgtgtgtgtaagctaagtgtgtggaggagagaagatgcaaaaaggaagagaaaggtggggaaagaaggaaattgggaacaattagacaaaaagactatagtttgaggccatcaggagtattctagtctgactgaagccaggcagaaggcacagtatctcttgtcctcctgggttttaagcagctgcaacaggaggaggaactgcggcttgtgtttacaaggccgaaatctgaagaaaaagcttccattcttttcccatcttgatatggagggttctccagaggaaaataaggaaatgagatattacatgcttcaaaggtccagcatgtctggcttgcacctagtaaagcagggccgagacagaaagaaaatagattctcaacgagatttcactgtggcttctccagcagaatttgttactcgctttgggggaaataaagtgattgagaaggttcttattgctaacaatggcattgcagcagtgaaatgcatgcggtctatccgtaggtggtcttatgaaatgtttcgaaatgaacgtgcaattagattcgttgtcatggtcacacctgaagaccttaaagccaatgcagaatacattaagatggcagatcactatgtgccagtgcctggaggaccaaacaacaacaactatgcaaatgtggaattaattcttgatattgctaaaaggatcccagtacaagcagtgtgggctggctggggtcatgcttctgagaatcccaaactaccggaacttctcttgaaaaatggcattgccttcatgggtcctccaagccaggccatgtgggctttaggggataagattgcatcttccatagtggctcaaactgcaggtatcccaactcttccctggagcggcagtggtcttcgtgtggactggcaggaaaatgatttttcaaaacgtatcttaaatgttccccaggagctatatgaaaaaggttatgtgaaagatgtggatgatgggctacaggcagctgaggaagttggatatccagtaatgatcaaggcctcagagggaggaggagggaagggaattagaaaagtcaacaatgcagatgacttccctaatctcttcagacaggttcaagctgaagttcctggatctcccatatttgtgatgagactagccaaacaatctcgtcatctggaggtgcagatcttagcggaccaatatggcaatgctatctctttgtttggtcgtgattgctctgtacaacgcaggcatcagaagattattgaagaagcacctgctactattgctactccagcagtatttgaacacatggaacagtgtgcggtgaaacttgccaaaatggtgggttatgtgagtgctgggactgtggaatacctgtacagccaggatggcagcttctactttctggaattgaatcctcggctgcaggtagagcacccttgtacagagatggtggctgatgtcaatctccctgcagcacagctccagattgccatggggattcctctatatagaatcaaggatatccgtatgatgtatggggtatctccctggggtgattctcccattgattttgaagattctgcacacgttccttgtccaaggggccatgttattgctgctcggatcactagtgaaaatccagatgagggttttaagcccagctcaggaacagttcaggagctaaatttccgcagcaataagaatgtttggggatatttcagtgttgctgctgcagggggacttcatgaatttgctgattctcagtttggtcactgcttttcttggggagaaaacagagaagaggcaatttcaaacatggtggtggctttgaaggagctgtctattcggggtgactttcgaactacagttgaatacctgatcaaattgttagagactgaaagctttcagatgaacagaattgatactggctggctggacagactgatagcagaaaaagtacaggctgagcgacctgacaccatgttgggggttgtgtgtggtgccctccacgtggcagatgtgagcctgcggaatagcgtctctaacttccttcactccttagaaaggggtcaagtccttcctgctcatacacttctgaatacagtagatgttgaacttatctatgagggagtcaagtatgtacttaaggtgactcgacagtcccccaactcctatgtggtgatcatgaatggctcatgtgtagaagtagatgtacatcggctgagtgacggtggactgctcttgtcctatgatggcagcagttatactacgtatatgaaagaggaagtggatagatatcgcatcacaattggcaataaaacctgtgtgtttgagaaggaaaatgacccatcggtgatgcgctcaccttctgctgggaagttaatccagtacattgtagaagatggaggtcatgtgtttgccggccagtgctatgctgagattgaggtaatgaagatggtaatgaccttaacagctgtggagtctggctgtatccattacgtcaagcgacctggagcagctcttgaccctggctgtgtactagccaaaatgcaactggacaaccccagcaaggttcagcaggctgaacttcacacaggtagtctgccacggatccagagcacggcactcagaggcgagaaactccatcgagtgttccattatgtcctggataatctggtcaatgtaatgaatggatactgccttccagatcctttctttagcagcaaggtaaaagactgggtagagcgattgatgaaaaccctcagagatccctccctgcctctcctagaattgcaagatattatgaccagtgtgtctggccgcattccccccaatgtggagaagtctatcaagaaggaaatggctcagtatgctagcaacatcacatcagtcctctgtcagtttcccagccagcagattgcaaacatcctagatagccatgcagctacattgaaccggaaatctgaacgggaagtcttctttatgaatactcagagcattgttcagctggtacagaggtaccgaagtggcatccgaggccacatgaaggctgtggtgatggatctgctccggcagtacctgcgagtagagacacaattccagaatggtcactatgacaaatgtgtattcgccctccgagaagagaataaaagtgacatgaacactgtactgaactacatcttctctcacgctcaagtcaccaagaagaatcttctggtcacaatgcttattgatcagttgtgtggccgggaccctactctcactgatgagctgctgaatattctcacagagctaactcaactcagtaagaccaccaatgccaaagtagcacttcgagcacgccaggttcttattgcctcccatttgccatcatatgagcttcgccataaccaagtagagtctatcttcctatcagctattgacatgtatggacatcaattttgcattgagaacctgcagaaactcatcctatcagaaacatctatttttgatgtcctaccaaacttcttctatcacagcaaccaagtagtgaggatggcagctctggaggtgtatgttcgaagggcttatattgcctatgaacttaacagcgtacaacaccgccagcttaaggacaacacctgtgtggtggaattccagttcatgctgcccacatctcatccaaacagagggaacatccctacgctaaacagaatgtccttctcctccaacctcaaccactatggcatgacccatgtagctagtgtcagcgatgtactgttggacaactcattcactccaccttgtcagcggatgggcggaatggtctcttttcggacttttgaagattttgtcaggatctttgatgaagtgatgggctgcttctctgactccccaccccagagtcccacattccctgaggcaggtcacacgtctctttatgatgaggataaggttcccagggatgaaccaattcacattctcaatgtggctatcaagactgactgtgatattgaggatgacaggctggcagctatgttcagagaatttacccagcaaaataaagctaccctggttgaccatgggatccggcgccttactttcctggttgcacaaaaggatttcagaaagcaggtcaactatgaggtggatcggagatttcatagagaattccctaaattttttacattccgagcaagggataagtttgaggaggatcgtatctatcgtcatctggagcctgctctggctttccagttagagctgaaccggatgagaaattttgacctcactgccattccatgtgctaatcacaagatgcacctgtatctcggggcagccaaggtggaagtgggcacagaagtgacagactacaggttctttgttcgtgcaatcatcaggcattctgatctggtcaccaaggaagcttcttttgaatatctgcaaaatgaaggggagcggctactcctggaagccatggatgagttggaagttgcttttaacaatacaaatgtccgcactgactgtaaccacatcttcctcaactttgtgcccacggttatcatggacccatcaaagattgaggaatccgtgcggagcatggtaatgcggtatggaagtcgcctgtggaaattgcgcgtcctccaggcagaactgaaaatcaacattcgcctgacgccaactggaaaagcaattcccatccgcctcttcctgacaaacgagtctggctattacttggatatcagcctatacaaggaagtgactgactccaggacagcacagatcatgtttcaggcatatggagacaaacagggaccactgcatggaatgttaatcaatactccatatgtgaccaaagacctgctgcaatcaaagaggttccaggcacaatccttagggacaacatacatatatgatatcccagagatgtttcggcagtccctgatcaaactctgggagtctatgtccactcaagcatttcttccatctccccctctgccttctgacatgctgacttacactgaactggtactggatgatcaaggtcagctggtccacatgaacaggcttccaggaggaaatgagattggcatggtagcttggaaaatgacctttaaaagtcctgaatatccagaaggccgagatatcattgttattggcaatgacatcacataccgaattgggtcctttgggcctcaagaggatttgttatttctcagagcttccgaacttgctagggcagaaggtattccacgcatctatgtatcagccaacagtggagcaagaatcggactggcagaagaaattcgccatatgtttcatgtggcctgggtagatcctgaggatccttacaagggatacaggtatttatatctgactcctcaagattataagagagtcagtgctctcaactctgtccattgtgaacacgtggaagatgaaggagaatccaggtacaagataacagatattattgggaaagaagagggaattggacccgagaaccttcgaggttctggaatgattgctggagaatcctcattggcctataatgagatcattaccatcagcctggtgacgtgccgggccattgggattggggcttaccttgtccggctgggacagagaaccatccaggttgagaattctcacttaattctaacaggagctggagccctcaacaaagtcctcgggcgggaagtgtacacctccaataaccagctggggggcatccagattatgcacaacaatggggtgacccactgcactgtgtgtgatgactttgaaggggttttcactgtcctgcactggctgtcttacatgcccaagagcgtgcacagttcagttcctcttctgaactcaaaggatcctatagacagaatcatcgagtttgttcccacaaagaccccatacgatcctcgatggatgctagcaggccgtcctcacccaacccaaaaaggtcagtggttgagtggcttttttgactatggatctttctcagagattatgcagccctgggcacagactgtggtggttggtagagccaggctaggaggaatacctgtgggagttgttgctgtagaaacccgaacagtagaactaagtatcccagctgatccagcaaacctggattctgaagccaagataatccagcaggctggccaggtttggttcccagattctgcgtttaagacgtatcaggccatcaaggacttcaaccgggaagggctgcctctgatggtctttgccaactggagaggcttctctggtggaatgaaagatatgtacgaccaagtgctgaagtttggtgcttacattgtggatggcttgagggagtgctgccagcctgtgctggtttacattcctccccaggctgagctgcggggtggctcctgggtggtgattgactcctccatcaacccccggcacatggagatgtatgctgaccgagaaagcaggggatctgttctggagccagaagggacagtagaaatcaaattccgcagaaaggatctggtgaaaaccatgcgtcgggtggacccagtctacatccacttggctgagcgattggggaccccagagctaagcacagctgagcggaaggagttggagaacaagttgaaggagcgggaggaattcctaattcccatttaccatcaggtagccgtgcagtttgctgacttgcacgacacaccaggccggatgcaggagaagggtgttattagcgatatcctggattggaaaacatcccgtaccttcttctactggcggctgaggcgtcttctgctggaggacctggtcaagaagaaaatccacaatgccaaccctgagctgactgatggccagattcaagccatgttaaggcgctggtttgtggaagtggaaggaacagtgaaggcttatgtttgggacaataataaggatctggcggagtggctagagaaacagctgacagaggaggatggtgttcactcggtaatagaggaaaacatcaaatgcatcagcagagactacgtcctcaagcaaatccgcagcttggtccaggccaatccagaggttgccatggattccatcatccatatgacgcagcacatatcacccactcagcgagcagaagtcatacggatcctctccacaatggattccccttccacgtaggaagagcttcctgcctgtccctgccctgtctctggagaaaagggctagagctgccttttacaactgtaaccactgtaatgagaaggcacaggagacccagcactggagtcaaatggcattttacttcctctcgtttcaggttatgcatgacatcctgggatgtaagatcacagaatccccctccagcccaccagtcacacctaccccattcagtatttattaccctggccaggcctagtcctccactccctgcacaggactgagaaggcaatgaaaggtacaaacatgtaccatgaggtcttactaaccaaagtagggctgcccctcctgtcctgacagccccttggcctcccagcatggggaagcgtgaggagttgcccagcagtgagcagcccccctcactcctggccccatgagccgcagccacaggcagcagaggagggctaaggagaggaggaagcctcaagtccattgtttattaccccgactcttagcccagcacacagtaggcactggagaggaatgattcccagtttaaccacactacggtaccttttatgaagaaaaattagagcataaaatctactacaagctccataggaactcaaagatgagggcaaaactgtgagccaagaagcagagaaagaaaatagaaccagttattcttgatttaggggacctcaaccttgggttcagtctctgaggacaaagggaaaggtagttgttggcctgcctctcgcctgcacgtcactgctggactagctgtcgcatgtggctgggagctgcaaggccagtgcttgaggggccccagcagttccacaggtggtgaagcctgagttggcagaggaggagccagaagagaactgccctttctgcactggtggaaactagttatttatgccatgtggagagccagtgagatagatagatagtctgtttgttttgaggacttggaaagttgttcctatgaagcctggagcttggatggttttgagaggttaatggtgcctccacactcactcttccctagttccaggattactgtcctagcagctaacggttctactctcttccccagagtgtagacaggcagcaggtctccccacagctctgaaaggaccctggtgacagctacaccctcagcaccaggagctggccttcctgatgagggaggcttccaggaaacacagaatccacatgaccttaagattatttacaactcagtcatggtgctgctgtcctccaggcttactggcccctcctgactggcatcaggggcttcctcaggtggtggagagagtttactttcaacaactagtttattcaagaaaagaacttactgattcctctgttcctaaagcaagagtggcaggtgatcagggctggtgtagcatccggttcctttagtgcagctaactgcatttgtcactgatgaccaaggaggaaatcactaagacatttgagaagcagtggtatgaacgttcttggacaagccacagttctgagccttaaccctgtagtttgcacacaagaacgagctccacctccccttcttcaggaggaatctgtgcggatagattggctggacttttcaatggttctgggttgcaggtgggcactgtatggctgggtatggagcggacagcccccaggagtcagagcctcagcccggctgccctggtggaaggtacaggtgttcagcaccttcagaaaagggcataaagtggtgggggacaattctcagtccaggaaaatgcattgaccattgctggctatttgcttacctagtaagaattggattcatttttgaccagattattcttctatgcttttttgcaataaatcaaatcccacatatctacaagtggtatgaagtcctgcaccccccaggaggcctgtccaggcatgtcttcagaggcagggtgggttacactcatttacctcccctctccccaccaaattatgacacaaacgagtatgtttcctctctagaaccctgtaatgcctcctcccccatccccagagctccttactgtaggtcttaccctggacaaggattttttcaagttggaggcacagaacatgagcaatctgacattcccacagcccctcaaacatgcaaggctactaaggcaggaggagtataaatgatggatattgaccaagacctgcttggacggagaccgccatattatctgttctcttcgttcacaaaacagccttcacttgtctcagaatttgatggacacatactgtgatgagcaggagcttcagatgcactctttacacattttgttgaaataaacctctacatttgtagaa

SEQ ID NO: 103714 - DNA, 7912 bp, Homo sapiens
  Payload ID: 385
  Gene Symbol: ACACA
  Gene Name: acetyl-CoA carboxylase alpha
  Uniprot ID: Q13085
  ENST ID: ENST00000621312
  CDS Start-End: 607-7413
ggcagccaggagaggcagtggagcttttctccgttgactgtcagaagaaagtgactgttgttgaaaatgtttgctgcaactaaaggagagctgctaagatctactttctagttaaacaagcttttatatttctccccggctcctctcagttcccttgggaaatcaactaattgtgtgtgtaagctaagtgtgtggaggagagaagatgcaaaaaggaagagaaaggtggggaaagaaggaaattgggaacaattagacaaaaagactatagtttgaggccatcaggagtattctagtctgactgaagccaggcagaaggcacagtatctcttgtcctcctgggttttaagcagctgcaacaggaggaggaactgcggcttgtgtttacaaggccgaaatctgaagaaaaagcttccattcttttcccatcttgatatggagggttctccagaggaaaataaggaaatgagatattacatgcttcaaagactttgaaatactcgtgggatatgaagtggaggtgcctagagggttgaagataatgaggacagatgaagaaatgtttgattgtgccatacttacagttgctgattttcaaggtccagcatgtctggcttgcacctagtaaagcagggccgagacagaaagaaaatagattctcaacgagatttcactgtggcttctccagcagaatttgttactcgctttgggggaaataaagtgattgagaaggttcttattgctaacaatggcattgcagcagtgaaatgcatgcggtctatccgtaggtggtcttatgaaatgtttcgaaatgaacgtgcaattagattcgttgtcatggtcacacctgaagaccttaaagccaatgcagaatacattaagatggcagatcactatgtgccagtgcctggaggaccaaacaacaacaactatgcaaatgtggaattaattcttgatattgctaaaaggatcccagtacaagcagtgtgggctggctggggtcatgcttctgagaatcccaaactaccggaacttctcttgaaaaatggcattgccttcatgggtcctccaagccaggccatgtgggctttaggggataagattgcatcttccatagtggctcaaactgcaggtatcccaactcttccctggagcggcagtggtcttcgtgtggactggcaggaaaatgatttttcaaaacgtatcttaaatgttccccaggagctatatgaaaaaggttatgtgaaagatgtggatgatgggctacaggcagctgaggaagttggatatccagtaatgatcaaggcctcagagggaggaggagggaagggaattagaaaagtcaacaatgcagatgacttccctaatctcttcagacaggttcaagctgaagttcctggatctcccatatttgtgatgagactagccaaacaatctcgtcatctggaggtgcagatcttagcggaccaatatggcaatgctatctctttgtttggtcgtgattgctctgtacaacgcaggcatcagaagattattgaagaagcacctgctactattgctactccagcagtatttgaacacatggaacagtgtgcggtgaaacttgccaaaatggtgggttatgtgagtgctgggactgtggaatacctgtacagccaggatggcagcttctactttctggaattgaatcctcggctgcaggtagagcacccttgtacagagatggtggctgatgtcaatctccctgcagcacagctccagattgccatggggattcctctatatagaatcaaggatatccgtatgatgtatggggtatctccctggggtgattctcccattgattttgaagattctgcacacgttccttgtccaaggggccatgttattgctgctcggatcactagtgaaaatccagatgagggttttaagcccagctcaggaacagttcaggagctaaatttccgcagcaataagaatgtttggggatatttcagtgttgctgctgcagggggacttcatgaatttgctgattctcagtttggtcactgcttttcttggggagaaaacagagaagaggcaatttcaaacatggtggtggctttgaaggagctgtctattcggggtgactttcgaactacagttgaatacctgatcaaattgttagagactgaaagctttcagatgaacagaattgatactggctggctggacagactgatagcagaaaaagtacaggctgagcgacctgacaccatgttgggggttgtgtgtggtgccctccacgtggcagatgtgagcctgcggaatagcgtctctaacttccttcactccttagaaaggggtcaagtccttcctgctcatacacttctgaatacagtagatgttgaacttatctatgagggagtcaagtatgtacttaaggtgactcgacagtcccccaactcctatgtggtgatcatgaatggctcatgtgtagaagtagatgtacatcggctgagtgacggtggactgctcttgtcctatgatggcagcagttatactacgtatatgaaagaggaagtggatagatatcgcatcacaattggcaataaaacctgtgtgtttgagaaggaaaatgacccatcggtgatgcgctcaccttctgctgggaagttaatccagtacattgtagaagatggaggtcatgtgtttgccggccagtgctatgctgagattgaggtaatgaagatggtaatgaccttaacagctgtggagtctggctgtatccattacgtcaagcgacctggagcagctcttgaccctggctgtgtactagccaaaatgcaactggacaaccccagcaaggttcagcaggctgaacttcacacaggtagtctgccacggatccagagcacggcactcagaggcgagaaactccatcgagtgttccattatgtcctggataatctggtcaatgtaatgaatggatactgccttccagatcctttctttagcagcaaggtaaaagactgggtagagcgattgatgaaaaccctcagagatccctccctgcctctcctagaattgcaagatattatgaccagtgtgtctggccgcattccccccaatgtggagaagtctatcaagaaggaaatggctcagtatgctagcaacatcacatcagtcctctgtcagtttcccagccagcagattgcaaacatcctagatagccatgcagctacattgaaccggaaatctgaacgggaagtcttctttatgaatactcagagcattgttcagctggtacagaggtaccgaagtggcatccgaggccacatgaaggctgtggtgatggatctgctccggcagtacctgcgagtagagacacaattccagaatggtcactatgacaaatgtgtattcgccctccgagaagagaataaaagtgacatgaacactgtactgaactacatcttctctcacgctcaagtcaccaagaagaatcttctggtcacaatgcttattgatcagttgtgtggccgggaccctactctcactgatgagctgctgaatattctcacagagctaactcaactcagtaagaccaccaatgccaaagtagcacttcgagcacgccaggttcttattgcctcccatttgccatcatatgagcttcgccataaccaagtagagtctatcttcctatcagctattgacatgtatggacatcaattttgcattgagaacctgcagaaactcatcctatcagaaacatctatttttgatgtcctaccaaacttcttctatcacagcaaccaagtagtgaggatggcagctctggaggtgtatgttcgaagggcttatattgcctatgaacttaacagcgtacaacaccgccagcttaaggacaacacctgtgtggtggaattccagttcatgctgcccacatctcatccaaacagagggaacatccctacgctaaacagaatgtccttctcctccaacctcaaccactatggcatgacccatgtagctagtgtcagcgatgtactgttggacaactcattcactccaccttgtcagcggatgggcggaatggtctcttttcggacttttgaagattttgtcaggatctttgatgaagtgatgggctgcttctctgactccccaccccagagtcccacattccctgaggcaggtcacacgtctctttatgatgaggataaggttcccagggatgaaccaattcacattctcaatgtggctatcaagactgactgtgatattgaggatgacaggctggcagctatgttcagagaatttacccagcaaaataaagctaccctggttgaccatgggatccggcgccttactttcctggttgcacaaaaggatttcagaaagcaggtcaactatgaggtggatcggagatttcatagagaattccctaaattttttacattccgagcaagggataagtttgaggaggatcgtatctatcgtcatctggagcctgctctggctttccagttagagctgaaccggatgagaaattttgacctcactgccattccatgtgctaatcacaagatgcacctgtatctcggggcagccaaggtggaagtgggcacagaagtgacagactacaggttctttgttcgtgcaatcatcaggcattctgatctggtcaccaaggaagcttcttttgaatatctgcaaaatgaaggggagcggctactcctggaagccatggatgagttggaagttgcttttaacaatacaaatgtccgcactgactgtaaccacatcttcctcaactttgtgcccacggttatcatggacccatcaaagattgaggaatccgtgcggagcatggtaatgcggtatggaagtcgcctgtggaaattgcgcgtcctccaggcagaactgaaaatcaacattcgcctgacgccaactggaaaagcaattcccatccgcctcttcctgacaaacgagtctggctattacttggatatcagcctatacaaggaagtgactgactccaggacagcacagatcatgtttcaggcatatggagacaaacagggaccactgcatggaatgttaatcaatactccatatgtgaccaaagacctgctgcaatcaaagaggttccaggcacaatccttagggacaacatacatatatgatatcccagagatgtttcggcagtccctgatcaaactctgggagtctatgtccactcaagcatttcttccatctccccctctgccttctgacatgctgacttacactgaactggtactggatgatcaaggtcagctggtccacatgaacaggcttccaggaggaaatgagattggcatggtagcttggaaaatgacctttaaaagtcctgaatatccagaaggccgagatatcattgttattggcaatgacatcacataccgaattgggtcctttgggcctcaagaggatttgttatttctcagagcttccgaacttgctagggcagaaggtattccacgcatctatgtatcagccaacagtggagcaagaatcggactggcagaagaaattcgccatatgtttcatgtggcctgggtagatcctgaggatccttacaagggatacaggtatttatatctgactcctcaagattataagagagtcagtgctctcaactctgtccattgtgaacacgtggaagatgaaggagaatccaggtacaagataacagatattattgggaaagaagagggaattggacccgagaaccttcgaggttctggaatgattgctggagaatcctcattggcctataatgagatcattaccatcagcctggtgacgtgccgggccattgggattggggcttaccttgtccggctgggacagagaaccatccaggttgagaattctcacttaattctaacaggagctggagccctcaacaaagtcctcgggcgggaagtgtacacctccaataaccagctggggggcatccagattatgcacaacaatggggtgacccactgcactgtgtgtgatgactttgaaggggttttcactgtcctgcactggctgtcttacatgcccaagagcgtgcacagttcagttcctcttctgaactcaaaggatcctatagacagaatcatcgagtttgttcccacaaagaccccatacgatcctcgatggatgctagcaggccgtcctcacccaacccaaaaaggtcagtggttgagtggcttttttgactatggatctttctcagagattatgcagccctgggcacagactgtggtggttggtagagccaggctaggaggaatacctgtgggagttgttgctgtagaaacccgaacagtagaactaagtatcccagctgatccagcaaacctggattctgaagccaagataatccagcaggctggccaggtttggttcccagattctgcgtttaagacgtatcaggccatcaaggacttcaaccgggaagggctgcctctgatggtctttgccaactggagaggcttctctggtggaatgaaagatatgtacgaccaagtgctgaagtttggtgcttacattgtggatggcttgagggagtgctgccagcctgtgctggtttacattcctccccaggctgagctgcggggtggctcctgggtggtgattgactcctccatcaacccccggcacatggagatgtatgctgaccgagaaagcaggggatctgttctggagccagaagggacagtagaaatcaaattccgcagaaaggatctggtgaaaaccatgcgtcgggtggacccagtctacatccacttggctgagcgattggggaccccagagctaagcacagctgagcggaaggagttggagaacaagttgaaggagcgggaggaattcctaattcccatttaccatcaggtagccgtgcagtttgctgacttgcacgacacaccaggccggatgcaggagaagggtgttattagcgatatcctggattggaaaacatcccgtaccttcttctactggcggctgaggcgtcttctgctggaggacctggtcaagaagaaaatccacaatgccaaccctgagctgactgatggccagattcaagccatgttaaggcgctggtttgtggaagtggaaggaacagtgaaggcttatgtttgggacaataataaggatctggcggagtggctagagaaacagctgacagaggaggatggtgttcactcggtaatagaggaaaacatcaaatgcatcagcagagactacgtcctcaagcaaatccgcagcttggtccaggccaatccagaggttgccatggattccatcatccatatgacgcagcacatatcacccactcagcgagcagaagtcatacggatcctctccacaatggattccccttccacgtaggaagagcttcctgcctgtccctgccctgtctctggagaaaagggctagagctgccttttacaactgtaaccactgtaatgagaaggcacaggagacccagcactggagtcaaatggcattttacttcctctcgtttcaggttatgcatgacatcctgggatgtaagatcacagaatccccctccagcccaccagtcacacctaccccattcagtatttattaccctggccaggcctagtcctccactccctgcacaggactgagaaggcaatgaaaggtacaaacatgtaccatgaggtcttactaaccaaagtagggctgcccctcctgtcctgacagccccttggcctcccagcatggggaagcgtgaggagttgcccagcagtgagcagcccccctcactcctggccccatgagccgcagccacaggcagcagaggagggctaaggagaggaggaagcctcaagtccattgtttattaccccgactcttagcccag

SEQ ID NO: 103715 - DNA, 2177 bp, Homo sapiens
  Payload ID: 385
  Gene Symbol: ACACA
  Gene Name: acetyl-CoA carboxylase alpha
  ENST ID: ENST00000614482
  CDS Start-End: 1-157
agaaattcgccatatgtttcatgtggcctgggtagatcctgaggatccttacaagggatacaggtatttatatctgactcctcaagattataagagagtcagtgctctcaactctgtccattgtgaacacgtggaagatgaaggagaatccaggtgacgtgccgggccattgggattggggcttaccttgtccggctgggacagagaaccatccaggttgagaattctcacttaattctaacaggagctggagccctcaacaaagtcctcgggcgggaagtgtacacctccaataaccagctggggggcatccagattatgcacaacaatggggtgacccactgcactgtgtgtgatgactttgaaggggttttcactgtcctgcactggctgtcttacatgcccaagagcgtgcacagttcagttcctcttctgaactcaaaggatcctatagacagaatcatcgagtttgttcccacaaagaccccatacgatcctcgatggatgctagcaggccgtcctcacccaacccaaaaaggtcagtggttgagtggcttttttgactatggatctttctcagagattatgcagccctgggcacagactgtggtggttggtagagccaggctaggaggaatacctgtgggagttgttgctgtagaaacccgaacagtagaactaagtatcccagctgatccagcaaacctggattctgaagccaagataatccagcaggctggccaggtttggttcccagattctgcgtttaagacgtatcaggccatcaaggacttcaaccgggaagggctgcctctgatggtctttgccaactggagaggcttctctggtggaatgaaagatatgtacgaccaagtgctgaagtttggtgcttacattgtggatggcttgagggagtgctgccagcctgtgctggtttacattcctccccaggctgagctgcggggtggctcctgggtggtgattgactcctccatcaacccccggcacatggagatgtatgctgaccgagaaagcaggggatctgttctggagccagaagggacagtagaaatcaaattccgcagaaaggatctggtgaaaaccatgcgtcgggtggacccagtctacatccacttggctgagcgattggggaccccagagctaagcacagctgagcggaaggagttggagaacaagttgaaggagcgggaggaattcctaattcccatttaccatcaggtagccgtgcagtttgctgacttgcacgacacaccaggccggatgcaggagaagggtgttattagcgatatcctggattggaaaacatcccgtaccttcttctactggcggctgaggcgtcttctgctggaggacctggtcaagaagaaaatccacaatgccaaccctgagctgactgatggccagattcaagccatgttaaggcgctggtttgtggaagtggaaggaacagtgaaggcttatgtttgggacaataataaggatctggcggagtggctagagaaacagctgacagaggaggatggtgttcactcggtaatagaggaaaacatcaaatgcatcagcagagactacgtcctcaagcaaatccgcagcttggtccaggccaatccagaggttgccatggattccatcatccatatgacgcagcacatatcacccactcagcgagcagaagtcatacggatcctctccacaatggattccccttccacgtaggaagagcttcctgcctgtccctgccctgtctctggagaaaagggctagagctgccttttacaactgtaaccactgtaatgagaaggcacaggagacccagcactggagtcaaatggcattttacttcctctcgtttcaggttatgcatgacatcctgggatgtaagatcacagaatccccctccagcccaccagtcacacctaccccattcagtatttattaccctggccaggcctagtcctccactccctgcacaggactgagaaggcaatgaaaggtacaaacatgtaccatgaggtcttactaaccaaagtagggctgcccctcctgtcctgacagccccttggcctcccagcatggggaagcgtgaggagttgcccagcagtgagcagcccccctcactcctggccccatgagccgcagccacaggcagcagagga

SEQ ID NO: 103716 - DNA, 1063 bp, Homo sapiens
  Payload ID: 385
  Gene Symbol: ACACA
  Gene Name: acetyl-CoA carboxylase alpha
  ENST ID: ENST00000617548
  CDS Start-End: 482-826
gccctcttggccttttcccggtccccgccgcgcgcctgctgctgtccccgtgcccgaggactgggaggatggggctgagccgcttgcctgacttttgatccgaccagtaatcactttgcccgtgtggcgcgtggcccgttgcctgaggcttcctggcgcgtggggctgtttggtcccctccggagtgcggtgaggcgggccgagccgggactgcctgggtttggggataacgttcccatctccacccctgttgcagcaagggaaattgaggctgagggaactgggcccagggacggcgagccgtggcgcctctccagtccgggccccgaagggctgctcgtggatgaaccagactgattttaaggggtgaagagggtgcgtttcaatcagatgctcctggaacgtcgaaattgtcttctttggaaagaaccatcccctctttgggcttcagaggcccaaattgaggcgcaatgatgagaggatgtggtggtctactctgatgtcaatcttgagggctaggtctttttggaagtggatatctactcagacagtaagaattataagagctgtaagagctcattttggaggaataatggatgaaccatctcccttggcccaacctctggagctgaaccagcactctcgattcataataggttctgtgtctgaagataactcagaggatgagatcagcaacctggtgaagttggacctactggaggagaaggagggctccttgtcacctgcttctgttggctcagatacactctctgatttggggatctctagcctacaggatggcttggccttgcacataagactttgaaatactcgtgggatatgaagtggaggtgcctagagggttgaagataatgaggacagatgaagaaatgtttgattgtgccatacttacagttgctgattttcaaggtccagcatgtctggcttgcacctagtaaagcagggccgagacagaaagaaaatagattctcaacgagatttcactgtggcttctccagcagaatttgttactcgctttgggggaaataaagtgattgagaag

SEQ ID NO: 103717 - DNA, 463 bp, Homo sapiens
  Payload ID: 385
  Gene Symbol: ACACA
  Gene Name: acetyl-CoA carboxylase alpha
  ENST ID: ENST00000618053
  CDS Start-End: 1-290
acatcaaatgcatcagcagagactacgtcctcaagcaaatccgcagcttggtccaggccaatccagaggttgccatggattccatcatccatatgacgcagcacatatcacccactcagcgagcagaagtcatacggatcctctccacaatggattccccttccacgttatgcatgacatcctgggatgtaagatcacagaatccccctccagcccaccagtcacacctaccccattcagtatttattaccctggccaggcctagtcctccactccctgcacaggactgagaaggcaatgaaaggtacaaacatgtaccatgaggtcttactaaccaaagtagggctgcccctcctgtcctgacagccccttggcctcccagcatggggaagcgtgaggagttgcccagcagtgagcagcccccctcactcctggccccatgagccgcagccacaggcagcag

SEQ ID NO: 103718 - DNA, 9624 bp, Homo sapiens; identical to SEQ ID NO: 103713
  Payload ID: 385
  Gene Symbol: ACACA
  Gene Name: acetyl-CoA carboxylase alpha
  Uniprot ID: Q13085
  ENST ID: ENST00000612895
  CDS Start-End: 436-7302

SEQ ID NO: 103719 - DNA, 7912 bp, Homo sapiens; identical to SEQ ID NO: 103714
  Payload ID: 385
  Gene Symbol: ACACA
  Gene Name: acetyl-CoA carboxylase alpha
  Uniprot ID: Q13085
  ENST ID: ENST00000617649
  CDS Start-End: 607-7413

SEQ ID NO: 103720 - DNA, 1468 bp, Homo sapiens
  Payload ID: 385
  Gene Symbol: ACACA
  Gene Name: acetyl-CoA carboxylase alpha
  ENST ID: ENST00000615229
  CDS Start-End: 374-718
aatcactttgcccgtgtggcgcgtggcccgttgcctgaggcttcctggcgcgtggggctgtttggtcccctccggagtgcggtgaggcgggccgagccgggactgcctgggtttggggataacgttcccatctccacccctgttgcagcaagggaaattgaggctgagggaactgggcccagggacggcgagccgtggcgcctctccagtccgggccccgaagggctgctcgtggatgaaccagactgattttaaggggtgaagagggtgcgtttcaatcagatgctcctggaacgtcgaaattgtcttctttggaaagaaccatcccctctttgggcttcagaggcccaaattgaggcgcaatgatgagaggatgtggtggtctactctgatgtcaatcttgagggctaggtctttttggaagtggatatctactcagacagtaagaattataagagctgtaagagctcattttggaggaataatggatgaaccatctcccttggcccaacctctggagctgaaccagcactctcgattcataataggttctgtgtctgaagataactcagaggatgagatcagcaacctggtgaagttggacctactggaggagaaggagggctccttgtcacctgcttctgttggctcagatacactctctgatttggggatctctagcctacaggatggcttggccttgcacataagactttgaaatactcgtgggatatgaagtggaggtgcctagagggttgaagataatgaggacagatgaagaaatgtttgattgtgccatacttacagttgctgattttcaaggtccagcatgtctggcttgcacctagtaaagcagggccgagacagaaagaaaatagattctcaacgagatttcactgtggcttctccagcagaatttgttactcgctttgggggaaataaagtgattgagaaggttcttattgctaacaatggcattgcagcagtgaaatgcatgcggtctatccgtaggtggtcttatgaaatgtttcgaaatgaacgtgcaattagattcgttgtcatggtcacacctgaagaccttaaagccaatgcagaatacattaagatggcagatcactatgtgccagtgcctggaggaccaaacaacaacaactatgcaaatgtggaattaattcttgatattgctaaaaggatcccagtacaagcagtgtgggctggctggggtcatgcttctgagaatcccaaactaccggaacttctcttgaaaaatggcattgccttcatgggtcctccaagccaggccatgtgggctttaggggataagattgcatcttccatagtggctcaaactgcaggtatcccaactcttccctggagcggcagtggtcttcgtgtggactggcaggaaaatgatttttcaaaacgtatcttaaatgttccccaggagctatatgaaaaaggttatgtg

SEQ ID NO: 103721 - DNA, 9961 bp, Homo sapiens
  Payload ID: 385
  Gene Symbol: ACACA
  Gene Name: acetyl-CoA carboxylase alpha
  Uniprot ID: Q13085
  ENST ID: ENST00000616317
  CDS Start-End: 482-7633
gccctcttggccttttcccggtccccgccgcgcgcctgctgctgtccccgtgcccgaggactgggaggatggggctgagccgcttgcctgacttttgatccgaccagtaatcactttgcccgtgtggcgcgtggcccgttgcctgaggcttcctggcgcgtggggctgtttggtcccctccggagtgcggtgaggcgggccgagccgggactgcctgggtttggggataacgttcccatctccacccctgttgcagcaagggaaattgaggctgagggaactgggcccagggacggcgagccgtggcgcctctccagtccgggccccgaagggctgctcgtggatgaaccagactgattttaaggggtgaagagggtgcgtttcaatcagatgctcctggaacgtcgaaattgtcttctttggaaagaaccatcccctctttgggcttcagaggcccaaattgaggcgcaatgatgagaggatgtggtggtctactctgatgtcaatcttgagggctaggtctttttggaagtggatatctactcagacagtaagaattataagagctgtaagagctcattttggaggaataatggatgaaccatctcccttggcccaacctctggagctgaaccagcactctcgattcataataggttctgtgtctgaagataactcagaggatgagatcagcaacctggtgaagttggacctactggaggagaaggagggctccttgtcacctgcttctgttggctcagatacactctctgatttggggatctctagcctacaggatggcttggccttgcacataaggtccagcatgtctggcttgcacctagtaaagcagggccgagacagaaagaaaatagattctcaacgagatttcactgtggcttctccagcagaatttgttactcgctttgggggaaataaagtgattgagaaggttcttattgctaacaatggcattgcagcagtgaaatgcatgcggtctatccgtaggtggtcttatgaaatgtttcgaaatgaacgtgcaattagattcgttgtcatggtcacacctgaagaccttaaagccaatgcagaatacattaagatggcagatcactatgtgccagtgcctggaggaccaaacaacaacaactatgcaaatgtggaattaattcttgatattgctaaaaggatcccagtacaagcagtgtgggctggctggggtcatgcttctgagaatcccaaactaccggaacttctcttgaaaaatggcattgccttcatgggtcctccaagccaggccatgtgggctttaggggataagattgcatcttccatagtggctcaaactgcaggtatcccaactcttccctggagcggcagtggtcttcgtgtggactggcaggaaaatgatttttcaaaacgtatcttaaatgttccccaggagctatatgaaaaaggttatgtgaaagatgtggatgatgggctacaggcagctgaggaagttggatatccagtaatgatcaaggcctcagagggaggaggagggaagggaattagaaaagtcaacaatgcagatgacttccctaatctcttcagacaggttcaagctgaagttcctggatctcccatatttgtgatgagactagccaaacaatctcgtcatctggaggtgcagatcttagcggaccaatatggcaatgctatctctttgtttggtcgtgattgctctgtacaacgcaggcatcagaagattattgaagaagcacctgctactattgctactccagcagtatttgaacacatggaacagtgtgcggtgaaacttgccaaaatggtgggttatgtgagtgctgggactgtggaatacctgtacagccaggatggcagcttctactttctggaattgaatcctcggctgcaggtagagcacccttgtacagagatggtggctgatgtcaatctccctgcagcacagctccagattgccatggggattcctctatatagaatcaaggatatccgtatgatgtatggggtatctccctggggtgattctcccattgattttgaagattctgcacacgttccttgtccaaggggccatgttattgctgctcggatcactagtgaaaatccagatgagggttttaagcccagctcaggaacagttcaggagctaaatttccgcagcaataagaatgtttggggatatttcagtgttgctgctgcagggggacttcatgaatttgctgattctcagtttggtcactgcttttcttggggagaaaacagagaagaggcaatttcaaacatggtggtggctttgaaggagctgtctattcggggtgactttcgaactacagttgaatacctgatcaaattgttagagactgaaagctttcagatgaacagaattgatactggctggctggacagactgatagcagaaaaagtacaggctgagcgacctgacaccatgttgggggttgtgtgtggtgccctccacgtggcagatgtgagcctgcggaatagcgtctctaacttccttcactccttagaaaggggtcaagtccttcctgctcatacacttctgaatacagtagatgttgaacttatctatgagggagtcaagtatgtacttaaggtgactcgacagtcccccaactcctatgtggtgatcatgaatggctcatgtgtagaagtagatgtacatcggctgagtgacggtggactgctcttgtcctatgatggcagcagttatactacgtatatgaaagaggaagtggatagatatcgcatcacaattggcaataaaacctgtgtgtttgagaaggaaaatgacccatcggtgatgcgctcaccttctgctgggaagttaatccagtacattgtagaagatggaggtcatgtgtttgccggccagtgctatgctgagattgaggtaatgaagatggtaatgaccttaacagctgtggagtctggctgtatccattacgtcaagcgacctggagcagctcttgaccctggctgtgtactagccaaaatgcaactggacaaccccagcaaggttcagcaggctgaacttcacacaggtagtctgccacggatccagagcacggcactcagaggcgagaaactccatcgagtgttccattatgtcctggataatctggtcaatgtaatgaatggatactgccttccagatcctttctttagcagcaaggtaaaagactgggtagagcgattgatgaaaaccctcagagatccctccctgcctctcctagaattgcaagatattatgaccagtgtgtctggccgcattccccccaatgtggagaagtctatcaagaaggaaatggctcagtatgctagcaacatcacatcagtcctctgtcagtttcccagccagcagattgcaaacatcctagatagccatgcagctacattgaaccggaaatctgaacgggaagtcttctttatgaatactcagagcattgttcagctggtacagaggtaccgaagtggcatccgaggccacatgaaggctgtggtgatggatctgctccggcagtacctgcgagtagagacacaattccagaatggtcactatgacaaatgtgtattcgccctccgagaagagaataaaagtgacatgaacactgtactgaactacatcttctctcacgctcaagtcaccaagaagaatcttctggtcacaatgcttattgatcagttgtgtggccgggaccctactctcactgatgagctgctgaatattctcacagagctaactcaactcagtaagaccaccaatgccaaagtagcacttcgagcacgccaggttcttattgcctcccatttgccatcatatgagcttcgccataaccaagtagagtctatcttcctatcagctattgacatgtatggacatcaattttgcattgagaacctgcagaaactcatcctatcagaaacatctatttttgatgtcctaccaaacttcttctatcacagcaaccaagtagtgaggatggcagctctggaggtgtatgttcgaagggcttatattgcctatgaacttaacagcgtacaacaccgccagcttaaggacaacacctgtgtggtggaattccagttcatgctgcccacatctcatccaaacagagggaacatccctacgctaaacagaatgtccttctcctccaacctcaaccactatggcatgacccatgtagctagtgtcagcgatgtactgttggacaactcattcactccaccttgtcagcggatgggcggaatggtctcttttcggacttttgaagattttgtcaggatctttgatgaagtgatgggctgcttctctgactccccaccccagagtcccacattccctgaggcaggtcacacgtctctttatgatgaggataaggttcccagggatgaaccaattcacattctcaatgtggctatcaagactgactgtgatattgaggatgacaggctggcagctatgttcagagaatttacccagcaaaataaagctaccctggttgaccatgggatccggcgccttactttcctggttgcacaaaaggatttcagaaagcaggtcaactatgaggtggatcggagatttcatagagaattccctaaattttttacattccgagcaagggataagtttgaggaggatcgtatctatcgtcatctggagcctgctctggctttccagttagagctgaaccggatgagaaattttgacctcactgccattccatgtgctaatcacaagatgcacctgtatctcggggcagccaaggtggaagtgggcacagaagtgacagactacaggttctttgttcgtgcaatcatcaggcattctgatctggtcaccaaggaagcttcttttgaatatctgcaaaatgaaggggagcggctactcctggaagccatggatgagttggaagttgcttttaacaatacaaatgtccgcactgactgtaaccacatcttcctcaactttgtgcccacggttatcatggacccatcaaagattgaggaatccgtgcggagcatggtaatgcggtatggaagtcgcctgtggaaattgcgcgtcctccaggcagaactgaaaatcaacattcgcctgacgccaactggaaaagcaattcccatccgcctcttcctgacaaacgagtctggctattacttggatatcagcctatacaaggaagtgactgactccaggacagcacagatcatgtttcaggcatatggagacaaacagggaccactgcatggaatgttaatcaatactccatatgtgaccaaagacctgctgcaatcaaagaggttccaggcacaatccttagggacaacatacatatatgatatcccagagatgtttcggcagtccctgatcaaactctgggagtctatgtccactcaagcatttcttccatctccccctctgccttctgacatgctgacttacactgaactggtactggatgatcaaggtcagctggtccacatgaacaggcttccaggaggaaatgagattggcatggtagcttggaaaatgacctttaaaagtcctgaatatccagaaggccgagatatcattgttattggcaatgacatcacataccgaattgggtcctttgggcctcaagaggatttgttatttctcagagcttccgaacttgctagggcagaaggtattccacgcatctatgtatcagccaacagtggagcaagaatcggactggcagaagaaattcgccatatgtttcatgtggcctgggtagatcctgaggatccttacaagggatacaggtatttatatctgactcctcaagattataagagagtcagtgctctcaactctgtccattgtgaacacgtggaagatgaaggagaatccaggtacaagataacagatattattgggaaagaagagggaattggacccgagaaccttcgaggttctggaatgattgctggagaatcctcattggcctataatgagatcattaccatcagcctggtgacgtgccgggccattgggattggggcttaccttgtccggctgggacagagaaccatccaggttgagaattctcacttaattctaacaggagctggagccctcaacaaagtcctcgggcgggaagtgtacacctccaataaccagctggggggcatccagattatgcacaacaatggggtgacccactgcactgtgtgtgatgactttgaaggggttttcactgtcctgcactggctgtcttacatgcccaagagcgtgcacagttcagttcctcttctgaactcaaaggatcctatagacagaatcatcgagtttgttcccacaaagaccccatacgatcctcgatggatgctagcaggccgtcctcacccaacccaaaaaggtcagtggttgagtggcttttttgactatggatctttctcagagattatgcagccctgggcacagactgtggtggttggtagagccaggctaggaggaatacctgtgggagttgttgctgtagaaacccgaacagtagaactaagtatcccagctgatccagcaaacctggattctgaagccaagataatccagcaggctggccaggtttggttcccagattctgcgtttaagacgtatcaggccatcaaggacttcaaccgggaagggctgcctctgatggtctttgccaactggagaggcttctctggtggaatgaaagatatgtacgaccaagtgctgaagtttggtgcttacattgtggatggcttgagggagtgctgccagcctgtgctggtttacattcctccccaggctgagctgcggggtggctcctgggtggtgattgactcctccatcaacccccggcacatggagatgtatgctgaccgagaaagcaggggatctgttctggagccagaagggacagtagaaatcaaattccgcagaaaggatctggtgaaaaccatgcgtcgggtggacccagtctacatccacttggctgagcgattggggaccccagagctaagcacagctgagcggaaggagttggagaacaagttgaaggagcgggaggaattcctaattcccatttaccatcaggtagccgtgcagtttgctgacttgcacgacacaccaggccggatgcaggagaagggtgttattagcgatatcctggattggaaaacatcccgtaccttcttctactggcggctgaggcgtcttctgctggaggacctggtcaagaagaaaatccacaatgccaaccctgagctgactgatggccagattcaagccatgttaaggcgctggtttgtggaagtggaaggaacagtgaaggcttatgtttgggacaataataaggatctggcggagtggctagagaaacagctgacagaggaggatggtgttcactcggtaatagaggaaaacatcaaatgcatcagcagagactacgtcctcaagcaaatccgcagcttggtccaggccaatccagaggttgccatggattccatcatccatatgacgcagcacatatcacccactcagcgagcagaagtcatacggatcctctccacaatggattccccttccacgtaggaagagcttcctgcctgtccctgccctgtctctggagaaaagggctagagctgccttttacaactgtaaccactgtaatgagaaggcacaggagacccagcactggagtcaaatggcattttacttcctctcgtttcaggttatgcatgacatcctgggatgtaagatcacagaatccccctccagcccaccagtcacacctaccccattcagtatttattaccctggccaggcctagtcctccactccctgcacaggactgagaaggcaatgaaaggtacaaacatgtaccatgaggtcttactaaccaaagtagggctgcccctcctgtcctgacagccccttggcctcccagcatggggaagcgtgaggagttgcccagcagtgagcagcccccctcactcctggccccatgagccgcagccacaggcagcagaggagggctaaggagaggaggaagcctcaagtccattgtttattaccccgactcttagcccagcacacagtaggcactggagaggaatgattcccagtttaaccacactacggtaccttttatgaagaaaaattagagcataaaatctactacaagctccataggaactcaaagatgagggcaaaactgtgagccaagaagcagagaaagaaaatagaaccagttattcttgatttaggggacctcaaccttgggttcagtctctgaggacaaagggaaaggtagttgttggcctgcctctcgcctgcacgtcactgctggactagctgtcgcatgtggctgggagctgcaaggccagtgcttgaggggccccagcagttccacaggtggtgaagcctgagttggcagaggaggagccagaagagaactgccctttctgcactggtggaaactagttatttatgccatgtggagagccagtgagatagatagatagtctgtttgttttgaggacttggaaagttgttcctatgaagcctggagcttggatggttttgagaggttaatggtgcctccacactcactcttccctagttccaggattactgtcctagcagctaacggttctactctcttccccagagtgtagacaggcagcaggtctccccacagctctgaaaggaccctggtgacagctacaccctcagcaccaggagctggccttcctgatgagggaggcttccaggaaacacagaatccacatgaccttaagattatttacaactcagtcatggtgctgctgtcctccaggcttactggcccctcctgactggcatcaggggcttcctcaggtggtggagagagtttactttcaacaactagtttattcaagaaaagaacttactgattcctctgttcctaaagcaagagtggcaggtgatcagggctggtgtagcatccggttcctttagtgcagctaactgcatttgtcactgatgaccaaggaggaaatcactaagacatttgagaagcagtggtatgaacgttcttggacaagccacagttctgagccttaaccctgtagtttgcacacaagaacgagctccacctccccttcttcaggaggaatctgtgcggatagattggctggacttttcaatggttctgggttgcaggtgggcactgtatggctgggtatggagcggacagcccccaggagtcagagcctcagcccggctgccctggtggaaggtacaggtgttcagcaccttcagaaaagggcataaagtggtgggggacaattctcagtccaggaaaatgcattgaccattgctggctatttgcttacctagtaagaattggattcatttttgaccagattattcttctatgcttttttgcaataaatcaaatcccacatatctacaagtggtatgaagtcctgcaccccccaggaggcctgtccaggcatgtcttcagaggcagggtgggttacactcatttacctcccctctccccaccaaattatgacacaaacgagtatgtttcctctctagaaccctgtaatgcctcctcccccatccccagagctccttactgtaggtcttaccctggacaaggattttttcaagttggaggcacagaacatgagcaatctgacattcccacagcccctcaaacatgcaaggctactaaggcaggaggagtataaatgatggatattgaccaagacctgcttggacggagaccgccatattatctgttctcttcgttcacaaaacagccttcacttgtctcagaatttgatggacacatactgtgatgagcaggagcttcagatgcactctttacacattttgttgaaataaacctctacatttgtagaagagtta

SEQ ID NO: 103722 - DNA, 9554 bp, Homo sapiens
  Payload ID: 385
  Gene Symbol: ACACA
  Gene Name: acetyl-CoA carboxylase alpha
  Uniprot ID: Q13085
  ENST ID: ENST00000613687
  CDS Start-End: 192-7232
cggcctggtgctgcacgcctgtcagccatcgcccgagccgccggcgtctcctcccgcccagcagttcctccacgcaggggctccggaatcgcccgaccgcacacgttgccaccctgaggtctttctggaagtggatatctactcagacagtaagaattataagagctgtaagagctcattttggaggaataatggatgaaccatctcccttggcccaacctctggagctgaaccagcactctcgattcataataggttctgtgtctgaagataactcagaggatgagatcagcaacctggtgaagttggacctactggaggagaaggagggctccttgtcacctgcttctgttggctcagatacactctctgatttggggatctctagcctacaggatggcttggccttgcacataaggtccagcatgtctggcttgcacctagtaaagcagggccgagacagaaagaaaatagattctcaacgagatttcactgtggcttctccagcagaatttgttactcgctttgggggaaataaagtgattgagaaggttcttattgctaacaatggcattgcagcagtgaaatgcatgcggtctatccgtaggtggtcttatgaaatgtttcgaaatgaacgtgcaattagattcgttgtcatggtcacacctgaagaccttaaagccaatgcagaatacattaagatggcagatcactatgtgccagtgcctggaggaccaaacaacaacaactatgcaaatgtggaattaattcttgatattgctaaaaggatcccagtacaagcagtgtgggctggctggggtcatgcttctgagaatcccaaactaccggaacttctcttgaaaaatggcattgccttcatgggtcctccaagccaggccatgtgggctttaggggataagattgcatcttccatagtggctcaaactgcaggtatcccaactcttccctggagcggcagtggtcttcgtgtggactggcaggaaaatgatttttcaaaacgtatcttaaatgttccccaggagctatatgaaaaaggttatgtgaaagatgtggatgatgggctacaggcagctgaggaagttggatatccagtaatgatcaaggcctcagagggaggaggagggaagggaattagaaaagtcaacaatgcagatgacttccctaatctcttcagacaggttcaagctgaagttcctggatctcccatatttgtgatgagactagccaaacaatctcgtcatctggaggtgcagatcttagcggaccaatatggcaatgctatctctttgtttggtcgtgattgctctgtacaacgcaggcatcagaagattattgaagaagcacctgctactattgctactccagcagtatttgaacacatggaacagtgtgcggtgaaacttgccaaaatggtgggttatgtgagtgctgggactgtggaatacctgtacagccaggatggcagcttctactttctggaattgaatcctcggctgcaggtagagcacccttgtacagagatggtggctgatgtcaatctccctgcagcacagctccagattgccatggggattcctctatatagaatcaaggatatccgtatgatgtatggggtatctccctggggtgattctcccattgattttgaagattctgcacacgttccttgtccaaggggccatgttattgctgctcggatcactagtgaaaatccagatgagggttttaagcccagctcaggaacagttcaggagctaaatttccgcagcaataagaatgtttggggatatttcagtgttgctgctgcagggggacttcatgaatttgctgattctcagtttggtcactgcttttcttggggagaaaacagagaagaggcaatttcaaacatggtggtggctttgaaggagctgtctattcggggtgactttcgaactacagttgaatacctgatcaaattgttagagactgaaagctttcagatgaacagaattgatactggctggctggacagactgatagcagaaaaagtacaggctgagcgacctgacaccatgttgggggttgtgtgtggtgccctccacgtggcagatgtgagcctgcggaatagcgtctctaacttccttcactccttagaaaggggtcaagtccttcctgctcatacacttctgaatacagtagatgttgaacttatctatgagggagtcaagtatgtacttaaggtgactcgacagtcccccaactcctatgtggtgatcatgaatggctcatgtgtagaagtagatgtacatcggctgagtgacggtggactgctcttgtcctatgatggcagcagttatactacgtatatgaaagaggaagtggatagatatcgcatcacaattggcaataaaacctgtgtgtttgagaaggaaaatgacccatcggtgatgcgctcaccttctgctgggaagttaatccagtacattgtagaagatggaggtcatgtgtttgccggccagtgctatgctgagattgaggtaatgaagatggtaatgaccttaacagctgtggagtctggctgtatccattacgtcaagcgacctggagcagctcttgaccctggctgtgtactagccaaaatgcaactggacaaccccagcaaggttcagcaggctgaacttcacacaggtagtctgccacggatccagagcacggcactcagaggcgagaaactccatcgagtgttccattatgtcctggataatctggtcaatgtaatgaatggatactgccttccagatcctttctttagcagcaaggtaaaagactgggtagagcgattgatgaaaaccctcagagatccctccctgcctctcctagaattgcaagatattatgaccagtgtgtctggccgcattccccccaatgtggagaagtctatcaagaaggaaatggctcagtatgctagcaacatcacatcagtcctctgtcagtttcccagccagcagattgcaaacatcctagatagccatgcagctacattgaaccggaaatctgaacgggaagtcttctttatgaatactcagagcattgttcagctggtacagaggtaccgaagtggcatccgaggccacatgaaggctgtggtgatggatctgctccggcagtacctgcgagtagagacacaattccagaatggtcactatgacaaatgtgtattcgccctccgagaagagaataaaagtgacatgaacactgtactgaactacatcttctctcacgctcaagtcaccaagaagaatcttctggtcacaatgcttattgatcagttgtgtggccgggaccctactctcactgatgagctgctgaatattctcacagagctaactcaactcagtaagaccaccaatgccaaagtagcacttcgagcacgccaggttcttattgcctcccatttgccatcatatgagcttcgccataaccaagtagagtctatcttcctatcagctattgacatgtatggacatcaattttgcattgagaacctgcagaaactcatcctatcagaaacatctatttttgatgtcctaccaaacttcttctatcacagcaaccaagtagtgaggatggcagctctggaggtgtatgttcgaagggcttatattgcctatgaacttaacagcgtacaacaccgccagcttaaggacaacacctgtgtggtggaattccagttcatgctgcccacatctcatccaaacagagggaacatccctacgctaaacagaatgtccttctcctccaacctcaaccactatggcatgacccatgtagctagtgtcagcgatgtactgttggacaactcattcactccaccttgtcagcggatgggcggaatggtctcttttcggacttttgaagattttgtcaggatctttgatgaagtgatgggctgcttctctgactccccaccccagagtcccacattccctgaggcaggtcacacgtctctttatgatgaggataaggttcccagggatgaaccaattcacattctcaatgtggctatcaagactgactgtgatattgaggatgacaggctggcagctatgttcagagaatttacccagcaaaataaagctaccctggttgaccatgggatccggcgccttactttcctggttgcacaaaaggatttcagaaagcaggtcaactatgaggtggatcggagatttcatagagaattccctaaattttttacattccgagcaagggataagtttgaggaggatcgtatctatcgtcatctggagcctgctctggctttccagttagagctgaaccggatgagaaattttgacctcactgccattccatgtgctaatcacaagatgcacctgtatctcggggcagccaaggtggaagtgggcacagaagtgacagactacaggttctttgttcgtgcaatcatcaggcattctgatctggtcaccaaggaagcttcttttgaatatctgcaaaatgaaggggagcggctactcctggaagccatggatgagttggaagttgcttttaacaatacaaatgtccgcactgactgtaaccacatcttcctcaactttgtgcccacggttatcatggacccatcaaagattgaggaatccgtgcggagcatggtaatgcggtatggaagtcgcctgtggaaattgcgcgtcctccaggcagaactgaaaatcaacattcgcctgacgccaactggaaaagcaattcccatccgcctcttcctgacaaacgagtctggctattacttggatatcagcctatacaaggaagtgactgactccaggacagcacagatcatgtttcaggcatatggagacaaacagggaccactgcatggaatgttaatcaatactccatatgtgaccaaagacctgctgcaatcaaagaggttccaggcacaatccttagggacaacatacatatatgatatcccagagatgtttcggcagtccctgatcaaactctgggagtctatgtccactcaagcatttcttccatctccccctctgccttctgacatgctgacttacactgaactggtactggatgatcaaggtcagctggtccacatgaacaggcttccaggaggaaatgagattggcatggtagcttggaaaatgacctttaaaagtcctgaatatccagaaggccgagatatcattgttattggcaatgacatcacataccgaattgggtcctttgggcctcaagaggatttgttatttctcagagcttccgaacttgctagggcagaaggtattccacgcatctatgtatcagccaacagtggagcaagaatcggactggcagaagaaattcgccatatgtttcatgtggcctgggtagatcctgaggatccttacaagggatacaggtatttatatctgactcctcaagattataagagagtcagtgctctcaactctgtccattgtgaacacgtggaagatgaaggagaatccaggtacaagataacagatattattgggaaagaagagggaattggacccgagaaccttcgaggttctggaatgattgctggagaatcctcattggcctataatgagatcattaccatcagcctggtgacgtgccgggccattgggattggggcttaccttgtccggctgggacagagaaccatccaggttgagaattctcacttaattctaacaggagctggagccctcaacaaagtcctcgggcgggaagtgtacacctccaataaccagctggggggcatccagattatgcacaacaatggggtgacccactgcactgtgtgtgatgactttgaaggggttttcactgtcctgcactggctgtcttacatgcccaagagcgtgcacagttcagttcctcttctgaactcaaaggatcctatagacagaatcatcgagtttgttcccacaaagaccccatacgatcctcgatggatgctagcaggccgtcctcacccaacccaaaaaggtcagtggttgagtggcttttttgactatggatctttctcagagattatgcagccctgggcacagactgtggtggttggtagagccaggctaggaggaatacctgtgggagttgttgctgtagaaacccgaacagtagaactaagtatcccagctgatccagcaaacctggattctgaagccaagataatccagcaggctggccaggtttggttcccagattctgcgtttaagacgtatcaggccatcaaggacttcaaccgggaagggctgcctctgatggtctttgccaactggagaggcttctctggtggaatgaaagatatgtacgaccaagtgctgaagtttggtgcttacattgtggatggcttgagggagtgctgccagcctgtgctggtttacattcctccccaggctgagctgcggggtggctcctgggtggtgattgactcctccatcaacccccggcacatggagatgtatgctgaccgagaaagcaggggatctgttctggagccagaagggacagtagaaatcaaattccgcagaaaggatctggtgaaaaccatgcgtcgggtggacccagtctacatccacttggctgagcgattggggaccccagagctaagcacagctgagcggaaggagttggagaacaagttgaaggagcgggaggaattcctaattcccatttaccatcaggtagccgtgcagtttgctgacttgcacgacacaccaggccggatgcaggagaagggtgttattagcgatatcctggattggaaaacatcccgtaccttcttctactggcggctgaggcgtcttctgctggaggacctggtcaagaagaaaatccacaatgccaaccctgagctgactgatggccagattcaagccatgttaaggcgctggtttgtggaagtggaaggaacagtgaaggcttatgtttgggacaataataaggatctggcggagtggctagagaaacagctgacagaggaggatggtgttcactcggtaatagaggaaaacatcaaatgcatcagcagagactacgtcctcaagcaaatccgcagcttggtccaggccaatccagaggttgccatggattccatcatccatatgacgcagcacatatcacccactcagcgagcagaagtcatacggatcctctccacaatggattccccttccacgtaggaagagcttcctgcctgtccctgccctgtctctggagaaaagggctagagctgccttttacaactgtaaccactgtaatgagaaggcacaggagacccagcactggagtcaaatggcattttacttcctctcgtttcaggttatgcatgacatcctgggatgtaagatcacagaatccccctccagcccaccagtcacacctaccccattcagtatttattaccctggccaggcctagtcctccactccctgcacaggactgagaaggcaatgaaaggtacaaacatgtaccatgaggtcttactaaccaaagtagggctgcccctcctgtcctgacagccccttggcctcccagcatggggaagcgtgaggagttgcccagcagtgagcagcccccctcactcctggccccatgagccgcagccacaggcagcagaggagggctaaggagaggaggaagcctcaagtccattgtttattaccccgactcttagcccagcacacagtaggcactggagaggaatgattcccagtttaaccacactacggtaccttttatgaagaaaaattagagcataaaatctactacaagctccataggaactcaaagatgagggcaaaactgtgagccaagaagcagagaaagaaaatagaaccagttattcttgatttaggggacctcaaccttgggttcagtctctgaggacaaagggaaaggtagttgttggcctgcctctcgcctgcacgtcactgctggactagctgtcgcatgtggctgggagctgcaaggccagtgcttgaggggccccagcagttccacaggtggtgaagcctgagttggcagaggaggagccagaagagaactgccctttctgcactggtggaaactagttatttatgccatgtggagagccagtgagatagatagatagtctgtttgttttgaggacttggaaagttgttcctatgaagcctggagcttggatggttttgagaggttaatggtgcctccacactcactcttccctagttccaggattactgtcctagcagctaacggttctactctcttccccagagtgtagacaggcagcaggtctccccacagctctgaaaggaccctggtgacagctacaccctcagcaccaggagctggccttcctgatgagggaggcttccaggaaacacagaatccacatgaccttaagattatttacaactcagtcatggtgctgctgtcctccaggcttactggcccctcctgactggcatcaggggcttcctcaggtggtggagagagtttactttcaacaactagtttattcaagaaaagaacttactgattcctctgttcctaaagcaagagtggcaggtgatcagggctggtgtagcatccggttcctttagtgcagctaactgcatttgtcactgatgaccaaggaggaaatcactaagacatttgagaagcagtggtatgaacgttcttggacaagccacagttctgagccttaaccctgtagtttgcacacaagaacgagctccacctccccttcttcaggaggaatctgtgcggatagattggctggacttttcaatggttctgggttgcaggtgggcactgtatggctgggtatggagcggacagcccccaggagtcagagcctcagcccggctgccctggtggaaggtacaggtgttcagcaccttcagaaaagggcataaagtggtgggggacaattctcagtccaggaaaatgcattgaccattgctggctatttgcttacctagtaagaattggattcatttttgaccagattattcttctatgcttttttgcaataaatcaaatcccacatatctacaagtggtatgaagtcctgcaccccccaggaggcctgtccaggcatgtcttcagaggcagggtgggttacactcatttacctcccctctccccaccaaattatgacacaaacgagtatgtttcctctctagaaccctgtaatgcctcctcccccatccccagagctccttactgtaggtcttaccctggacaaggattttttcaagttggaggcacagaacatgagcaatctgacattcccacagcccctcaaacatgcaaggctactaaggcaggaggagtataaatgatggatattgaccaagacctgcttggacggagaccgccatattatctgttctcttcgttcacaaaacagccttcacttgtctcagaatttgatggacacatactgtgatgagcaggagcttcagatgcactctttacacattttgttgaaataaacctctacatttgtagaa

SEQ ID NO: 103723 - DNA, 551 bp, Homo sapiens
  Payload ID: 385
  Gene Symbol: ACACA
  Gene Name: acetyl-CoA carboxylase alpha
  ENST ID: ENST00000621960
  CDS Start-End: 269-551
gtcagccatcgcccgagccgccggcgtctcctcccgcccagcagttcctccacgcaggggctccggaatcgcccgaccgcacacgttgccaccctgaggttctgtgtctgaagataactcagaggatgagatcagcaacctggtgaagttggacctactggaggagaaggagggctccttgtcacctgcttctgttggctcagatacactctctgatttggggatctctagcctacaggatggcttggccttgcacataaggtccagcatgtctggcttgcacctagtaaagcagggccgagacagaaagaaaatagattctcaacgagatttcactgtggcttctccagcagaatttgttactcgctttgggggaaataaagtgattgagaaggttcttattgctaacaatggcattgcagcagtgaaatgcatgcggtctatccgtaggtggtcttatgaaatgtttcgaaatgaacgtgcaattagattcgttgtcatggtcacacctgaagaccttaaagccaatgcagaatacattaagatggcag

SEQ ID NO: 103724 - DNA, 569 bp, Homo sapiens
  Payload ID: 385
  Gene Symbol: ACACA
  Gene Name: acetyl-CoA carboxylase alpha
  ENST ID: ENST00000614438
  CDS Start-End: 1-339
atggatgaaccatctcccttggcccaacctctggagctgaaccagcactctcgattcataataggttctgtgtctgaagataactcagaggatgagatcagcaacctggtgaagttggacctactggaggagaaggagggctccttgtcacctgcttctgttggctcagatacactctctgatttggggatctctagcctacaggatggcttggccttgcacataagttcttggattaaaaggtctggatcagtggttcttggttctcactgttcatcagaatcacctcggggagccttgggagataagccccatccccagagatttcgattcatttgatactggcttggtgtggaactggggcttttttttaaggtatccaggtgattgttgtgtacagccagcattcagattataggtgtaccctagataacataagttagggtggctgttgttgctgttactatcttggcacctttattattaatgggtcataaaataattcagctctattttatacactaaatatatcaactctataataaaatcctgtatgagatctggctgga

SEQ ID NO: 103725 - DNA, 5315 bp, Homo sapiens
  Payload ID: 385
  Gene Symbol: ACACA
  Gene Name: acetyl-CoA carboxylase alpha
  ENST ID: ENST00000619546
  CDS Start-End: 1-2997
gaggatgacaggctggcagctatgttcagagaatttacccagcaaaataaagctaccctggttgaccatgggatccggcgccttactttcctggttgcacaaaaggatttcagaaagcaggtcaactatgaggtggatcggagatttcatagagaattccctaaattttttacattccgagcaagggataagtttgaggaggatcgtatctatcgtcatctggagcctgctctggctttccagttagagctgaaccggatgagaaattttgacctcactgccattccatgtgctaatcacaagatgcacctgtatctcggggcagccaaggtggaagtgggcacagaagtgacagactacaggttctttgttcgtgcaatcatcaggcattctgatctggtcaccaaggaagcttcttttgaatatctgcaaaatgaaggggagcggctactcctggaagccatggatgagttggaagttgcttttaacaatacaaatgtccgcactgactgtaaccacatcttcctcaactttgtgcccacggttatcatggacccatcaaagattgaggaatccgtgcggagcatggtaatgcggtatggaagtcgcctgtggaaattgcgcgtcctccaggcagaactgaaaatcaacattcgcctgacgccaactggaaaagcaattcccatccgcctcttcctgacaaacgagtctggctattacttggatatcagcctatacaaggaagtgactgactccaggacagcacagatcatgtttcaggcatatggagacaaacagggaccactgcatggaatgttaatcaatactccatatgtgaccaaagacctgctgcaatcaaagaggttccaggcacaatccttagggacaacatacatatatgatatcccagagatgtttcggcagattggcatggtagcttggaaaatgacctttaaaagtcctgaatatccagaaggccgagatatcattgttattggcaatgacatcacataccgaattgggtcctttgggcctcaagaggatttgttatttctcagagcttccgaacttgctagggcagaaggtattccacgcatctatgtatcagccaacagtggagcaagaatcggactggcagaagaaattcgccatatgtttcatgtggcctgggtagatcctgaggatccttacaagggatacaggtatttatatctgactcctcaagattataagagagtcagtgctctcaactctgtccattgtgaacacgtggaagatgaaggagaatccaggtacaagataacagatattattgggaaagaagagggaattggacccgagaaccttcgaggttctggaatgattgctggagaatcctcattggcctataatgagatcattaccatcagcctggtgacgtgccgggccattgggattggggcttaccttgtccggctgggacagagaaccatccaggttgagaattctcacttaattctaacaggagctggagccctcaacaaagtcctcgggcgggaagtgtacacctccaataaccagctggggggcatccagattatgcacaacaatggggtgacccactgcactgtgtgtgatgactttgaaggggttttcactgtcctgcactggctgtcttacatgcccaagagcgtgcacagttcagttcctcttctgaactcaaaggatcctatagacagaatcatcgagtttgttcccacaaagaccccatacgatcctcgatggatgctagcaggccgtcctcacccaacccaaaaaggtcagtggttgagtggcttttttgactatggatctttctcagagattatgcagccctgggcacagactgtggtggttggtagagccaggctaggaggaatacctgtgggagttgttgctgtagaaacccgaacagtagaactaagtatcccagctgatccagcaaacctggattctgaagccaagataatccagcaggctggccaggtttggttcccagattctgcgtttaagacgtatcaggccatcaaggacttcaaccgggaagggctgcctctgatggtctttgccaactggagaggcttctctggtggaatgaaagatatgtacgaccaagtgctgaagtttggtgcttacattgtggatggcttgagggagtgctgccagcctgtgctggtttacattcctccccaggctgagctgcggggtggctcctgggtggtgattgactcctccatcaacccccggcacatggagatgtatgctgaccgagaaagcaggggatctgttctggagccagaagggacagtagaaatcaaattccgcagaaaggatctggtgaaaaccatgcgtcgggtggacccagtctacatccacttggctgagcgattggggaccccagagctaagcacagctgagcggaaggagttggagaacaagttgaaggagcgggaggaattcctaattcccatttaccatcaggtagccgtgcagtttgctgacttgcacgacacaccaggccggatgcaggagaagggtgttattagcgatatcctggattggaaaacatcccgtaccttcttctactggcggctgaggcgtcttctgctggaggacctggtcaagaagaaaatccacaatgccaaccctgagctgactgatggccagattcaagccatgttaaggcgctggtttgtggaagtggaaggaacagtgaaggcttatgtttgggacaataataaggatctggcggagtggctagagaaacagctgacagaggaggatggtgttcactcggtaatagaggaaaacatcaaatgcatcagcagagactacgtcctcaagcaaatccgcagcttggtccaggccaatccagaggttgccatggattccatcatccatatgacgcagcacatatcacccactcagcgagcagaagtcatacggatcctctccacaatggattccccttccacgtaggaagagcttcctgcctgtccctgccctgtctctggagaaaagggctagagctgccttttacaactgtaaccactgtaatgagaaggcacaggagacccagcactggagtcaaatggcattttacttcctctcgtttcaggttatgcatgacatcctgggatgtaagatcacagaatccccctccagcccaccagtcacacctaccccattcagtatttattaccctggccaggcctagtcctccactccctgcacaggactgagaaggcaatgaaaggtacaaacatgtaccatgaggtcttactaaccaaagtagggctgcccctcctgtcctgacagccccttggcctcccagcatggggaagcgtgaggagttgcccagcagtgagcagcccccctcactcctggccccatgagccgcagccacaggcagcagaggagggctaaggagaggaggaagcctcaagtccattgtttattaccccgactcttagcccagcacacagtaggcactggagaggaatgattcccagtttaaccacactacggtaccttttatgaagaaaaattagagcataaaatctactacaagctccataggaactcaaagatgagggcaaaactgtgagccaagaagcagagaaagaaaatagaaccagttattcttgatttaggggacctcaaccttgggttcagtctctgaggacaaagggaaaggtagttgttggcctgcctctcgcctgcacgtcactgctggactagctgtcgcatgtggctgggagctgcaaggccagtgcttgaggggccccagcagttccacaggtggtgaagcctgagttggcagaggaggagccagaagagaactgccctttctgcactggtggaaactagttatttatgccatgtggagagccagtgagatagatagatagtctgtttgttttgaggacttggaaagttgttcctatgaagcctggagcttggatggttttgagaggttaatggtgcctccacactcactcttccctagttccaggattactgtcctagcagctaacggttctactctcttccccagagtgtagacaggcagcaggtctccccacagctctgaaaggaccctggtgacagctacaccctcagcaccaggagctggccttcctgatgagggaggcttccaggaaacacagaatccacatgaccttaagattatttacaactcagtcatggtgctgctgtcctccaggcttactggcccctcctgactggcatcaggggcttcctcaggtggtggagagagtttactttcaacaactagtttattcaagaaaagaacttactgattcctctgttcctaaagcaagagtggcaggtgatcagggctggtgtagcatccggttcctttagtgcagctaactgcatttgtcactgatgaccaaggaggaaatcactaagacatttgagaagcagtggtatgaacgttcttggacaagccacagttctgagccttaaccctgtagtttgcacacaagaacgagctccacctccccttcttcaggaggaatctgtgcggatagattggctggacttttcaatggttctgggttgcaggtgggcactgtatggctgggtatggagcggacagcccccaggagtcagagcctcagcccggctgccctggtggaaggtacaggtgttcagcaccttcagaaaagggcataaagtggtgggggacaattctcagtccaggaaaatgcattgaccattgctggctatttgcttacctagtaagaattggattcatttttgaccagattattcttctatgcttttttgcaataaatcaaatcccacatatctacaagtggtatgaagtcctgcaccccccaggaggcctgtccaggcatgtcttcagaggcagggtgggttacactcatttacctcccctctccccaccaaattatgacacaaacgagtatgtttcctctctagaaccctgtaatgcctcctcccccatccccagagctccttactgtaggtcttaccctggacaaggattttttcaagttggaggcacagaacatgagcaatctgacattcccacagcccctcaaacatgcaaggctactaaggcaggaggagtataaatgatggatattgaccaagacctgcttggacggagaccgccatattatctgttctcttcgttcacaaaacagccttcacttgtctcagaatttgatggacacatactgtgatgagcaggagcttcagatgcactctttacacattttgttgaaataaacctctacatttgt

SEQ ID NO: 103726 - DNA, 451 bp, Homo sapiens
  Payload ID: 385
  Gene Symbol: ACACA
  Gene Name: acetyl-CoA carboxylase alpha
  ENST ID: ENST00000612007
  CDS Start-End: 200-451
aggcactgactttcttgatgaattctgtccatctgtaaagcagctatatatcccactggaggctttgcctctcagagacaacgtgaagacggataagcaggcatcaggagcagagtggcctctcaggtctttttggaagtggatatctactcagacagtaagaattataagagctgtaagagctcattttggaggaataatggatgaaccatctcccttggcccaacctctggagctgaaccagcactctcgattcataataggttctgtgtctgaagataactcagaggatgagatcagcaacctggtgaagttggacctactggaggagaaggagggctccttgtcacctgcttctgttggctcagatacactctctgatttggggatctctagcctacaggatggcttggccttgcacataagttcttggattaaaaggtctggatca

SEQ ID NO: 103727 - DNA, 1627 bp, Homo sapiens
  Payload ID: 385
  Gene Symbol: ACACA
  Gene Name: acetyl-CoA carboxylase alpha
  ENST ID: ENST00000632361
  CDS Start-End: 1268-1627
gccctcttggccttttcccggtccccgccgcgcgcctgctgctgtccccgtgcccgaggactgggaggatggggctgagccgcttgcctgacttttgatccgaccagtaatcactttgcccgtgtggcgcgtggcccgttgcctgaggcttcctggcgcgtggggctgtttggtcccctccggagtgcggtgaggcgggccgagccgggactgcctgggtttggggataacgttcccatctccacccctgttgcagcaagggaaattgaggctgagggaactgggcccagggacggcgagccgtggctgcctctccagtccgggccccgaagggctgctcgtggatgaaccagactgattttaaggggtgaagagggtgcgtttcaatcagatgcttctggaacgtcgaaattgtcttctttggaaagaaccatcccctctttgggcttcagaggcccaaattgaggcgcaatgatgagaggatgtggtggtctactctgatgtcaatcttgagggctagggtcttgctatgtcacccagcctggagtggaattgtgtgatcaagactcactgaagcctccaactcctgggctcaagcaatcctcccacctcagccacccaagtagctgggactacaggctggagtgcaatggcatgatcttggctcactgcaacctccgcctcccggattcaacggattctcctgcctcagcctcctgagtagctgggattataggtgcctgccacaacacccaggaccagacttatgaagtggccttcctgaggagattttctgaccttatggtatgaagttccttcaggctcttaattctggataaactggagtgattaacaagagcaaagagacatagtattcagataaggactttgtgtcttatttttcttttatatcacaactggagccacagttgtgggcaaggcactgactttcttgatgaattctgtccatctgtaaagcagctatatatcccactggaggctttgcctctcagagacaacgtgaagacggataagcaggcatcaggagcagagtggcctctcagctggtcagattctccgaagaaggatcctctaggctgggcacggtggctcacacctataatcccagcactttgggaggccgaggcaggtggatcacgaggtcaggagttcgaggccagcctggccaatatggtctttctggaagtggatatctactcagacagtaagaattataagagctgtaagagctcattttggaggaataatggatgaaccatctcccttggcccaacctctggagctgaaccagcactctcgattcataataggttctgtgtctgaagataactcagaggatgagatcagcaacctggtgaagttggacctactggaggagaaggagggctccttgtcacctgcttctgttggctcagatacactctctgatttggggatctctagcctacaggatggcttggccttgcacataaggtccagcatgtctggcttgcacctagtaaagcagggccgagacagaaagaaaatagattctcaacgagatttcactgtggcttctccagcagaatttgttactcgctttgggggaaataaagtgattgagaag

SEQ ID NO: 103728 - DNA, 1469 bp, Homo sapiens
  Payload ID: 385
  Gene Symbol: ACACA
  Gene Name: acetyl-CoA carboxylase alpha
  ENST ID: ENST00000633050
  CDS Start-End: 375-719
aatcactttgcccgtgtggcgcgtggcccgttgcctgaggcttcctggcgcgtggggctgtttggtcccctccggagtgcggtgaggcgggccgagccgggactgcctgggtttggggataacgttcccatctccacccctgttgcagcaagggaaattgaggctgagggaactgggcccagggacggcgagccgtggctgcctctccagtccgggccccgaagggctgctcgtggatgaaccagactgattttaaggggtgaagagggtgcgtttcaatcagatgcttctggaacgtcgaaattgtcttctttggaaagaaccatcccctctttgggcttcagaggcccaaattgaggcgcaatgatgagaggatgtggtggtctactctgatgtcaatcttgagggctaggtctttctggaagtggatatctactcagacagtaagaattataagagctgtaagagctcattttggaggaataatggatgaaccatctcccttggcccaacctctggagctgaaccagcactctcgattcataataggttctgtgtctgaagataactcagaggatgagatcagcaacctggtgaagttggacctactggaggagaaggagggctccttgtcacctgcttctgttggctcagatacactctctgatttggggatctctagcctacaggatggcttggccttgcacataagactttgaaatactcgtgggatatgaagtggaggtgcctagagggttgaagataatgaggacagatgaagaaatgtttgattgtgccatacttacagttgctgattttcaaggtccagcatgtctggcttgcacctagtaaagcagggccgagacagaaagaaaatagattctcaacgagatttcactgtggcttctccagcagaatttgttactcgctttgggggaaataaagtgattgagaaggttcttattgctaacaatggcattgcagcagtgaaatgcatgcggtctatccgtaggtggtcttatgaaatgtttcgaaatgaacgtgcaattagattcgttgtcatggtcacacctgaagaccttaaagccaatgcagaatacattaagatggcagatcactatgtgccagtgcctggaggaccaaacaacaacaactatgcaaatgtggaattaattcttgatattgctaaaaggatcccagtacaagcagtgtgggctggctggggtcatgcttctgagaatcccaaactaccggaacttctcttgaaaaatggcattgccttcatgggtcctccaagccaggccatgtgggctttaggggataagattgcatcttccatagtggctcaaactgcaggtatcccaactcttccctggagcggcagtggtcttcgtgtggactggcaggaaaatgatttttcaaaacgtatcttaaatgttccccaggagctatatgaaaaaggttatgtg

SEQ ID NO: 103729 - DNA, 551 bp, Homo sapiens; identical to SEQ ID NO: 103723
  Payload ID: 385
  Gene Symbol: ACACA
  Gene Name: acetyl-CoA carboxylase alpha
  ENST ID: ENST00000632486
  CDS Start-End: 269-551

SEQ ID NO: 103730 - DNA, 463 bp, Homo sapiens; identical to SEQ ID NO: 103717
  Payload ID: 385
  Gene Symbol: ACACA
  Gene Name: acetyl-CoA carboxylase alpha
  ENST ID: ENST00000631953
  CDS Start-End: 1-290

SEQ ID NO: 103731 - DNA, 451 bp, Homo sapiens
  Payload ID: 385
  Gene Symbol: ACACA
  Gene Name: acetyl-CoA carboxylase alpha
  ENST ID: ENST00000633325
  CDS Start-End: 200-451
aggcactgactttcttgatgaattctgtccatctgtaaagcagctatatatcccactggaggctttgcctctcagagacaacgtgaagacggataagcaggcatcaggagcagagtggcctctcaggtctttctggaagtggatatctactcagacagtaagaattataagagctgtaagagctcattttggaggaataatggatgaaccatctcccttggcccaacctctggagctgaaccagcactctcgattcataataggttctgtgtctgaagataactcagaggatgagatcagcaacctggtgaagttggacctactggaggagaaggagggctccttgtcacctgcttctgttggctcagatacactctctgatttggggatctctagcctacaggatggcttggccttgcacataagttcttggattaaaaggtctggatca

SEQ ID NO: 103732 - DNA, 662 bp, Homo sapiens
  Payload ID: 385
  Gene Symbol: ACACA
  Gene Name: acetyl-CoA carboxylase alpha
  ENST ID: ENST00000632723
  CDS Start-End: 537-662
cggcctggtgctgcacgcctgtcagccatcgcccgagccgccggcgtctcctcccgcccagcagttcctccacgcaggggctccggaatcgcccgaccgcacacgttgccaccctgaggtctttctggaagtggatatctactcagacagtaagaattataagagctgtaagagctcattttggaggaataatggatgaaccatctcccttggcccaacctctggagctgaaccagcactctcgattcataataggttctgtgtctgaagataactcagaggatgagatcagcaacctggtgaagttggacctactggaggagaaggagggctccttgtcacctgcttctgttggctcagatacactctctgatttggggatctctagcctacaggatggcttggccttgcacataagactttgaaatactcgtgggatatgaagtggaggtgcctagagggttgaagataatgaggacagatgaagaaatgtttgattgtgccatacttacagttgctgattttcaaggtccagcatgtctggcttgcacctagtaaagcagggccgagacagaaagaaaatagattctcaacgagatttcactgtggcttctccagcagaatttgttactcgctttgggggaaataaagtgattgagaag

SEQ ID NO: 103733 - DNA, 2177 bp, Homo sapiens; identical to SEQ ID NO: 103715
  Payload ID: 385
  Gene Symbol: ACACA
  Gene Name: acetyl-CoA carboxylase alpha
  ENST ID: ENST00000631657
  CDS Start-End: 1-157

SEQ ID NO: 103734 - DNA, 569 bp, Homo sapiens; identical to SEQ ID NO: 103724
  Payload ID: 385
  Gene Symbol: ACACA
  Gene Name: acetyl-CoA carboxylase alpha
  ENST ID: ENST00000634140
  CDS Start-End: 1-339

SEQ ID NO: 103735 - DNA, 5315 bp, Homo sapiens; identical to SEQ ID NO: 103725
  Payload ID: 385
  Gene Symbol: ACACA
  Gene Name: acetyl-CoA carboxylase alpha
  ENST ID: ENST00000632453
  CDS Start-End: 1-2997

SEQ ID NO: 103736 - DNA, 9360 bp, Homo sapiens
  Payload ID: 386
  Gene Symbol: ACACB
  Gene Name: acetyl-CoA carboxylase beta
  Uniprot ID: O00763
  ENST ID: ENST00000338432
  CDS Start-End: 120-7496
cagctagcaggcttagattcaggccctcagcaaacaaggaacctggaaaatgtaaccctgaatgcacggtggggaggacatggcaagagaaaagcggcaggaataaagtgattttctgaatggtcttgcttctttgtctatcttgtctgattttctcctgtctgaccttttcctggttaaaaatctgggggaaaatgacggactccaagccgatcaccaagagtaaatcagaagcaaacctcatcccgagccaggagccctttccagcctctgataactcaggggagacaccgcagagaaatggggagggccacactctgcccaagacacccagccaggccgagccagcctcccacaaaggccccaaagatgccggtcggcggagaaactccctaccaccctcccaccagaagcccccaagaaaccccctttcttccagtgacgcagcaccctccccagagcttcaagccaacgggactgggacacaaggtctggaggccacagataccaatggcctgtcctcctcagccaggccccagggccagcaagctggctccccctccaaagaagacaagaagcaggcaaacatcaagaggcagctgatgaccaacttcatcctgggctcttttgatgactactcctccgacgaggactctgttgctggctcatctcgtgagtctacccggaagggcagccgggccagcttgggggccctgtccctggaggcttatctgaccacaggtgaagctgagacccgcgtccccactatgaggccgagcatgtcgggactccacctggtgaagaggggacgggaacacaagaagctggacctgcacagagactttaccgtggcttctcccgctgagtttgtcacacgctttgggggggatcgggtcatcgagaaggtgcttattgccaacaacgggattgccgccgtgaagtgcatgcgctccatccgcaggtgggcctatgagatgttccgcaacgagcgggccatccggtttgttgtgatggtgacccccgaggaccttaaggccaacgcagagtacatcaagatggcggatcattacgtccccgtcccaggagggcccaataacaacaactatgccaacgtggagctgattgtggacattgccaagagaatccccgtgcaggcggtgtgggctggctggggccatgcttcagaaaaccctaaacttccggagctgctgtgcaagaatggagttgctttcttaggccctcccagtgaggccatgtgggccttaggagataagatcgcctccaccgttgtcgcccagacgctacaggtcccaaccctgccctggagtggaagcggcctgacagtggagtggacagaagatgatctgcagcagggaaaaagaatcagtgtcccagaagatgtttatgacaagggttgcgtgaaagacgtagatgagggcttggaggcagcagaaagaattggttttccattgatgatcaaagcttctgaaggtggcggagggaagggaatccggaaggctgagagtgcggaggacttcccgatccttttcagacaagtacagagtgagatcccaggctcgcccatctttctcatgaagctggcccagcacgcccgtcacctggaagttcagatcctcgctgaccagtatgggaatgctgtgtctctgtttggtcgcgactgctccatccagcggcggcatcagaagatcgttgaggaagcaccggccaccatcgccccgctggccatattcgagttcatggagcagtgtgccatccgcctggccaagaccgtgggctatgtgagtgcagggacagtggaatacctctatagtcaggatggcagcttccacttcttggagctgaatcctcgcttgcaggtggaacatccctgcacagaaatgattgctgatgttaatctgccggccgcccagctacagatcgccatgggcgtgccactgcaccggctgaaggatatccggcttctgtatggagagtcaccatggggagtgactcccatttcttttgaaaccccctcaaaccctcccctcgcccgaggccacgtcattgccgccagaatcaccagcgaaaacccagacgagggttttaagccgagctccgggactgtccaggaactgaatttccggagcagcaagaacgtgtggggttacttcagcgtggccgctactggaggcctgcacgagtttgcggattcccaatttgggcactgcttctcctggggagagaaccgggaagaggccatttcgaacatggtggtggctttgaaggaactgtccatccgaggcgactttaggactaccgtggaatacctcattaacctcctggagaccgagagcttccagaacaacgacatcgacaccgggtggttggactacctcattgctgagaaagtgcaggcggagaaaccggatatcatgcttggggtggtatgcggggccttgaacgtggccgatgcgatgttcagaacgtgcatgacagatttcttacactccctggaaaggggccaggtcctcccagcggattcactactgaacctcgtagatgtggaattaatttacggaggtgttaagtacattctcaaggtggcccggcagtctctgaccatgttcgttctcatcatgaatggctgccacatcgagattgatgcccaccggctgaatgatggggggctcctgctctcctacaatgggaacagctacaccacctacatgaaggaagaggttgacagttaccgaattaccatcggcaataagacgtgtgtgtttgagaaggagaacgatcctacagtcctgagatccccctcggctgggaagctgacacagtacacagtggaggatgggggccacgttgaggctgggagcagctacgctgagatggaggtgatgaagatgatcatgaccctgaacgttcaggaaagaggccgggtgaagtacatcaagcgtccaggtgccgtgctggaagcaggctgcgtggtggccaggctggagctcgatgacccttctaaagtccacccggctgaaccgttcacaggagaactccctgcccagcagacactgcccatcctcggagagaaactgcaccaggtcttccacagcgtcctggaaaacctcaccaacgtcatgagtggcttttgtctgccagagcccgtttttagcataaagctgaaggagtgggtgcagaagctcatgatgaccctccggcacccgtcactgccgctgctggagctgcaggagatcatgaccagcgtggcaggccgcatccccgcccctgtggagaagtctgtccgcagggtgatggcccagtatgccagcaacatcacctcggtgctgtgccagttccccagccagcagatagccaccatcctggactgccatgcagccaccctgcagcggaaggctgatcgagaggtcttcttcatcaacacccagagcatcgtgcagttggtccagagataccgcagcgggatccgcggctatatgaaaacagtggtgttggatctcctgagaagatacttgcgtgttgagcaccattttcagcaagcccactacgacaagtgtgtgataaacctcagggagcagttcaagccagacatgtcccaggtgctggactgcatcttctcccacgcacaggtggccaagaagaaccagctggtgatcatgttgatcgatgagctgtgtggcccagacccttccctgtcggacgagctgatctccatcctcaacgagctcactcagctgagcaaaagcgagcactgcaaagtggccctcagagcccggcagatcctgattgcctcccacctcccctcctacgagctgcggcataaccaggtggagtccattttcctgtctgccattgacatgtacggccaccagttctgccccgagaacctcaagaaattaatactttcggaaacaaccatcttcgacgtcctgcctactttcttctatcacgcaaacaaagtcgtgtgcatggcgtccttggaggtttacgtgcggaggggctacatcgcctatgagttaaacagcctgcagcaccggcagctcccggacggcacctgcgtggtagaattccagttcatgctgccgtcctcccacccaaaccggatgaccgtgcccatcagcatcaccaaccctgacctgctgaggcacagcacagagctcttcatggacagcggcttctccccactgtgccagcgcatgggagccatggtagccttcaggagattcgaggacttcaccagaaattttgatgaagtcatctcttgcttcgccaacgtgcccaaagacacccccctcttcagcgaggcccgcacctccctatactccgaggatgactgcaagagcctcagagaagagcccatccacattctgaatgtgtccatccagtgtgcagaccacctggaggatgaggcactggtgccgattttacggacattcgtacagtccaagaaaaatatccttgtggattatggactccgacgaatcacattcttgattgcccaagagaaagaatttcccaagtttttcacattcagagcaagagatgagtttgcagaagatcgcatttaccgtcacttggaacctgccctggccttccagctggaacttaaccggatgcgtaacttcgatctgaccgccgtgccctgtgccaaccacaagatgcacctttacctgggtgctgccaaggtgaaggaaggtgtggaagtgacggaccataggttcttcatccgcgccatcatcaggcactctgacctgatcacaaaggaagcctccttcgaatacctgcagaacgagggtgagcggctgctcctggaggccatggacgagctggaggtggcgttcaataacaccagcgtgcgcaccgactgcaaccacatcttcctcaacttcgtgcccactgtcatcatggaccccttcaagatcgaggagtccgtgcgctacatggttatgcgctacggcagccggctgtggaaactccgtgtgctacaggctgaggtcaagatcaacatccgccagaccaccaccggcagtgccgttcccatccgcctgttcatcaccaatgagtcgggctactacctggacatcagcctctacaaagaagtgactgactccagatctggaaatatcatgtttcactccttcggcaacaagcaagggccccagcacgggatgctgatcaatactccctacgtcaccaaggatctgctccaggccaagcgattccaggcccagaccctgggaaccacctacatctatgacttcccggaaatgttcaggcaggctctctttaaactgtggggctccccagacaagtatcccaaagacatcctgacatacactgaattagtgttggactctcagggccagctggtggagatgaaccgacttcctggtggaaatgaggtgggcatggtggccttcaaaatgaggtttaagacccaggagtacccggaaggacgggatgtgatcgtcatcggcaatgacatcacctttcgcattggatcctttggccctggagaggaccttctgtacctgcgggcatccgagatggcccgggcagagggcattcccaaaatttacgtggcagccaacagtggcgcccgtattggcatggcagaggagatcaaacacatgttccacgtggcttgggtggacccagaagacccccacaaaggatttaaatacctgtacctgactccccaagactacaccagaatcagctccctgaactccgtccactgtaaacacatcgaggaaggaggagagtccagatacatgatcacggatatcatcgggaaggatgatggcttgggcgtggagaatctgaggggctcaggcatgattgctggggagtcctctctggcttacgaagagatcgtcaccattagcttggtgacctgccgagccattgggattggggcctacttggtgaggctgggccagcgagtgatccaggtggagaattcccacatcatcctcacaggagcaagtgctctcaacaaggtcctgggaagagaggtctacacatccaacaaccagctgggtggcgttcagatcatgcattacaatggtgtctcccacatcaccgtgccagatgactttgagggggtttataccatcctggagtggctgtcctatatgccaaaggataatcacagccctgtccctatcatcacacccactgaccccattgacagagaaattgaattcctcccatccagagctccctacgacccccggtggatgcttgcaggaaggcctcacccaactctgaagggaacgtggcagagcggattctttgaccacggcagtttcaaggaaatcatggcaccctgggcgcagaccgtggtgacaggacgagcaaggcttggggggattcccgtgggagtgattgctgtggagacacggactgtggaggtggcagtccctgcagaccctgccaacctggattctgaggccaagataattcagcaggcaggacaggtgtggttcccagactcagcctacaaaaccgcccaggccgtcaaggacttcaaccgggagaagttgcccctgatgatctttgccaactggagggggttctccggtggcatgaaagacatgtatgaccaggtgctgaagtttggagcctacatcgtggacggccttagacaatacaaacagcccatcctgatctatatcccgccctatgcggagctccggggaggctcctgggtggtcatagatgccaccatcaacccgctgtgcatagaaatgtatgcagacaaagagagcaggggtggtgttctggaaccagaggggacagtggagattaagttccgaaagaaagatctgataaagtccatgagaaggatcgatccagcttacaagaagctcatggaacagctaggggaacctgatctctccgacaaggaccgaaaggacctggagggccggctaaaggctcgcgaggacctgctgctccccatctaccaccaggtggcggtgcagttcgccgacttccatgacacacccggccggatgctggagaagggcgtcatatctgacatcctggagtggaagaccgcacgcaccttcctgtattggcgtctgcgccgcctcctcctggaggaccaggtcaagcaggagatcctgcaggccagcggggagctgagtcacgtgcatatccagtccatgctgcgtcgctggttcgtggagacggagggggctgtcaaggcctacttgtgggacaacaaccaggtggttgtgcagtggctggaacagcactggcaggcaggggatggcccgcgctccaccatccgtgagaacatcacgtacctgaagcacgactctgtcctcaagaccatccgaggcctggttgaagaaaaccccgaggtggccgtggactgtgtgatatacctgagccagcacatcagcccagctgagcgggcgcaggtcgttcacctgctgtctaccatggacagcccggcctccacctgaccgtggcccgcccagccactcccgggaccacggcaaaaggaaccacccagacccaccacccgtacaccctcagcagaccctgaagacttgcttttaaacaaagaaaatcctgggcacttctgcagggctgctggttccgagctgacacccgtcttaacaaaaggcccaggagtgcctcttccaaacaaaaacagcctcctctccatagctgggaagtttattttgttttgtctctgaagacagcagttttattgcatcactaaatctaatcaagctaaaacatccctgtttccttttgcaaaacagtgcctggcatgtgggatccaggcgttctttaggatccttggataccacatcgtgaaatcttttatttttttactctgagaccagcaccagatgtaagtaagcatctcatatatttcagccaaataaatgggccaagggaaaaaaatatatatatatagacaggactagagaaaacctatttttgtaatgatgtttctttggatactgtctagtcacccagaaaaatgtatggatgaatttttttttttttttttgagacaaagtctcactgtgtcatgcaggctggagtgcagtggcatgatctcactgcaacctccatctcctgtctcagcctcctagataactgggattacaggtgcccaccaccatgcccggctaatttttgtatttttggtagagacagagtttcaccaggttggtcaggctggtctcaaactcttgacttcaggtaatccacccaccttggcctcccaaagtgctgggattacaggcatgagccaccatcttcagccagatgatttttttattgagagagtgaaatgctattttgttccccaaatggcgctagtgaatcactaggagggtcccactgataggccatgtttagcactggttgccagggattctctttttgagagagggaaagcaaaatgaatggaagtacccagctggaggtttcagggcttctggaggatgctctcgcatagctcgaggtcctctgcccacctcttctctccaaggaaaatgaggactgccccttccccctgcaggattggcccccagcctgcgcatgcaccctcctcttgcccaagtggggagcacagaggcggagaggaatcccttaccacacccacggcccagcttgctcacgagtgtcacctctgtgacggtcaccactgctcccttggagggccacttgagttactgttgcttcctcgcctgctggcttgatgagcaccgatggtgggatctgaccccgaggggcagagctgtcggtgactgaggactggactgtggtgaccatgccgatttgctcagggagaacgttgcaatgcacccagcagctcctggctctgcaggcggcacagcctggggccctgtgatcctctggtttcttccattggggcggagtcggggatggagggagctggccacaacccactgctctgatgggtggtttgtccaaggatgctgaatgtaatgcctggtcaatgtggaagcccatgaggttgcccagggaagcctccaaaagctgggatgcttgagggtatccaagttgaaaaagacaaaatctgaccatcagccagtgacagtcctggcaaatgaaggtggggcggggcagtgaggggtgggagaaggtgaatgattcattattccaccccgaggtttgctggggtgaggggaagaatcgatgctgctttgggaactgaaggtttttctgttgggaaggccctcttggttttggagagaaagacaagttatgagtagctgctaccctggaacggtgggcagagagcctactaggaaatgtgcagaataaactattttttgaaggaaa

SEQ ID NO: 103737 - DNA, 9247 bp, Homo sapiens
  Payload ID: 386
  Gene Symbol: ACACB
  Gene Name: acetyl-CoA carboxylase beta
  Uniprot ID: O00763
  ENST ID: ENST00000377848
  CDS Start-End: 10-7386
attttctgaatggtcttgcttctttgtctatcttgtctgattttctcctgtctgaccttttcctggttaaaaatctgggggaaaatgacggactccaagccgatcaccaagagtaaatcagaagcaaacctcatcccgagccaggagccctttccagcctctgataactcaggggagacaccgcagagaaatggggagggccacactctgcccaagacacccagccaggccgagccagcctcccacaaaggccccaaagatgccggtcggcggagaaactccctaccaccctcccaccagaagcccccaagaaaccccctttcttccagtgacgcagcaccctccccagagcttcaagccaacgggactgggacacaaggtctggaggccacagataccaatggcctgtcctcctcagccaggccccagggccagcaagctggctccccctccaaagaagacaagaagcaggcaaacatcaagaggcagctgatgaccaacttcatcctgggctcttttgatgactactcctccgacgaggactctgttgctggctcatctcgtgagtctacccggaagggcagccgggccagcttgggggccctgtccctggaggcttatctgaccacaggtgaagctgagacccgcgtccccactatgaggccgagcatgtcgggactccacctggtgaagaggggacgggaacacaagaagctggacctgcacagagactttaccgtggcttctcccgctgagtttgtcacacgctttgggggggatcgggtcatcgagaaggtgcttattgccaacaacgggattgccgccgtgaagtgcatgcgctccatccgcaggtgggcctatgagatgttccgcaacgagcgggccatccggtttgttgtgatggtgacccccgaggaccttaaggccaacgcagagtacatcaagatggcggatcattacgtccccgtcccaggagggcccaataacaacaactatgccaacgtggagctgattgtggacattgccaagagaatccccgtgcaggcggtgtgggctggctggggccatgcttcagaaaaccctaaacttccggagctgctgtgcaagaatggagttgctttcttaggccctcccagtgaggccatgtgggccttaggagataagatcgcctccaccgttgtcgcccagacgctacaggtcccaaccctgccctggagtggaagcggcctgacagtggagtggacagaagatgatctgcagcagggaaaaagaatcagtgtcccagaagatgtttatgacaagggttgcgtgaaagacgtagatgagggcttggaggcagcagaaagaattggttttccattgatgatcaaagcttctgaaggtggcggagggaagggaatccggaaggctgagagtgcggaggacttcccgatccttttcagacaagtacagagtgagatcccaggctcgcccatctttctcatgaagctggcccagcacgcccgtcacctggaagttcagatcctcgctgaccagtatgggaatgctgtgtctctgtttggtcgcgactgctccatccagcggcggcatcagaagatcgttgaggaagcaccggccaccatcgccccgctggccatattcgagttcatggagcagtgtgccatccgcctggccaagaccgtgggctatgtgagtgcagggacagtggaatacctctatagtcaggatggcagcttccacttcttggagctgaatcctcgcttgcaggtggaacatccctgcacagaaatgattgctgatgttaatctgccggccgcccagctacagatcgccatgggcgtgccactgcaccggctgaaggatatccggcttctgtatggagagtcaccatggggagtgactcccatttcttttgaaaccccctcaaaccctcccctcgcccgaggccacgtcattgccgccagaatcaccagcgaaaacccagacgagggttttaagccgagctccgggactgtccaggaactgaatttccggagcagcaagaacgtgtggggttacttcagcgtggccgctactggaggcctgcacgagtttgcggattcccaatttgggcactgcttctcctggggagagaaccgggaagaggccatttcgaacatggtggtggctttgaaggaactgtccatccgaggcgactttaggactaccgtggaatacctcattaacctcctggagaccgagagcttccagaacaacgacatcgacaccgggtggttggactacctcattgctgagaaagtgcaggcggagaaaccggatatcatgcttggggtggtatgcggggccttgaacgtggccgatgcgatgttcagaacgtgcatgacagatttcttacactccctggaaaggggccaggtcctcccagcggattcactactgaacctcgtagatgtggaattaatttacggaggtgttaagtacattctcaaggtggcccggcagtctctgaccatgttcgttctcatcatgaatggctgccacatcgagattgatgcccaccggctgaatgatggggggctcctgctctcctacaatgggaacagctacaccacctacatgaaggaagaggttgacagttaccgaattaccatcggcaataagacgtgtgtgtttgagaaggagaacgatcctacagtcctgagatccccctcggctgggaagctgacacagtacacagtggaggatgggggccacgttgaggctgggagcagctacgctgagatggaggtgatgaagatgatcatgaccctgaacgttcaggaaagaggccgggtgaagtacatcaagcgtccaggtgccgtgctggaagcaggctgcgtggtggccaggctggagctcgatgacccttctaaagtccacccggctgaaccgttcacaggagaactccctgcccagcagacactgcccatcctcggagagaaactgcaccaggtcttccacagcgtcctggaaaacctcaccaacgtcatgagtggcttttgtctgccagagcccgtttttagcataaagctgaaggagtgggtgcagaagctcatgatgaccctccggcacccgtcactgccgctgctggagctgcaggagatcatgaccagcgtggcaggccgcatccccgcccctgtggagaagtctgtccgcagggtgatggcccagtatgccagcaacatcacctcggtgctgtgccagttccccagccagcagatagccaccatcctggactgccatgcagccaccctgcagcggaaggctgatcgagaggtcttcttcatcaacacccagagcatcgtgcagttggtccagagataccgcagcgggatccgcggctatatgaaaacagtggtgttggatctcctgagaagatacttgcgtgttgagcaccattttcagcaagcccactacgacaagtgtgtgataaacctcagggagcagttcaagccagacatgtcccaggtgctggactgcatcttctcccacgcacaggtggccaagaagaaccagctggtgatcatgttgatcgatgagctgtgtggcccagacccttccctgtcggacgagctgatctccatcctcaacgagctcactcagctgagcaaaagcgagcactgcaaagtggccctcagagcccggcagatcctgattgcctcccacctcccctcctacgagctgcggcataaccaggtggagtccattttcctgtctgccattgacatgtacggccaccagttctgccccgagaacctcaagaaattaatactttcggaaacaaccatcttcgacgtcctgcctactttcttctatcacgcaaacaaagtcgtgtgcatggcgtccttggaggtttacgtgcggaggggctacatcgcctatgagttaaacagcctgcagcaccggcagctcccggacggcacctgcgtggtagaattccagttcatgctgccgtcctcccacccaaaccggatgaccgtgcccatcagcatcaccaaccctgacctgctgaggcacagcacagagctcttcatggacagcggcttctccccactgtgccagcgcatgggagccatggtagccttcaggagattcgaggacttcaccagaaattttgatgaagtcatctcttgcttcgccaacgtgcccaaagacacccccctcttcagcgaggcccgcacctccctatactccgaggatgactgcaagagcctcagagaagagcccatccacattctgaatgtgtccatccagtgtgcagaccacctggaggatgaggcactggtgccgattttacggacattcgtacagtccaagaaaaatatccttgtggattatggactccgacgaatcacattcttgattgcccaagagaaagaatttcccaagtttttcacattcagagcaagagatgagtttgcagaagatcgcatttaccgtcacttggaacctgccctggccttccagctggaacttaaccggatgcgtaacttcgatctgaccgccgtgccctgtgccaaccacaagatgcacctttacctgggtgctgccaaggtgaaggaaggtgtggaagtgacggaccataggttcttcatccgcgccatcatcaggcactctgacctgatcacaaaggaagcctccttcgaatacctgcagaacgagggtgagcggctgctcctggaggccatggacgagctggaggtggcgttcaataacaccagcgtgcgcaccgactgcaaccacatcttcctcaacttcgtgcccactgtcatcatggaccccttcaagatcgaggagtccgtgcgctacatggttatgcgctacggcagccggctgtggaaactccgtgtgctacaggctgaggtcaagatcaacatccgccagaccaccaccggcagtgccgttcccatccgcctgttcatcaccaatgagtcgggctactacctggacatcagcctctacaaagaagtgactgactccagatctggaaatatcatgtttcactccttcggcaacaagcaagggccccagcacgggatgctgatcaatactccctacgtcaccaaggatctgctccaggccaagcgattccaggcccagaccctgggaaccacctacatctatgacttcccggaaatgttcaggcaggctctctttaaactgtggggctccccagacaagtatcccaaagacatcctgacatacactgaattagtgttggactctcagggccagctggtggagatgaaccgacttcctggtggaaatgaggtgggcatggtggccttcaaaatgaggtttaagacccaggagtacccggaaggacgggatgtgatcgtcatcggcaatgacatcacctttcgcattggatcctttggccctggagaggaccttctgtacctgcgggcatccgagatggcccgggcagagggcattcccaaaatttacgtggcagccaacagtggcgcccgtattggcatggcagaggagatcaaacacatgttccacgtggcttgggtggacccagaagacccccacaaaggatttaaatacctgtacctgactccccaagactacaccagaatcagctccctgaactccgtccactgtaaacacatcgaggaaggaggagagtccagatacatgatcacggatatcatcgggaaggatgatggcttgggcgtggagaatctgaggggctcaggcatgattgctggggagtcctctctggcttacgaagagatcgtcaccattagcttggtgacctgccgagccattgggattggggcctacttggtgaggctgggccagcgagtgatccaggtggagaattcccacatcatcctcacaggagcaagtgctctcaacaaggtcctgggaagagaggtctacacatccaacaaccagctgggtggcgttcagatcatgcattacaatggtgtctcccacatcaccgtgccagatgactttgagggggtttataccatcctggagtggctgtcctatatgccaaaggataatcacagccctgtccctatcatcacacccactgaccccattgacagagaaattgaattcctcccatccagagctccctacgacccccggtggatgcttgcaggaaggcctcacccaactctgaagggaacgtggcagagcggattctttgaccacggcagtttcaaggaaatcatggcaccctgggcgcagaccgtggtgacaggacgagcaaggcttggggggattcccgtgggagtgattgctgtggagacacggactgtggaggtggcagtccctgcagaccctgccaacctggattctgaggccaagataattcagcaggcaggacaggtgtggttcccagactcagcctacaaaaccgcccaggccgtcaaggacttcaaccgggagaagttgcccctgatgatctttgccaactggagggggttctccggtggcatgaaagacatgtatgaccaggtgctgaagtttggagcctacatcgtggacggccttagacaatacaaacagcccatcctgatctatatcccgccctatgcggagctccggggaggctcctgggtggtcatagatgccaccatcaacccgctgtgcatagaaatgtatgcagacaaagagagcaggggtggtgttctggaaccagaggggacagtggagattaagttccgaaagaaagatctgataaagtccatgagaaggatcgatccagcttacaagaagctcatggaacagctaggggaacctgatctctccgacaaggaccgaaaggacctggagggccggctaaaggctcgcgaggacctgctgctccccatctaccaccaggtggcggtgcagttcgccgacttccatgacacacccggccggatgctggagaagggcgtcatatctgacatcctggagtggaagaccgcacgcaccttcctgtattggcgtctgcgccgcctcctcctggaggaccaggtcaagcaggagatcctgcaggccagcggggagctgagtcacgtgcatatccagtccatgctgcgtcgctggttcgtggagacggagggggctgtcaaggcctacttgtgggacaacaaccaggtggttgtgcagtggctggaacagcactggcaggcaggggatggcccgcgctccaccatccgtgagaacatcacgtacctgaagcacgactctgtcctcaagaccatccgaggcctggttgaagaaaaccccgaggtggccgtggactgtgtgatatacctgagccagcacatcagcccagctgagcgggcgcaggtcgttcacctgctgtctaccatggacagcccggcctccacctgaccgtggcccgcccagccactcccgggaccacggcaaaaggaaccacccagacccaccacccgtacaccctcagcagaccctgaagacttgcttttaaacaaagaaaatcctgggcacttctgcagggctgctggttccgagctgacacccgtcttaacaaaaggcccaggagtgcctcttccaaacaaaaacagcctcctctccatagctgggaagtttattttgttttgtctctgaagacagcagttttattgcatcactaaatctaatcaagctaaaacatccctgtttccttttgcaaaacagtgcctggcatgtgggatccaggcgttctttaggatccttggataccacatcgtgaaatcttttatttttttactctgagaccagcaccagatgtaagtaagcatctcatatatttcagccaaataaatgggccaagggaaaaaaatatatatatatagacaggactagagaaaacctatttttgtaatgatgtttctttggatactgtctagtcacccagaaaaatgtatggatgaatttttttttttttttttgagacaaagtctcactgtgtcatgcaggctggagtgcagtggcatgatctcactgcaacctccatctcctgtctcagcctcctagataactgggattacaggtgcccaccaccatgcccggctaatttttgtatttttggtagagacagagtttcaccaggttggtcaggctggtctcaaactcttgacttcaggtaatccacccaccttggcctcccaaagtgctgggattacaggcatgagccaccatcttcagccagatgatttttttattgagagagtgaaatgctattttgttccccaaatggcgctagtgaatcactaggagggtcccactgataggccatgtttagcactggttgccagggattctctttttgagagagggaaagcaaaatgaatggaagtacccagctggaggtttcagggcttctggaggatgctctcgcatagctcgaggtcctctgcccacctcttctctccaaggaaaatgaggactgccccttccccctgcaggattggcccccagcctgcgcatgcaccctcctcttgcccaagtggggagcacagaggcggagaggaatcccttaccacacccacggcccagcttgctcacgagtgtcacctctgtgacggtcaccactgctcccttggagggccacttgagttactgttgcttcctcgcctgctggcttgatgagcaccgatggtgggatctgaccccgaggggcagagctgtcggtgactgaggactggactgtggtgaccatgccgatttgctcagggagaacgttgcaatgcacccagcagctcctggctctgcaggcggcacagcctggggccctgtgatcctctggtttcttccattggggcggagtcggggatggagggagctggccacaacccactgctctgatgggtggtttgtccaaggatgctgaatgtaatgcctggtcaatgtggaagcccatgaggttgcccagggaagcctccaaaagctgggatgcttgagggtatccaagttgaaaaagacaaaatctgaccatcagccagtgacagtcctggcaaatgaaggtggggcggggcagtgaggggtgggagaaggtgaatgattcattattccaccccgaggtttgctggggtgaggggaagaatcgatgctgctttgggaactgaaggtttttctgttgggaaggccctcttggttttggagagaaagacaagttatgagtagctgctaccctggaacggtgggcagagagcctactaggaaatgtgcagaataaactattttttgaagg

SEQ ID NO: 103738 - DNA, 6588 bp, Homo sapiens
  Payload ID: 386
  Gene Symbol: ACACB
  Gene Name: acetyl-CoA carboxylase beta
  ENST ID: ENST00000377854
  CDS Start-End: 4012-6588
attttctgaatggtcttgcttctttgtctatcttgtctgattttctcctgtctgaccttttcctggttaaaaatctgggggaaaatgacggactccaagccgatcaccaagagtaaatcagaagcaaacctcatcccgagccaggagccctttccagcctctgataactcaggggagacaccgcagagaaatggggagggccacactctgcccaagacacccagccaggccgagccagcctcccacaaaggccccaaagatgccggtcggcggagaaactccctaccaccctcccaccagaagcccccaagaaaccccctttcttccagtgacgcagcaccctccccagagcttcaagccaacgggactgggacacaaggtctggaggccacagataccaatggcctgtcctcctcagccaggccccagggccagcaagctggctccccctccaaagaagacaagaagcaggcaaacatcaagaggcagctgatgaccaacttcatcctgggctcttttgatgactactcctccgacgaggactctgttgctggctcatctcgtgagtctacccggaagggcagccgggccagcttgggggccctgtccctggaggcttatctgaccacaggtgaagctgagacccgcgtccccactatgaggccgagcatgtcgggactccacctggtgaagaggggacgggaacacaagaagctggacctgcacagagactttaccgtggcttctcccgctgagtttgtcacacgctttgggggggatcgggtcatcgagaaggtgcttattgccaacaacgggattgccgccgtgaagtgcatgcgctccatccgcaggtgggcctatgagatgttccgcaacgagcgggccatccggtttgttgtgatggtgacccccgaggaccttaaggccaacgcagagtacatcaagatggcggatcattacgtccccgtcccaggagggcccaataacaacaactatgccaacgtggagctgattgtggacattgccaagagaatccccgtgcaggcggtgtgggctggctggggccatgcttcagaaaaccctaaacttccggagctgctgtgcaagaatggagttgctttcttaggccctcccagtgaggccatgtgggccttaggagataagatcgcctccaccgttgtcgcccagacgctacaggtcccaaccctgccctggagtggaagcggcctgacagtggagtggacagaagatgatctgcagcagggaaaaagaatcagtgtcccagaagatgtttatgacaagggttgcgtgaaagacgtagatgagggcttggaggcagcagaaagaattggttttccattgatgatcaaagcttctgaaggtggcggagggaagggaatccggaaggctgagagtgcggaggacttcccgatccttttcagacaagtacagagtgagatcccaggctcgcccatctttctcatgaagctggcccagcacgcccgtcacctggaagttcagatcctcgctgaccagtatgggaatgctgtgtctctgtttggtcgcgactgctccatccagcggcggcatcagaagatcgttgaggaagcaccggccaccatcgccccgctggccatattcgagttcatggagcagtgtgccatccgcctggccaagaccgtgggctatgtgagtgcagggacagtggaatacctctatagtcaggatggcagcttccacttcttggagctgaatcctcgcttgcaggtggaacatccctgcacagaaatgattgctgatgttaatctgccggccgcccagctacagatcgccatgggcgtgccactgcaccggctgaaggatatccggcttctgtatggagagtcaccatggggagtgactcccatttcttttgaaaccccctcaaaccctcccctcgcccgaggccacgtcattgccgccagaatcaccagcgaaaacccagacgagggttttaagccgagctccgggactgtccaggaactgaatttccggagcagcaagaacgtgtggggttacttcagcgtggccgctactggaggcctgcacgagtttgcggattcccaatttgggcactgcttctcctggggagagaaccgggaagaggccatttcgaacatggtggtggctttgaaggaactgtccatccgaggcgactttaggactaccgtggaatacctcattaacctcctggagaccgagagcttccagaacaacgacatcgacaccgggtggttggactacctcattgctgagaaagtgcaggcggagaaaccggatatcatgcttggggtggtatgcggggccttgaacgtggccgatgcgatgttcagaacgtgcatgacagatttcttacactccctggaaaggggccaggtcctcccagcggattcactactgaacctcgtagatgtggaattaatttacggaggtgttaagtacattctcaaggtggcccggcagtctctgaccatgttcgttctcatcatgaatggctgccacatcgagattgatgcccaccggctgaatgatggggggctcctgctctcctacaatgggaacagctacaccacctacatgaaggaagaggttgacagttaccgaattaccatcggcaataagacgtgtgtgtttgagaaggagaacgatcctacagtcctgagatccccctcggctgggaagctgacacagtacacagtggaggatgggggccacgttgaggctgggagcagctacgctgagatggaggtgatgaagatgatcatgaccctgaacgttcaggaaagaggccgggtgaagtacatcaagcgtccaggtgccgtgctggaagcaggctgcgtggtggccaggctggagctcgatgacccttctaaagtccacccggctgaaccgttcacaggagaactccctgcccagcagacactgcccatcctcggagagaaactgcaccaggtcttccacagcgtcctggaaaacctcaccaacgtcatgagtggcttttgtctgccagagcccgtttttagcataaagctgaaggagtgggtgcagaagctcatgatgaccctccggcacccgtcactgccgctgctggagctgcaggagatcatgaccagcgtggcaggccgcatccccgcccctgtggagaagtctgtccgcagggtgatggcccagtatgccagcaacatcacctcggtgctgtgccagttccccagccagcagatagccaccatcctggactgccatgcagccaccctgcagcggaaggctgatcgagaggtcttcttcatcaacacccagagcatcgtgcagttggtccagagataccgcagcgggatccgcggctatatgaaaacagtggtgttggatctcctgagaagatacttgcgtgttgagcaccattttcagcaagcccactacgacaagtgtgtgataaacctcagggagcagttcaagccagacatgtcccaggtgctggactgcatcttctcccacgcacaggtggccaagaagaaccagctggtgatcatgttgatcgatgagctgtgtggcccagacccttccctgtcggacgagctgatctccatcctcaacgagctcactcagctgagcaaaagcgagcactgcaaagtggccctcagagcccggcagatcctgattgcctcccacctcccctcctacgagctgcggcataaccaggtggagtccattttcctgtctgccattgacatgtacggccaccagttctgccccgagaacctcaagaaattaatactttcggaaacaaccatcttcgacgtcctgcctactttcttctatcacgcaaacaaagtcgtgtgcatggcgtccttggaggtttacgtgcggaggggctacatcgcctatgagttaaacagcctgcagcaccggcagctcccggacggcacctgcgtggtagaattccagttcatgctgccgtcctcccacccaaaccggatgaccgtgcccatcagcatcaccaaccctgacctgctgaggcacagcacagagctcttcatggacagcggcttctccccactgtgccagcgcatgggagccatggtagccttcaggagattcgaggacttcaccagaaattttgatgaagtcatctcttgcttcgccaacgtgcccaaagacacccccctcttcagcgaggcccgcacctccctatactccgaggatgactgcaagagcctcagagaagagcccatccacattctgaatgtgtccatccagtgtgcagaccacctggaggatgaggcactggtgccgattttacggacattcgtacagtccaagaaaaatatccttgtggattatggactccgacgaatcacattcttgattgcccaagagaaagaatttcccaagtttttcacattcagagcaagagatgagtttgcagaagatcgcatttaccgtcacttggaacctgccctggccttccagctggaacttaaccggatgcgtaacttcgatctgaccgccgtgccctgtgccaaccacaagatgcacctttacctgggtgctgccaaggtgaaggaaggtgtggaagtgacggaccataggttcttcatccgcgccatcatcaggcactctgacctgatcacaaaggaagcctccttcgaatacctgcagaacgagggtgagcggctgctcctggaggccatggacgagctggaggtggcgttcaataacaccagcgtgcgcaccgactgcaaccacatcttcctcaacttcgtgcccactgtcatcatggaccccttcaagatcgaggagtccgtgcgctacatggttatgcgctacggcagccggctgtggaaactccgtgtgctacaggctgaggtcaagatcaacatccgccagaccaccaccggcagtgccgttcccatccgcctgttcatcaccaatgagtcgggctactacctggacatcagcctctacaaagaagtgactgactccagatctggaaatatcatgtttcactccttcggcaacaagcaagggccccagcacgggatgctgatcaatactccctacgtcaccaaggatctgctccaggccaagcgattccaggcccagaccctgggaaccacctacatctatgacttcccggaaatgttcaggcaggctctctttaaactgtggggctccccagacaagtatcccaaagacatcctgacatacactgaattagtgttggactctcagggccagctggtggagatgaaccgacttcctggtggaaatgaggtgggcatggtggccttcaaaatgaggtttaagacccaggagtacccggaaggacgggatgtgatcgtcatcggcaatgacatcacctttcgcattggatcctttggccctggagaggaccttctgtacctgcgggcatccgagatggcccgggcagagggcattcccaaaatttacgtggcagccaacagtggcgcccgtattggcatggcagaggagatcaaacacatgttccacgtggcttgggtggacccagaagacccccacaaaggatttaaatacctgtacctgactccccaagactacaccagaatcagctccctgaactccgtccactgtaaacacatcgaggaaggaggagagtccagatacatgatcacggatatcatcgggaaggatgatggcttgggcgtggagaatctgaggggctcaggcatgattgctggggagtcctctctggcttacgaagagatcgtcaccattagcttggtgacctgccgagccattgggattggggcctacttggtgaggctgggccagcgagtgatccaggtggagaattcccacatcatcctcacaggagcaagtgctctcaacaaggtcctgggaagagaggtctacacatccaacaaccagctgggtggcgttcagatcatgcattacaatggtgtctcccacatcaccgtgccagatgactttgagggggtttataccatcctggagtggctgtcctatatgccaaaggataatcacagccctgtccctatcatcacacccactgaccccattgacagagaaattgaattcctcccatccagagctccctacgacccccggtggatgcttgcaggaaggcctcacccaactctgaagggaacgtggcagagcggattctttgaccacggcagtttcaaggaaatcatggcaccctgggcgcagaccgtggtgacaggacgagcaaggcttggggggattcccgtgggagtgattgctgtggagacacggactgtggaggtggcagtccctgcagaccctgccaacctggattctgaggccaagataattcagcaggcaggacaggtgtggttcccagactcagcctacaaaaccgcccaggccgtcaaggacttcaaccgggagaagttgcccctgatgatctttgccaactggagggggttctccggtggcatgaaagggtgcctggggacctggagagatgtgtcttggtggaagataagggccatgttgcccatgcacattggggaaggatcagtgtga

SEQ ID NO: 103739 - DNA, 3654 bp, Homo sapiens
  Payload ID: 386
  Gene Symbol: ACACB
  Gene Name: acetyl-CoA carboxylase beta
  ENST ID: ENST00000538526
  CDS Start-End: 1-2578
gatgaccgtgcccatcagcatcaccaaccctgacctgctgaggcacagcacagagctcttcatggacagcggcttctccccactgtgccagcgcatgggagccatggtagccttcaggagattcgaggacttcaccagaaattttgatgaagtcatctcttgcttcgccaacgtgcccaaagacacccccctcttcagcgaggcccgcacctccctatactccgaggatgactgcaagagcctcagagaagagcccatccacattctgaatgtgtccatccagtgtgcagaccacctggaggatgaggcactggtgccgattttacggacattcgtacagtccaagaaaaatatccttgtggattatggactccgacgaatcacattcttgattgcccaagagaaagaatttcccaagtttttcacattcagagcaagagatgagtttgcagaagatcgcatttaccgtcacttggaacctgccctggccttccagctggaacttaaccggatgcgtaacttcgatctgaccgccgtgccctgtgccaaccacaagatgcacctttacctgggtgctgccaaggtgaaggaaggtgtggaagtgacggaccataggttcttcatccgcgccatcatcaggcactctgacctgatcacaaaggaagcctccttcgaatacctgcagaacgagggtgagcggctgctcctggaggccatggacgagctggaggtggcgttcaataacaccagcgtgcgcaccgactgcaaccacatcttcctcaacttcgtgcccactgtcatcatggaccccttcaagatcgaggagtccgtgcgctacatggttatgcgctacggcagccggctgtggaaactccgtgtgctacaggctgaggtcaagatcaacatccgccagaccaccaccggcagtgccgttcccatccgcctgttcatcaccaatgagtcgggctactacctggacatcagcctctacaaagaagtgactgactccagatctggaaatatcatgtttcactccttcggcaacaagcaagggccccagcacgggatgctgatcaatactccctacgtcaccaaggatctgctccaggccaagcgattccaggcccagaccctgggaaccacctacatctatgacttcccggaaatgttcaggcaggctctctttaaactgtggggctccccagacaagtatcccaaagacatcctgacatacactgaattagtgttggactctcagggccagctggtggagatgaaccgacttcctggtggaaatgaggtgggcatggtggccttcaaaatgaggtttaagacccaggagtacccggaaggacgggatgtgatcgtcatcggcaatgacatcacctttcgcattggatcctttggccctggagaggaccttctgtacctgcgggcatccgagatggcccgggcagagggcattcccaaaatttacgtggcagccaacagtggcgcccgtattggcatggcagaggagatcaaacacatgttccacgtggcttgggtggacccagaagacccccacaaaggatttaaatacctgtacctgactccccaagactacaccagaatcagctccctgaactccgtccactgtaaacacatcgaggaaggaggagagtccagatacatgatcacggatatcatcgggaaggatgatggcttgggcgtggagaatctgaggggctcaggcatgattgctggggagtcctctctggcttacgaagagatcgtcaccattagcttggtgacctgccgagccattgggattggggcctacttggtgaggctgggccagcgagtgatccaggtggagaattcccacatcatcctcacaggagcaagtgctctcaacaaggtcctgggaagagaggtctacacatccaacaaccagctgggtggcgttcagatcatgcattacaatggtgtctcccacatcaccgtgccagatgactttgagggggtttataccatcctggagtggctgtcctatatgccaaaggataatcacagccctgtccctatcatcacacccactgaccccattgacagagaaattgaattcctcccatccagagctccctacgacccccggtggatgcttgcaggaaggcctcacccaactctgaagggaacgtggcagagcggattctttgaccacggcagtttcaaggaaatcatggcaccctgggcgcagaccgtggtgacaggacgagcaaggcttggggggattcccgtgggagtgattgctgtggagacacggactgtggaggtggcagtccctgcagaccctgccaacctggattctgaggccaagataattcagcaggcaggacaggtgtggttcccagactcagcctacaaaaccgcccaggccgtcaaggacttcaaccgggagaagttgcccctgatgatctttgccaactggagggggttctccggtggcatgaaagggtgcctggggacctggagagatgtgtcttggtggaagataagggccatgttgcccatgcacattggggaaggatcagtgtgactacatgtatgaccaggtgctgaagtttggagcctacatcgtggacggccttagacaatacaaacagcccatcctgatctatatcccgccctatgcggagctccggggaggctcctgggtggtcatagatgccaccatcaacccgctgtgcatagaaatgtatgcagacaaagagagcaggggtggtgttctggaaccagaggggacagtggagattaagttccgaaagaaagatctgataaagtccatgagaaggatcgatccagcttacaagaagctcatggaacagctaggggaacctgatctctccgacaaggaccgaaaggacctggagggccggctaaaggctcgcgaggacctgctgctccccatctaccaccaggtggcggtgcagttcgccgacttccatgacacacccggccggatgctggagaagggcgtcatatctgacatcctggagtggaagaccgcacgcaccttcctgtattggcgtctgcgccgcctcctcctggaggaccaggtcaagcaggagatcctgcaggccagcggggagctgagtcacgtgcatatccagtccatgctgcgtcgctggttcgtggagacggagggggctgtcaaggcctacttgtgggacaacaaccaggtggttgtgcagtggctggaacagcactggcaggcaggggatggcccgcgctccaccatccgtgagaacatcacgtacctgaagcacgactctgtcctcaagaccatccgaggcctggttgaagaaaaccccgaggtggccgtggactgtgtgatatacctgagccagcacatcagcccagctgagcgggcgcaggtcgttcacctgctgtctaccatggacagcccggcctccacctgaccgtggcccgcccagccactcccgggaccacggcaaaaggaaccacccagacccaccacccgtacaccctcagcagaccctgaagacttgcttttaaacaaagaaaatcctgggcacttctgcagggctgctggttccgagctgacacccgtcttaacaaaaggcccaggagtgcctcttccaaacaaaaaca

SEQ ID NO: 103740 - DNA, 583 bp, Homo sapiens
  Payload ID: 386
  Gene Symbol: ACACB
  Gene Name: acetyl-CoA carboxylase beta
  ENST ID: ENST00000539864
  CDS Start-End: 154-583
cttagtcaccctgtgggcgcctgtcagcctcactcaagaatggagctggtggctgcatccccagtgacgattttctgaatggtcttgcttctttgtctatcttgtctgattttctcctgtctgaccttttcctggttaaaaatctgggggaaaatgacggactccaagccgatcaccaagagtaaatcagaagcaaacctcatcccgagccaggagccctttccagcctctgataactcaggggagacaccgcagagaaatggggagggccacactctgcccaagacacccagccaggccgagccagcctcccacaaaggccccaaagatgccggtcggcggagaaactccctaccaccctcccaccagaagcccccaagaaaccccctttcttccagtgacgcagcaccctccccagagcttcaagccaacgggactgggacacaaggtctggaggccacagataccaatggcctgtcctcctcagccaggccccagggccagcaagctggctccccctccaaagaagacaagaagcaggcaaacatcaagaggcagctgatgaccaacttcatcctgggct

SEQ ID NO: 103741 - DNA, 678 bp, Homo sapiens
  Payload ID: 386
  Gene Symbol: ACACB
  Gene Name: acetyl-CoA carboxylase beta
  ENST ID: ENST00000544726
  CDS Start-End: 213-678
tttcgggatggagcaagcgcagcgcgaagttgggcgcccgccggctgcagcagaaccccgcccgcggcgctctaggactgcatctcggcctccgggtcgcgacctggctgtcctgctgggtcccgggcctcgggtcggcttcaggcggttaaggggtgcatgctctgcacccctgcgggagcccggtgggattggcctgcggggtggtcaacatgagtcctgccaagtgcaagatctgtttccctgatcgcgaagtaaagccgagcatgtcgggactccacctggtgaagaggggacgggaacacaagaagctggacctgcacagagactttaccgtggcttctcccgctgagtttgtcacacgctttgggggggatcgggtcatcgagaaggtgcttattgccaacaacgggattgccgccgtgaagtgcatgcgctccatccgcaggtgggcctatgagatgttccgcaacgagcgggccatccggtttgttgtgatggtgacccccgaggaccttaaggccaacgcagagtacatcaagatggcggatcattacgtccccgtcccaggagggcccaataacaacaactatgccaacgtggagctgattgtggacattgccaagagaatccccgtgcaggcggtgtgggctggctggggccatgcttcagaaaacc

SEQ ID NO: 103742 - DNA, 959 bp, Homo sapiens
  Payload ID: 386
  Gene Symbol: ACACB
  Gene Name: acetyl-CoA carboxylase beta
  ENST ID: ENST00000536440
  CDS Start-End: 1-338
tggtggagatgaaccgacttcctggtggaaatgaggtgggcatggtggccttcaaaatgaggtttaagacccaggagtacccggaaggacgggatgtgatcgtcatcggcaatgacatcacctttcgcattggatcctttggccctggagaggaccttctgtacctgcgggcatccgagatggcccgggcagagggcattcccaaaatttacgtggcagccaacagtggcgcccgtattggcatggcagaggagatcaaacacatgttccacgtggcttgggtggacccagaagacccccacaaaatacatgatcacggatatcatcgggaaggatgatggcttgggcgtggagaatctgaggggctcaggcatgattgctggggagtcctctctggcttacgaagagatcgtcaccattagcttggtgacctgccgagccattgggattggggcctacttggtgaggctgggccagcgagtgatccaggtggagaattcccacatcatcctcacaggagcaagtgctctcaacaaggtgaccaaaaaggggcctgtgcagagtggatccttgggggccaggagtcattttaacattcccattggtctctggtgggggatttttctcaatatgaagccagtttcattcctactgatacaagagctctttttttccaatttgcagctatctgggtccttatgagaaaaaaaaaattagttttaggcaattctggtcgatctaactccctgtattactgacattttaaaacaaattattgaagtgccattacacattgcagaaaattagaaaaggaaccccccaaaaaagtaattttgcagcttctatcattctggtatagttccctctcatcttctgtctttatgtggttaatttatagtgaatatgcagttttgtattctacttttttcactgtattaaaacattttccttgttgaaaa

SEQ ID NO: 103743 - DNA, 1087 bp, Homo sapiens
  Payload ID: 387
  Gene Symbol: ASMT
  Gene Name: acetylserotonin O-methyltransferase
  Uniprot ID: P46597
  ENST ID: ENST00000381229
  CDS Start-End: 37-1074
agaggctccggaagccacggctggattggagacaagatgggatcctcagaggaccaggcctatcgcctccttaatgactacgccaacggcttcatggtgtcccaggttctcttcgccgcctgcgagctgggcgtgtttgaccttctcgccgaggccccagggcccctggacgtggcggcagtggctgcaggtgtgagggccagcgcccatgggacagagctcctgctggacatctgtgtgtccctgaagctgctgaaagtggagacgaggggaggaaaagctttctatcgaaacacagagctgtccagcgactacctgaccacggtcagcccgacgtcacaatgcagcatgctgaagtacatgggcaggaccagctaccggtgctggggccacctggcagacgccgtgagagaaggaaggaaccagtacctggagacgtttggcgttcccgctgaagagctttttacggccatctacaggtccgagggcgagcggctacagttcatgcaagctctgcaggaggtctggagcgtcaacgggagaagcgtgctgaccgcctttgacctgtcagtgttcccacttatgtgtgaccttggtggtggggctggagctctggctaaggaatgcatgtctctgtaccctggatgtaagatcaccgtttttgacatcccagaagtggtgtggacggcaaagcagcacttctcattccaggaggaagaacagattgacttccaggaaggggatttcttcaaagaccctcttccggaagctgatctgtacatcctggccagggtcctccatgactgggcagacggaaagtgctcacacctgctggagaggatctaccacacttgcaagccaggtggtggcattctggtaattgaaagcctcctggatgaagacaggcgaggtcctctgctcacgcagctctactctctgaacatgcttgtgcagacggaagggcaggagaggacccccacccactaccacatgctcctctcttctgctggcttcagagacttccagtttaagaaaacaggagccatttatgatgccattttagccaggaaataactgtttcttgtga

SEQ ID NO: 103744 - DNA, 989 bp, Homo sapiens
  Payload ID: 387
  Gene Symbol: ASMT
  Gene Name: acetylserotonin O-methyltransferase
  Uniprot ID: P46597
  ENST ID: ENST00000381233
  CDS Start-End: 26-922
aagccacggctggattggagacaagatgggatcctcagaggaccaggcctatcgcctccttaatgactacgccaacggcttcatggtgtcccaggttctcttcgccgcctgcgagctgggcgtgtttgaccttctcgccgaggccccagggcccctggacgtggcggcagtggctgcaggtgtgagggccagcgcccatgggacagagctcctgctggacatctgtgtgtccctgaagctgctgaaagtggagacgaggggaggaaaagctttctatcgaaacacagagctgtccagcgactacctgaccacggtcagcccgacgtcacaatgcagcatgctgaagtacatgggcaggaccagctaccggtgctggggccacctggcagacgccgtgagagaaggaaggaaccagtacctggagacgtttggcgttcccgctgaagagctttttacggccatctacaggtccgagggcgagcggctacagttcatgcaagctctgcaggaggtctggagcgtcaacgggagaagcgtgctgaccgcctttgacctgtcagtgttcccacttatgtgtgaccttggtggggatttcttcaaagaccctcttccggaagctgatctgtacatcctggccagggtcctccatgactgggcagacggaaagtgctcacacctgctggagaggatctaccacacttgcaagccaggtggtggcattctggtaattgaaagcctcctggatgaagacaggcgaggtcctctgctcacgcagctctactctctgaacatgcttgtgcagacggaagggcaggagaggacccccacccactaccacatgctcctctcttctgctggcttcagagacttccagtttaagaaaacaggagccatttatgatgccattttagccaggaaataactgtttcttgtgacctggaactaacgtcaaagcacacaagacataataataaagacatgtacctcca

SEQ ID NO: 103745 - DNA, 1388 bp, Homo sapiens
  Payload ID: 387
  Gene Symbol: ASMT
  Gene Name: acetylserotonin O-methyltransferase
  Uniprot ID: P46597
  ENST ID: ENST00000381241
  CDS Start-End: 200-1321
cacacgctttgtgatcccctaatacggttaatgcaaatttctagagtgatccgtctttgtttgagtactgggcaggcagcagggagagtcaggcagcagctgtgagcgggtggctcttccccaccttgccagcaggctctgtgctccttgaagcaagcgctccagaggctccggaagccacggctggattggagacaagatgggatcctcagaggaccaggcctatcgcctccttaatgactacgccaacggcttcatggtgtcccaggttctcttcgccgcctgcgagctgggcgtgtttgaccttctcgccgaggccccagggcccctggacgtggcggcagtggctgcaggtgtgagggccagcgcccatgggacagagctcctgctggacatctgtgtgtccctgaagctgctgaaagtggagacgaggggaggaaaagctttctatcgaaacacagagctgtccagcgactacctgaccacggtcagcccgacgtcacaatgcagcatgctgaagtacatgggcaggaccagctaccggtgctggggccacctggcagacgccgtgagagaaggaaggaaccagtacctggagacgtttggcgttcccgctgaagagctttttacggccatctacaggtccgagggcgagcggctacagttcatgcaagctctgcaggaggtctggagcgtcaacgggagaagcgtgctgaccgcctttgacctgtcagtgttcccacttatgtgtgaccttggtgggacatggataaagctggaaaccatcattctcagcaaactatcgcaaggacagaaaaccaaacaccgcgtgttctcactcataggtggggctggagctctggctaaggaatgcatgtctctgtaccctggatgtaagatcaccgtttttgacatcccagaagtggtgtggacggcaaagcagcacttctcattccaggaggaagaacagattgacttccaggaaggggatttcttcaaagaccctcttccggaagctgatctgtacatcctggccagggtcctccatgactgggcagacggaaagtgctcacacctgctggagaggatctaccacacttgcaagccaggtggtggcattctggtaattgaaagcctcctggatgaagacaggcgaggtcctctgctcacgcagctctactctctgaacatgcttgtgcagacggaagggcaggagaggacccccacccactaccacatgctcctctcttctgctggcttcagagacttccagtttaagaaaacaggagccatttatgatgccattttagccaggaaataactgtttcttgtgacctggaactaacgtcaaagcacacaagacataataataaagacatgtacctcca

SEQ ID NO: 103746 - DNA, 442 bp, Homo sapiens
  Payload ID: 387
  Gene Symbol: ASMT
  Gene Name: acetylserotonin O-methyltransferase
  ENST ID: ENST00000432523
  CDS Start-End: 1-375
gattgcaggctgacctcggtgtgcctgccctgtgttccaggggatttcttcaaagaccctcttccggaagctgatctgtacatcctggccagggtcctccatgactgggcagacggaaagtgctcacacctgctggagaggatctaccacacttgcaagccaggtggtggcattctggtaattgaaagcctcctggatgaagacaggcgaggtcctctgctcacgcagctctactctctgaacatgcttgtgcagacggaagggcaggagaggacccccacccactaccacatgctcctctcttctgctggcttcagagacttccagtttaagaaaacaggagccatttatgatgccattttagccaggaaataactgtttcttgtgacctggaactaacgtcaaagcacacaagacataataataaagacatgtacctcca

SEQ ID NO: 103747 - DNA, 2027 bp, Homo sapiens
  Payload ID: 388
  Gene Symbol: ASMTL
  Gene Name: acetylserotonin O-methyltransferase-like
  Uniprot ID: O95671
  ENST ID: ENST00000381317
  CDS Start-End: 34-1899
aagtgcggacgcccggctcccggcgtggacgccatggtgctgtgcccggtgattgggaagctgctgcacaagcgcgtggtgctggccagcgcctccccacgccgtcaggagatcctcagcaacgcgggtctcaggtttgaggtggtcccctccaagtttaaagagaagctggacaaagcctccttcgctactccgtatgggtacgccatggagaccgccaagcagaaggccctggaggtggccaaccggctgtaccagaaagacctgcgggcccccgacgtggtcattggagcggacacgatcgtgacagtcggggggctgattctggagaagccggtggacaagcaggacgcctacaggatgctgtcccggttgagtgggagagaacacagcgtgttcacaggtgtcgcgatcgtccactgctccagcaaagaccatcagctggacaccagggtctcggaattctacgaggaaacgaaggtgaagttctcggagctgtccgaggagctgctctgggaatacgtccacagcggggagcccatggacaaagctggcggctacgggatccaggccctgggcggcatgctggtggagtccgtacacggggactttctgaacgtggtgggattcccgctgaaccacttctgcaagcagctggtgaagctctactacccgccccgtccggaggacctgcggcggagtgtcaagcacgactccatcccggccgcggacaccttcgaagacctcagtgacgtggaggggggcggctcggagcccactcagagggacgcgggcagccgcgatgagaaggccgaggcgggagaggcgggacaggccacggcagaggctgagtgtcacaggactcgggagaccctgcctccgttcccgacacgcctcctggagctgattgagggctttatgctatccaagggcctgctcaccgcttgcaaactgaaggtgttcgatttgttaaaagatgaagcaccccagaaggctgcggatattgccagcaaagtggacgcctctgcgtgtggaatggagaggcttctggacatctgtgctgccatggggctcctggagaagacagagcaaggttacagtaacacagagacagcgaacgtctacctggcatcggatggcgaatactctctgcacggcttcatcatgcacaataatgacctcacatggaacctctttacatacctggagtttgccatccgagagggaacaaaccagcaccacagggcgttggggaagaaggcggaagatctgttccaggatgcgtactaccagagcccggagacgcggctgaggttcatgcgggccatgcacggcatgacgaagctgactgcgtgccaggtggccacggccttcaatctgtcccgcttctcctccgcctgcgacgtgggaggctgcacgggtgcactggcccgagagctggcccgtgagtaccctcgtatgcaggtgactgtgtttgacctcccagacattatcgagctggccgcccacttccaaccccccggaccgcaggcagtgcagatccacttcgcagcaggtgactttttcagggaccccctccccagcgctgagctgtacgtcctgtgccggatcctgcatgactggccagacgacaaagtccacaagttactcagcagggtcgccgagagctgcaagccaggggccggcctgctgctggtggagacgctcctggatgaggagaagagggtggcgcagcgcgccctgatgcagtcactgaacatgctggtgcagactgaaggcaaggagcggagcctgggcgagtatcagtgcttgctggagctgcacggcttccaccaggtgcaggtggtgcacttggggggtgtcctggatgccatcttggccaccaaagtggccccctgaagcccaggcagcatgttcattatagggatgtcctcccccaggctgcaggtggaccgcccggtccccaagtaccataggacagtcacataggagcgtgtagtcgtgactgaataaagaaagcaaaagcc

SEQ ID NO: 103748 - DNA, 2035 bp, Homo sapiens
  Payload ID: 388
  Gene Symbol: ASMTL
  Gene Name: acetylserotonin O-methyltransferase-like
  Uniprot ID: O95671
  ENST ID: ENST00000381333
  CDS Start-End: 90-1907
ctggccgcctgttttttttgcagccgcgctgcgcgcaccgcgggctccgggctcagaagtgcggacgcccggctcccggcgtggacgccatggtgctgtgcccggtgattgggaagctgctgcacaagcgcgtggtgctggccagcgcctccccacgccgtcaggagatcctcagcaacgcgggtctcaggtttgaggtggtcccctccaagtttaaagagaagctggacaaagcctccttcgctactccgtatgggtacgccatggagaccgccaagcagaaggccctggaggtggccaaccggctgtaccagacagtcggggggctgattctggagaagccggtggacaagcaggacgcctacaggatgctgtcccggttgagtgggagagaacacagcgtgttcacaggtgtcgcgatcgtccactgctccagcaaagaccatcagctggacaccagggtctcggaattctacgaggaaacgaaggtgaagttctcggagctgtccgaggagctgctctgggaatacgtccacagcggggagcccatggacaaagctggcggctacgggatccaggccctgggcggcatgctggtggagtccgtacacggggactttctgaacgtggtgggattcccgctgaaccacttctgcaagcagctggtgaagctctactacccgccccgtccggaggacctgcggcggagtgtcaagcacgactccatcccggccgcggacaccttcgaagacctcagtgacgtggaggggggcggctcggagcccactcagagggacgcgggcagccgcgatgagaaggccgaggcgggagaggcgggacaggccacggcagaggctgagtgtcacaggactcgggagaccctgcctccgttcccgacacgcctcctggagctgattgagggctttatgctatccaagggcctgctcaccgcttgcaaactgaaggtgttcgatttgttaaaagatgaagcaccccagaaggctgcggatattgccagcaaagtggacgcctctgcgtgtggaatggagaggcttctggacatctgtgctgccatggggctcctggagaagacagagcaaggttacagtaacacagagacagcgaacgtctacctggcatcggatggcgaatactctctgcacggcttcatcatgcacaataatgacctcacatggaacctctttacatacctggagtttgccatccgagagggaacaaaccagcaccacagggcgttggggaagaaggcggaagatctgttccaggatgcgtactaccagagcccggagacgcggctgaggttcatgcgggccatgcacggcatgacgaagctgactgcgtgccaggtggccacggccttcaatctgtcccgcttctcctccgcctgcgacgtgggaggctgcacgggtgcactggcccgagagctggcccgtgagtaccctcgtatgcaggtgactgtgtttgacctcccagacattatcgagctggccgcccacttccaaccccccggaccgcaggcagtgcagatccacttcgcagcaggtgactttttcagggaccccctccccagcgctgagctgtacgtcctgtgccggatcctgcatgactggccagacgacaaagtccacaagttactcagcagggtcgccgagagctgcaagccaggggccggcctgctgctggtggagacgctcctggatgaggagaagagggtggcgcagcgcgccctgatgcagtcactgaacatgctggtgcagactgaaggcaaggagcggagcctgggcgagtatcagtgcttgctggagctgcacggcttccaccaggtgcaggtggtgcacttggggggtgtcctggatgccatcttggccaccaaagtggccccctgaagcccaggcagcatgttcattatagggatgtcctcccccaggctgcaggtggaccgcccggtccccaagtaccataggacagtcacataggagcgtgtagtcgtgactgaataaagaaagcaaaagcc

SEQ ID NO: 103749 - DNA, 2048 bp, Homo sapiens
  Payload ID: 388
  Gene Symbol: ASMTL
  Gene Name: acetylserotonin O-methyltransferase-like
  Uniprot ID: O95671
  ENST ID: ENST00000534940
  CDS Start-End: 227-1918
atctccactcccctcccaccaggcacgaggacatccccatccccacgccactcgcaccgggtccgcggggaaccccctatctctaccttccccgacgcggctcccacaagacccccatctctgcgccgggcccctccacgtgcggggtctcaggtttgaggtggtcccctccaagtttaaagagaagctggacaaagcctccttcgctactccgtatgggtacgccatggagaccgccaagcagaaggccctggaggtggccaaccggctgtaccagaaagacctgcgggcccccgacgtggtcattggagcggacacgatcgtgacagtcggggggctgattctggagaagccggtggacaagcaggacgcctacaggatgctgtcccggttgagtgggagagaacacagcgtgttcacaggtgtcgcgatcgtccactgctccagcaaagaccatcagctggacaccagggtctcggaattctacgaggaaacgaaggtgaagttctcggagctgtccgaggagctgctctgggaatacgtccacagcggggagcccatggacaaagctggcggctacgggatccaggccctgggcggcatgctggtggagtccgtacacggggactttctgaacgtggtgggattcccgctgaaccacttctgcaagcagctggtgaagctctactacccgccccgtccggaggacctgcggcggagtgtcaagcacgactccatcccggccgcggacaccttcgaagacctcagtgacgtggaggggggcggctcggagcccactcagagggacgcgggcagccgcgatgagaaggccgaggcgggagaggcgggacaggccacggcagaggctgagtgtcacaggactcgggagaccctgcctccgttcccgacacgcctcctggagctgattgagggctttatgctatccaagggcctgctcaccgcttgcaaactgaaggtgttcgatttgttaaaagatgaagcaccccagaaggctgcggatattgccagcaaagtggacgcctctgcgtgtggaatggagaggcttctggacatctgtgctgccatggggctcctggagaagacagagcaaggttacagtaacacagagacagcgaacgtctacctggcatcggatggcgaatactctctgcacggcttcatcatgcacaataatgacctcacatggaacctctttacatacctggagtttgccatccgagagggaacaaaccagcaccacagggcgttggggaagaaggcggaagatctgttccaggatgcgtactaccagagcccggagacgcggctgaggttcatgcgggccatgcacggcatgacgaagctgactgcgtgccaggtggccacggccttcaatctgtcccgcttctcctccgcctgcgacgtgggaggctgcacgggtgcactggcccgagagctggcccgtgagtaccctcgtatgcaggtgactgtgtttgacctcccagacattatcgagctggccgcccacttccaaccccccggaccgcaggcagtgcagatccacttcgcagcaggtgactttttcagggaccccctccccagcgctgagctgtacgtcctgtgccggatcctgcatgactggccagacgacaaagtccacaagttactcagcagggtcgccgagagctgcaagccaggggccggcctgctgctggtggagacgctcctggatgaggagaagagggtggcgcagcgcgccctgatgcagtcactgaacatgctggtgcagactgaaggcaaggagcggagcctgggcgagtatcagtgcttgctggagctgcacggcttccaccaggtgcaggtggtgcacttggggggtgtcctggatgccatcttggccaccaaagtggccccctgaagcccaggcagcatgttcattatagggatgtcctcccccaggctgcaggtggaccgcccggtccccaagtaccataggacagtcacataggagcgtgtagtcgtgactgaataaagaaagcaaaagcctg

SEQ ID NO: 103750 - DNA, 2472 bp, Homo sapiens
  Payload ID: 389
  Gene Symbol: ASCL1
  Gene Name: achaete-scute family bHLH transcription factor 1
  Uniprot ID: P50553
  ENST ID: ENST00000266744
  CDS Start-End: 560-1270
cttctggccagggaacgtggaaggcgcaccgacagggatccggccagggagggcgagtgaaagaaggaaatcagaaaggaagggagttaacaaaataataaaaacagcctgagccacggctggagagaccgagacccggcgcaagagagcgcagccttagtaggagaggaacgcgagacgcggcagagcgcgttcagcactgacttttgctgctgcttctgcttttttttttcttagaaacaagaaggcgccagcggcagcctcacacgcgagcgccacgcgaggctcccgaagccaacccgcgaagggaggaggggagggaggaggaggcggcgtgcagggaggagaaaaagcattttcactttttttgctcccactctaagaagtctcccggggattttgtatatattttttaacttccgtcagggctcccgcttcatatttccttttctttccctctctgttcctgcacccaagttctctctgtgtccccctcgcgggccccgcacctcgcgtcccggatcgctctgattccgcgactccttggccgccgctgcgcatggaaagctctgccaagatggagagcggcggcgccggccagcagccccagccgcagccccagcagcccttcctgccgcccgcagcctgtttctttgccacggccgcagccgcggcggccgcagccgccgcagcggcagcgcagagcgcgcagcagcagcagcagcagcagcagcagcagcagcaggcgccgcagctgagaccggcggccgacggccagccctcagggggcggtcacaagtcagcgcccaagcaagtcaagcgacagcgctcgtcttcgcccgaactgatgcgctgcaaacgccggctcaacttcagcggctttggctacagcctgccgcagcagcagccggccgccgtggcgcgccgcaacgagcgcgagcgcaaccgcgtcaagttggtcaacctgggctttgccacccttcgggagcacgtccccaacggcgcggccaacaagaagatgagtaaggtggagacactgcgctcggcggtcgagtacatccgcgcgctgcagcagctgctggacgagcatgacgcggtgagcgccgccttccaggcaggcgtcctgtcgcccaccatctcccccaactactccaacgacttgaactccatggccggctcgccggtctcatcctactcgtcggacgagggctcttacgacccgctcagccccgaggagcaggagcttctcgacttcaccaactggttctgaggggctcggcctggtcaggccctggtgcgaatggactttggaagcagggtgatcgcacaacctgcatctttagtgctttcttgtcagtggcgttgggagggggagaaaaggaaaagaaaaaaaaaagaagaagaagaagaaaagagaagaagaaaaaaacgaaaacagtcaaccaaccccatcgccaactaagcgaggcatgcctgagagacatggctttcagaaaacgggaagcgctcagaacagtatctttgcactccaatcattcacggagatatgaagagcaactgggacctgagtcaatgcgcaaaatgcagcttgtgtgcaaaagcagtgggctcctggcagaagggagcagcacacgcgttatagtaactcccatcacctctaacacgcacagctgaaagttcttgctcgggtcccttcacctcctcgccctttcttaaagtgcagttcttagccctctagaaacgagttggtgtctttcgtctcagtagcccccaccccaataagctgtagacattggtttacagtgaaactatgctattctcagccctttgaaactctgcttctcctccagggcccgattcccaaaccccatggcttccctcacactgtcttttctaccattttcattatagaatgcttccaatcttttgtgaattttttattataaaaaatctatttgtatctatcctaaccagttcggggatatattaagatatttttgtacataagagagaaagagagagaaaaatttatagaagttttgtacaaatggtttaaaatgtgtatatcttgatactttaacatgtaatgctattacctctgcatattttagatgtgtagttcaccttacaactgcaattttccctatgtggttttgtaaagaactctcctcataggtgagatcaagaggccaccagttgtacttcagcaccaatgtgtcttactttatagaaatgttgttaatgtattaatgatgttattaaatactgttcaagaagaacaaagtttatgcagctactgtccaaactcaaagtggcagccagttggttttgataggttgccttttggagatttctattactgcctttttttttcttactgttttattacaaacttacaaaaatatgtataaccctgttttatacaaactagtttcgtaataaaactttttcctttttttaaaatgaaaataa

SEQ ID NO: 103751 - DNA, 1852 bp, Homo sapiens
  Payload ID: 390
  Gene Symbol: ASCL2
  Gene Name: achaete-scute family bHLH transcription factor 2
  Uniprot ID: Q99929
  ENST ID: ENST00000331289
  CDS Start-End: 621-1202
ctggcggctcttgggactggcggggctgcgcgcggggttagggtgggggtacgggaaggctcaacccaggacctgcgtaccttgctttgggggcgcactaagcacctgccgggagcagggggcgcaccgggaactcgcagatttcgccagttgggcgcactggggatctgtggactgcgtccgggggatgggctagggggacatgcgcacgctttgggccttacagaatgtgatcgcgcgagggggagggcgaagcgtggcgggagggcgaggcgaaggaaggagggcgtgagaaaggcgacggcggcggcgcggaggagggttatctatacatttaaaaaccagccgcctgcgccgcgcctgcggagacctgggagagtccggccgcacgcgcgggacacgagcgtcccacgctccctggcgcgtacggcctgccaccactaggcctcctatccccgggctccagacgacctaggacgcgtgccctggggagttgcctggcggcgccgtgccagaagcccccttggggcgccacagttttccccgtcgcctccggttcctctgcctgcaccttcctgcggcgcgccgggacctggagcgggcgggtggatgcaggcgcgatggacggcggcacactgcccaggtccgcgccccctgcgccccccgtccctgtcggctgcgctgcccggcggagacccgcgtccccggaactgttgcgctgcagccggcggcggcgaccggccaccgcagagaccggaggcggcgcagcggccgtagcgcggcgcaatgagcgcgagcgcaaccgcgtgaagctggtgaacttgggcttccaggcgctgcggcagcacgtgccgcacggcggcgccagcaagaagctgagcaaggtggagacgctgcgctcagccgtggagtacatccgcgcgctgcagcgcctgctggccgagcacgacgccgtgcgcaacgcgctggcgggagggctgaggccgcaggccgtgcggccgtctgcgccccgcgggccgccagggaccaccccggtcgccgcctcgccctcccgcgcttcttcgtccccgggccgcgggggcagctcggagcccggctccccgcgttccgcctactcgtcggacgacagcggctgcgaaggcgcgctgagtcctgcggagcgcgagctactcgacttctccagctggttagggggctactgagcgccctcgacctatgagcctcagccccggaagccgagcgagcggccggcgcgctcatcgccggggagcccgccaggtggaccggcccgcgctccgcccccagcgagccggggacccacccaccaccccccgcaccgccgacgccgcctcgttcgtccggcccagcctgaccaatgccgcggtggaaacgggcttggagctggccccataagggctggcggcttcctccgacgccgcccctccccacagcttctcgactgcagtggggcggggggcaccaacacttggagatttttccggaggggagaggattttctaagggcacagagaatccattttctacacattaacttgagctgctggagggacactgctggcaaacggagacctatttttgtacaaagaacccttgacctggggcgtaataaagatgacctggacccctgcccccactatctggagttttccatgctggccaagatctggacacgagcagtccctgaggggcggggtccctggcgtgaggcccccgtgacagcccaccctggggtgggtttgtgggcactgctgctctgctagggagaagcctgtgtggggcacacctcttcaagggagcgtgaactttataaataaatcagttctgtttacca

SEQ ID NO: 103752 - DNA, 633 bp, Homo sapiens
  Payload ID: 391
  Gene Symbol: ASCL3
  Gene Name: achaete-scute family bHLH transcription factor 3
  Uniprot ID: Q9NQ33
  ENST ID: ENST00000531618
  CDS Start-End: 51-596
ctatctgaccacattgttaaacttggttatgtttgcaggttaaagaggaaatgatggacaacagaggcaactctagtctacctgacaaacttcctatcttccctgattctgcccgcttgccactgaccaggtccttctatctggagcccatggtcactttccacgtgcacccagaggccccggtgtcatccccttactctgaggagctgccacggctgccttttcccagcgactctcttatcctgggaaattacagtgaaccctgccccttctctttcccgatgccttatccaaattacagagggtgcgagtactcctacgggccagccttcacccggaaaaggaatgagcgggaaaggcagcgggtgaaatgtgtcaatgaaggctacgcccagctccgccatcatctgccagaggagtatttggagaagcgactcagcaaagtggaaaccctcagagctgcgatcaagtacattaactacctgcagtctcttctgtaccctgataaagctgagaccaagaataaccctggaaaagtttcctccatgatagcaaccaccagccaccatgctgaccctatgttcagaattgtttgagttgctgtttccaaatagaaatgaataatatcacaaa

SEQ ID NO: 103753 - DNA, 2260 bp, Homo sapiens
  Payload ID: 392
  Gene Symbol: ASCL4
  Gene Name: achaete-scute family bHLH transcription factor 4
  Uniprot ID: Q6XD76
  ENST ID: ENST00000342331
  CDS Start-End: 832-1353
tatgttggaacataatatgcagacccttatattctttgctacagtctgtatttttcctatacccttcaaacatgcctcattgagtttttaaaagattcggtttggaagaagaaaaacctcaagcctcgccccgggtcttccttgacttgacacattttataaccgcaagagagcagtttttcctttgatgaggctaagaccccagaaatgaaagagcaagtttaagtttgcaaacactctaaaagctccttccattagacctggtcgcgggaaaccacaaaggacagtcaagtgattttcaaggagaaagcctctggtccactttccctccgccgccagatctgcaggttcctgggaggagctcttctcaaatcctgaagattgctaggctcttggcgaacgactcatctcttgaagacctagagtggtggattacaggcattgaaaagcttttggtggctttggaagatgactctggtgtgagctcacctttccaggctgggggaccaggcagaggaaccccctttgttatcttctgaaagaagatcagtggggaagacggggtttgaagtgtggattaggagatcctacgtctttgcctaccacctctgcctaaatcataaaaagatcgaggagtgcaatgaacttcaggaatcatgcaccgtttccctgaagcctgtccaggaacctaacttctggacccagaaacttctgcaaagacagacccactgagccaggcagtctgcaccagcacctctgcttctaagattctgtttcgtcttcttctattgagagattgacctcttgagtgatttgtgtgctttccggcaaatgatggagacgcgtaaaccggcggaacggctggccttgccatactcgctgcgcaccgcgcccctgggcgttccggggaccctgcccggactcccgcggagggaccccctcagggtcgccctgcgtctggacgccgcgtgctgggagtgggcgcgcagcggctgcgcacggggatggcagtacttgcccgtgccgctggacagcgccttcgagcccgccttcctccgcaagcgcaacgagcgcgagcggcagcgggtgcgctgcgtgaacgagggctatgcgcgcctccgagaccacctgccccgggagctggcagacaagcgcctcagcaaagtggagacgctccgcgctgccatcgactacatcaagcacctgcaggagctgctggagcgccaggcctgggggctcgagggcgcggccggcgccgtcccccagcgcagggcggaatgcaacagcgacggggagtccaaggcctcttcggcgccttcgcccagcagcgagcccgaggaggggggcagctagcgagcgcccgaactggccaggacccccgcgcccgccgcacagcgcgcagccgggcgctcaacctaaggtcctcttcgaaggtggtttgcattcttaatctggcatcttctccaggcctaaatcttaagaaaaagaaatgggtgctggggtttgggggatgggggagttgttttgacatttgggaatttctcccctgcccttattggttacgtgcctgcaacttataggtgcttattaaggagactcttttcctatacttctaaaatgcaaactgtttcagattctgagcacctcattgtaaatacgattattctaaaaactcaaagggcgagaacaactggaatttcccaccttccgtggtgtgggtaaatggtatacataaacattaaaccttaaccaaagaagaactttaccgccaccaaaacagaaacaaccccaaacagccaaaaacagtccttaaaaatgagaggaacattttcttgcattccttccttcgggaattgtattcaaaatgtaatggaaagtaattgttgacctcctgctttgggtgaaggagactgtaagctggtacttgagaacgaatttgccagcatgtgctgttgttgactgtgtgaatgatggtgccagggaatccgtggcttggtacacactgtttcatccagtggccacgtggaagctttgtagcattgagcagatagtaaaatatcttagaattaatgatctctttggaagagagcccagatttgtatgaaaacttgtttttcctctcaattgttttgtccactgttttcttcattttccttttctctgcataccccccgccccccaacgtgtagctctccatctaagttttggataaactgaagtggcactgtgactttaaaaataaaaaagaaatctacttgga

SEQ ID NO: 103754 - DNA, 1420 bp, Homo sapiens
  Payload ID: 393
  Gene Symbol: ASCL5
  Gene Name: achaete-scute family bHLH transcription factor 5
  Uniprot ID: Q7RTU5
  ENST ID: ENST00000458416
  CDS Start-End: 1-621
atgaacaataacttctgccgggctctggtggaccggaggcctctggggccccccagctgcatgcagctgggcgtcatgccccctccccggcaggcgcccctgccccccgccgagcccctgggcaacgtgcccttcctgctgtacccgggcccagcagagccgccctactacgacgcctatgcgggggtgttcccctacgtgcccttccccggcgccttcggggtctacgaataccccttcgagccagccttcatccagaagcgcaacgagcgcgagaggcagcgagtcaagtgcgtcaacgagggctacgctcgcctccgcggccacctccccggcgccctggctgagaagcgactcagcaaggtggagacgctgcgcgccgccatccgctacataaagtacctgcaagagctgctgagctcggcccccgacggctcgacgccccccgcttcccgcggcctcccgggcaccgggccctgccccgcgccgcccgccaccccccgtcccgaccgccctggcgacggcgaggcccgggcgccctcctccctggtgccggagtcatccgagtcctcctgcttctccccgtcgcctttcttggagtcggaggaatcctggcattgatcgggcctgtggccgcccccggcttggaggatgatccgccggccccgtcccactttcgggagcagcgggaggctgttgggtcacccgcgatgcgccgcaggacggtgactgtaggaggtccgcggcgctcccgtgtctgcgacaccctccctcctccaccagcttggggcggaagtgcagggcagcgggtacgatgggcacgatagagacctaggagctccgtgggtgaagcgaggggcagggcctgggactgctccgggcgtcctgcgtcccctccggggtgcagaggggctccccaggacggtcatccctgggtctggctcccgctcggcctcaggtggctctgctccgtccttccttgccgcaggcgcagtccagtctctgcgagtccccgggatgcgagcccgactttgagccctcggttaccatgccactgctctccaccagatggcctcagatactagcgacttctttgggagcacgcttactcctcgagaaaggaacccagaggaagggatgggaggccagattgctgctggcgctcagcccagaccgaacctacagactcagcagaggcgacctgtgtgccccggtggcgttctctggcttcctgggttgggagggggggttactccctccccgcatcccccccatgaggtcgtctagttttgtcccaggttgggtggggactgtggtttttttccctcagactgtaagccttgggggaggggggcgtgcatataggtacataggcactgcgtcggcaccaaagagctaaataaaaggattgttgaatttt

SEQ ID NO: 103755 - DNA, 2026 bp, Homo sapiens
  Payload ID: 393
  Gene Symbol: ASCL5
  Gene Name: achaete-scute family bHLH transcription factor 5
  ENST ID: ENST00000449188
  CDS Start-End: 607-1227
ctgctgggcaggcgggcagccccggagattccgcagtccccccaggaggttcaagagccactgatcaggataagcgctgccggaggaacaaacccagagagaaatgttcccggggactccctccactgagctggcgcactcctaacagcagccatcagtttggggaccccggacagcccggggatcccgaaggccgcgaggaccaaggaccaggcgctggggtgggtgtggaggacatggagcccgtggtttaggcctgaggtgcccatgttgggtggcagcaagaggcagggtgggcgggtctgtggccatgcccatgggtgctgcggaacggggtgcgggccctcagagttccgcggcgccatgggctggctctgagaaggcgtgcaccgacctcctgagaggggccacacttgtctagggcgatggctcttgttagggagtcattggaagccaccctaaagggcgaaaagaggccctagcaagtcctggtacccaagagctgctgctagcgatgtgacttgccccactggtggagacggtgcagaccccaagccggggccattcggtggaggcctcgctctgggtccagctccacgcggcaccatgaacaataacttctgccgggctctggtggaccggaggcctctggggccccccagctgcatgcagctgggcgtcatgccccctccccggcaggcgcccctgccccccgccgagcccctgggcaacgtgcccttcctgctgtacccgggcccagcagagccgccctactacgacgcctatgcgggggtgttcccctacgtgcccttccccggcgccttcggggtctacgaataccccttcgagccagccttcatccagaagcgcaacgagcgcgagaggcagcgagtcaagtgcgtcaacgagggctacgctcgcctccgcggccacctccccggcgccctggctgagaagcgactcagcaaggtggagacgctgcgcgccgccatccgctacataaagtacctgcaagagctgctgagctcggcccccgacggctcgacgccccccgcttcccgcggcctcccgggcaccgggccctgccccgcgccgcccgccaccccccgtcccgaccgccctggcgacggcgaggcccgggcgccctcctccctggtgccggagtcatccgagtcctcctgcttctccccgtcgcctttcttggagtcggaggaatcctggcattgatcgggcctgtggccgcccccggcttggaggatgatccgccggccccgtcccactttcgggagcagcgggaggctgttgggtcacccgcgatgcgccgcaggacggtgactgtaggaggtccgcggcgctcccgtgtctgcgacaccctccctcctccaccagcttggggcggaagtgcagggcagcgggtacgatgggcacgatagagacctaggagctccgtgggtgaagcgaggggcagggcctgggactgctccgggcgtcctgcgtcccctccggggtgcagaggggctccccaggacggtcatccctgggtctggctcccgctcggcctcaggtggctctgctccgtccttccttgccgcaggcgcagtccagtctctgcgagtccccgggatgcgagcccgactttgagccctcggttaccatgccactgctctccaccagatggcctcagatactagcgacttctttgggagcacgcttactcctcgagaaaggaacccagaggaagggatgggaggccagattgctgctggcgctcagcccagaccgaacctacagactcagcagaggcgacctgtgtgccccggtggcgttctctggcttcctgggttgggagggggggttactccctccccgcatcccccccatgaggtcgtctagttttgtcccaggttgggtggggactgtggtttttttccctcagactgtaagccttgggggaggggggcgtgcatataggtacataggcactgcgtcggcaccaaagagctaaataaaaggattgttgaatttt

SEQ ID NO: 103756 - DNA, 1840 bp, Homo sapiens
  Payload ID: 394
  Gene Symbol: AAAS
  Gene Name: achalasia, adrenocortical insufficiency, alacrimia
  Uniprot ID: Q9NRG9
  ENST ID: ENST00000209873
  CDS Start-End: 167-1807
tttcccgttagtcttttcttcacttccgttgagttccgcctcgccgtttgtcccttgcggtacccgtccgcatacgaatctagcccgggaaccgagttgcgggagtgcggtctgtgccgttccggccaggagtttgccgactgcagacgtcctgcgaaccggcaagatgtgctctctggggttgttccctcctccaccgcctcggggtcaagtcaccctatatgagcacaataacgagctggtgacgggcagtagctatgagagcccgccccccgacttccggggccagtggatcaatcttcctgtcctacaactgacaaaggatcccctaaagacccctggaaggctggaccatggcacaagaactgccttcatccatcaccgggagcaagtgtggaagagatgcatcaacatttggcgtgatgtgggcctttttggggtgctaaatgaaattgcaaactcagaagaagaggtgtttgagtgggtgaagacggcatccggctgggccctggcactctgtcgatgggcctcttccctccatgggtccctgttcccccatctgtctctcaggagcgaagatctgatcgctgaatttgcccaagtcacaaattggtccagctgctgcttgcgtgtctttgcatggcacccccacaccaacaagtttgcagtggccctgctagatgactcagtccgtgtgtataatgccagcagcaccatagtcccctccctgaagcaccggctgcagcgaaatgtggcgtctctggcctggaagccccttagtgcctctgtcttggctgtggcctgccagagctgcattcttatctggaccctggaccctacctccttgtctacccgaccctcttctggctgtgcccaagtgctgtctcaccctgggcatacacctgttaccagcttggcctgggcccccagtggggggcggctgctctcagcttcacccgtggatgctgctatccgggtatgggatgtctcaacagagacctgtgtcccccttccctggttccgaggaggtggggtgaccaacctgctctggtccccagacggcagcaaaatcctggctaccactccttcagctgtctttcgagtctgggaggcccagatgtggacttgtgagaggtggcctactctatcagggcgctgtcagactggctgctggagcccagatggcagccgactgctgttcactgtattgggagagccactgatttactccctgtcttttccagaacgttgtggtgagggaaaggggtgcgttggaggtgcaaagtcagcaacgattgtggcagatctgtctgagacaacaatacagacaccagatggtgaggagaggcttgggggagaggctcactccatggtctgggaccccagtggggaacgtctggctgtgcttatgaaaggaaagccaagggtacaggatggtaaaccagtcatcctcctttttcgcactcgaaacagccctgtgtttgagctccttccctgtggcattatccagggggagccaggagcccagccccagctcatcactttccatccttccttcaacaaaggggccctgctcagtgtgggctggtccacaggccgaattgcccacatcccgctgtactttgtcaatgcccagtttccacgttttagcccagtgcttgggcgggcccaggaaccccctgctgggggtggaggctctattcatgacctgcccctctttactgagacatccccaacctctgccccttgggaccctctcccagggccaccacctgttctgccccactccccacattcccacctctaagaataaataagttttccttttgttttccactca

SEQ ID NO: 103757 - DNA, 1703 bp, Homo sapiens
  Payload ID: 394
  Gene Symbol: AAAS
  Gene Name: achalasia, adrenocortical insufficiency, alacrimia
  Uniprot ID: Q9NRG9
  ENST ID: ENST00000394384
  CDS Start-End: 132-1673
ccgcctcgccgtttgtcccttgcggtacccgtccgcatacgaatctagcccgggaaccgagttgcgggagtgcggtctgtgccgttccggccaggagtttgccgactgcagacgtcctgcgaaccggcaagatgtgctctctggggttgttccctcctccaccgcctcggggtcaagtcaccctatatgagcacaataacgagctggtgacgggcagtagctatgagagcccgccccccgacttccggggccagtggatcaatcttcctgtcctacaactgacaaaggatcccctaaagacccctggaaggctggaccatggcacaagaactgccttcatccatcaccgggagcaagtgtggaagagatgcatcaacatttggcgtgatgtgggcctttttggggtgctaaatgaaattgcaaactcagaagaagaggtgtttgagtgggtgaagacggcatccggctgggccctggcactctgtcgatgggcctcttccctccatgggtccctgttcccccatctgtctctcaggagcgaagatctgatcgctgaatttgcccaagtcacaaattgcaccatagtcccctccctgaagcaccggctgcagcgaaatgtggcgtctctggcctggaagccccttagtgcctctgtcttggctgtggcctgccagagctgcattcttatctggaccctggaccctacctccttgtctacccgaccctcttctggctgtgcccaagtgctgtctcaccctgggcatacacctgttaccagcttggcctgggcccccagtggggggcggctgctctcagcttcacccgtggatgctgctatccgggtatgggatgtctcaacagagacctgtgtcccccttccctggttccgaggaggtggggtgaccaacctgctctggtccccagacggcagcaaaatcctggctaccactccttcagctgtctttcgagtctgggaggcccagatgtggacttgtgagaggtggcctactctatcagggcgctgtcagactggctgctggagcccagatggcagccgactgctgttcactgtattgggagagccactgatttactccctgtcttttccagaacgttgtggtgagggaaaggggtgcgttggaggtgcaaagtcagcaacgattgtggcagatctgtctgagacaacaatacagacaccagatggtgaggagaggcttgggggagaggctcactccatggtctgggaccccagtggggaacgtctggctgtgcttatgaaaggaaagccaagggtacaggatggtaaaccagtcatcctcctttttcgcactcgaaacagccctgtgtttgagctccttccctgtggcattatccagggggagccaggagcccagccccagctcatcactttccatccttccttcaacaaaggggccctgctcagtgtgggctggtccacaggccgaattgcccacatcccgctgtactttgtcaatgcccagtttccacgttttagcccagtgcttgggcgggcccaggaaccccctgctgggggtggaggctctattcatgacctgcccctctttactgagacatccccaacctctgccccttgggaccctctcccagggccaccacctgttctgccccactccccacattcccacctctaagaataaataagttttccttttgttttccac

SEQ ID NO: 103758 - DNA, 1652 bp, Homo sapiens
  Payload ID: 394
  Gene Symbol: AAAS
  Gene Name: achalasia, adrenocortical insufficiency, alacrimia
  ENST ID: ENST00000550286
  CDS Start-End: 355-1623
gtgccaggccagggcgggggcagcgggcggaacagcactgttccttctctccagttcaccttacagggtaagaagcaggcacctaaccgatcattataacctgatggtgaaaatcgaggtttcatcgaaggatgcaagttgcaggccggagtgatttttcctaggggtatctgggtttggatggtgttacgactaagtggatcaatcttcctgtcctacaactgacaaaggatcccctaaagacccctggaaggctggaccatggcacaagaactgccttcatccatcaccgggagcaagtgtggaagagatgcatcaacatttggcgtgatgtgggcctttttggggtgctaaatgaaattgcaaactcagaagaagaggctcaggagcgaagatctgatcgctgaatttgcccaagtcacaaattggtccagctgctgcttgcgtgtctttgcatggcacccccacaccaacaagtttgcagtggccctgctagatgactcagtccgtgtgtataatgccagcagcaccatagtcccctccctgaagcaccggctgcagcgaaatgtggcgtctctggcctggaagccccttagtgcctctgtcttggctgtggcctgccagagctgcattcttatctggaccctggaccctacctccttgtctacccgaccctcttctggctgtgcccaagtgctgtctcaccctgggcatacacctgttaccagcttggcctgggcccccagtggggggcggctgctctcagcttcacccgtggatgctgctatccgggtatgggatgtctcaacagagacctgtgtcccccttccctggttccgaggaggtggggtgaccaacctgctctggtccccagacggcagcaaaatcctggctaccactccttcagctgtctttcgagtctgggaggcccagatgtggacttgtgagaggtggcctactctatcagggcgctgtcagactggctgctggagcccagatggcagccgactgctgttcactgtattgggagagccactgatttactccctgtcttttccagaacgttgtggtgagggaaaggggtgcgttggaggtgcaaagtcagcaacgattgtggcagatctgtctgagacaacaatacagacaccagatggtgaggagaggcttgggggagaggctcactccatggtctgggaccccagtggggaacgtctggctgtgcttatgaaaggaaagccaagggtacaggatggtaaaccagtcatcctcctttttcgcactcgaaacagccctgtgtttgagctccttccctgtggcattatccagggggagccaggagcccagccccagctcatcactttccatccttccttcaacaaaggggccctgctcagtgtgggctggtccacaggccgaattgcccacatcccgctgtactttgtcaatgcccagtttccacgttttagcccagtgcttgggcgggcccaggaaccccctgctgggggtggaggctctattcatgacctgcccctctttactgagacatccccaacctctgccccttgggaccctctcccagggccaccacctgttctgccccactccccacattcccacctctaagaataaataagttttccttttgttttcca

SEQ ID NO: 103759 - DNA, 949 bp, Homo sapiens
  Payload ID: 394
  Gene Symbol: AAAS
  Gene Name: achalasia, adrenocortical insufficiency, alacrimia
  ENST ID: ENST00000547757
  CDS Start-End: 117-949
tcccttgcggtacccgtccgcatacgaatctagcccgggaaccgagttgcgggagtgcggtctgtgccgttccggccaggagtttgccgactgcagacgtcctgcgaaccggcaagatgtgctctctggggttgttccctcctccaccgcctcggggtcaagtcaccctatatgagcacaataacgagctggtgacgggcagtagctatgagagcccgccccccgacttccggggccagtggatcaatcttcctgtcctacaactgacaaaggatcccctaaagacccctggaaggctggaccatggcacaagaactgccttcatccatcaccgggagcaagtgtggaagagatgcatcaacatttggcgtgatgtgggcctttttggggtgctaaatgaaattgcaaactcagaagaagaggtgtttgagtgggtgaagacggcatccggctgggccctggcactctgtcgatgggcctcttccctccatgggtccctgttcccccatctgtctctcaggagcgaagatctgatcgctgaatttgcccaagtcacaaattgcaccatagtcccctccctgaagcaccggctgcagcgaaatgtggcgtctctggcctggaagccccttagtgcctctgtcttggctgtggcctgccagagctgcattcttatctggaccctggaccctacctccttgtctacccgaccctcttctggctgtgcccaagtgctgtctcaccctgggcatacacctgttaccagcttggcctgggcccccagtggggggcggctgctctcagcttcacccgtggatgctgctatccgggtatgggatgtctcaacagagacctgtgtcccccttccctggttccgaggaggtggggtgaccaacctgctctggtccccagacggcagcaaaatcctggctaccactccttcagctgtctt

SEQ ID NO: 103760 - DNA, 1075 bp, Homo sapiens
  Payload ID: 394
  Gene Symbol: AAAS
  Gene Name: achalasia, adrenocortical insufficiency, alacrimia
  ENST ID: ENST00000548931
  CDS Start-End: 1-1075
ccccacaccaacaagtttgcagtggccctgctagatgactcagtccgtgtgtataatgccagcagcaccatagtcccctccctgaagcaccggctgcagcgaaatgtggcgtctctggcctggaagccccttagtgcctctgtcttggctgtggcctgccagagctgcattcttatctggaccctggaccctacctccttgtctacccgaccctcttctggctgtgcccaagtgctgtctcaccctgggcatacacctgttaccagcttggcctgggcccccagtggggggcggctgctctcagcttcacccgtggatgctgctatccgggtatgggatgtctcaacagagacctgtgtcccccttccctggttccgaggaggtggggtgaccaacctgctctggtccccagacggcagcaaaatcctggctaccactccttcagctgtctttcgagtctgggaggcccagatgtggacttgtgagaggtggcctactctatcagggcgctgtcagactggctgctggagcccagatggcagccgactgctgttcactgtattgggagagccactgatttactccctgtcttttccagaacgttgtggtgagggaaaggggtgcgttggaggtgcaaagtcagcaacgattgtggcagatctgtctgagacaacaatacagacaccagatggtgaggagaggcttgggggagaggctcactccatggtctgggaccccagtggggaacgtctggctgtgcttatgaaaggaaagccaagggtacaggatggtaaaccagtcatcctcctttttcgcactcgaaacagccctgtgtttgagctccttccctgggctggtccacaggccgaattgcccacatcccgctgtactttgtcaatgcccagtttccacgttttagcccagtgcttgggcgggcccaggaaccccctgctgggggtggaggctctattcatgacctgcccctctttactgagacatccccaacctctgccccttgggaccctctcccagggccaccacctgttctgccccactccccacattcccacctcta

SEQ ID NO: 103761 - DNA, 1549 bp, Homo sapiens
  Payload ID: 395
  Gene Symbol: ACP1
  Gene Name: acid phosphatase 1, soluble
  Uniprot ID: P24666
  ENST ID: ENST00000272065
  CDS Start-End: 94-570
gcgcaggcgcgcggggcaagagggtggcagtgcgcctgcgccgcgtcggcgtgcggaacgccgcggtgtctcggcgcctctgcgcgcgggaagatggcggaacaggctaccaagtccgtgctgtttgtgtgtctgggtaacatttgtcgatcacccattgcagaagcagttttcaggaaacttgtaaccgatcaaaacatctcagagaattggagggtagacagcgcggcaacttccgggtatgagatagggaacccccctgactaccgagggcagagctgcatgaagaggcacggcattcccatgagccacgttgcccggcagattaccaaagaagattttgccacatttgattatatactatgtatggatgaaagcaatctgagagatttgaatagaaaaagtaatcaagttaaaacctgcaaagctaaaattgaactacttgggagctatgatccacaaaaacaacttattattgaagatccctattatgggaatgactctgactttgagacggtgtaccagcagtgtgtcaggtgctgcagagcgttcttggagaaggcccactgaggcaggttcgtgccctgctgcggccagcctgactagaccccaccctgaggtcctgcatttctcagtcggtgtgtaatcacgttccagggcccaaagcccagctctttgttcagttgacttactgtttcttaccttaaaaagtaattgtagatggaaatcagttgtgtttggcaggagaatcaataaaaatctttgattcagacagcttatggggtattttaagcattcttagactagttgaacatctcactttgccccagttacaaaaatagtagaacaagcaacataaaacaatgaaggaaaacctcacttgaaggcccaggtcaacatctaagcctgttgagacttagataatcgagtctacctcttcagtaggtttgtgtggatggcctggagggcaggtgccctctgctccccagtgctacctctctcttccctagggccttttgtggattgacagtagtcccctccgtaggagctcacagtctagattagaagtgttttaatttctacacacccatagtgcacacttgtatattgaaaagatagggaagagagaaacatttatggaatcagtcgttggcaccttcaatacttcatgatttttgtcgagtttacttcatgaggaggtcagcccattggctcccatctgaaccactttgcctctgaaacttaattacatccagaaagaaggacacttgtatgctagtctatggtcagttgaggaatatgactgtttttatatgcacatgtaacccaaatgtccaatataaattggcttattttttaaaataattttaaaagttgggaaaagtgttattatttggcatgcttaaatattgaataagtattcttcatcagcatttaataaatgtataggcagatgtaaggtaatttctgtgtattttgagataatgtcaaaatcatgaatatttcaaaataaactggggagttataaaaatacaactagagatataaa

SEQ ID NO: 103762 - DNA, 1552 bp, Homo sapiens
  Payload ID: 395
  Gene Symbol: ACP1
  Gene Name: acid phosphatase 1, soluble
  Uniprot ID: P24666
  ENST ID: ENST00000272067
  CDS Start-End: 97-573
actgcgcaggcgcgcggggcaagagggtggcagtgcgcctgcgccgcgtcggcgtgcggaacgccgcggtgtctcggcgcctctgcgcgcgggaagatggcggaacaggctaccaagtccgtgctgtttgtgtgtctgggtaacatttgtcgatcacccattgcagaagcagttttcaggaaacttgtaaccgatcaaaacatctcagagaattgggtcattgacagcggtgctgtttctgactggaacgtgggccggtccccagacccaagagctgtgagctgcctaagaaatcatggcattcacacagcccataaagcaagacagattaccaaagaagattttgccacatttgattatatactatgtatggatgaaagcaatctgagagatttgaatagaaaaagtaatcaagttaaaacctgcaaagctaaaattgaactacttgggagctatgatccacaaaaacaacttattattgaagatccctattatgggaatgactctgactttgagacggtgtaccagcagtgtgtcaggtgctgcagagcgttcttggagaaggcccactgaggcaggttcgtgccctgctgcggccagcctgactagaccccaccctgaggtcctgcatttctcagtcggtgtgtaatcacgttccagggcccaaagcccagctctttgttcagttgacttactgtttcttaccttaaaaagtaattgtagatggaaatcagttgtgtttggcaggagaatcaataaaaatctttgattcagacagcttatggggtattttaagcattcttagactagttgaacatctcactttgccccagttacaaaaatagtagaacaagcaacataaaacaatgaaggaaaacctcacttgaaggcccaggtcaacatctaagcctgttgagacttagataatcgagtctacctcttcagtaggtttgtgtggatggcctggagggcaggtgccctctgctccccagtgctacctctctcttccctagggccttttgtggattgacagtagtcccctccgtaggagctcacagtctagattagaagtgttttaatttctacacacccatagtgcacacttgtatattgaaaagatagggaagagagaaacatttatggaatcagtcgttggcaccttcaatacttcatgatttttgtcgagtttacttcatgaggaggtcagcccattggctcccatctgaaccactttgcctctgaaacttaattacatccagaaagaaggacacttgtatgctagtctatggtcagttgaggaatatgactgtttttatatgcacatgtaacccaaatgtccaatataaattggcttattttttaaaataattttaaaagttgggaaaagtgttattatttggcatgcttaaatattgaataagtattcttcatcagcatttaataaatgtataggcagatgtaaggtaatttctgtgtattttgagataatgtcaaaatcatgaatatttcaaaataaactggggagttataaaaatacaactagagatataaa

SEQ ID NO: 103763 - DNA, 414 bp, Homo sapiens
  Payload ID: 395
  Gene Symbol: ACP1
  Gene Name: acid phosphatase 1, soluble
  ENST ID: ENST00000405364
  CDS Start-End: 47-187
ggcgtgcggaacgccgcggtgtctcggcgcctctgcgcgcgggaagatggcggaacaggctaccaagtccgtgctgtttgtgtgtctgggtaagattttttactgctgtggaaactacagtctctgtgggaaaaaagtaacatttgtcgatcacccattgcagaagcagttttcaggaaacttgtaaccgatcaaaacatctcagagaattggagggtagacagcgcggcaacttccggtgggtcattgacagcggtgctgtttctgactggaacgtgggccggtccccagacccaagagctgtgagctgcctaagaaatcatggcattcacacagcccataaagcaagacagattaccaaagaagattttgccacatttgattatatactatgtatggatgaaagcaatctga

SEQ ID NO: 103764 - DNA, 1149 bp, Homo sapiens
  Payload ID: 395
  Gene Symbol: ACP1
  Gene Name: acid phosphatase 1, soluble
  ENST ID: ENST00000405233
  CDS Start-End: 40-252
ggaacgccgcggtgtctcggcgcctctgcgcgcgggaagatggcggaacaggctaccaagtccgtgctgtttgtgtgtctgggtaacatttgtcgatcacccattgcagaagcagttttcaggaaacttgtaaccgatcaaaacatctcagagaattggagggtagacagcgcggcaacttccggtgggtcattgacagcggtgctgtttctgactggaacgtgggccggtccccagacccaagagctgtgagctgcctaagaaatcatggcattcacacagcccataaagcaagacaggtagacaagctcttgttcaatttctaatatatagagtccagtaacttgagaagtagcgaaaggattaaccagacttgtatattaatgaatgtgtttatttagggtgagcttaaccagctatggtgtgtccattttgtttcacttctggttgcacggtgttgaaagacttgcctgactttggaatttacttattaaaatgcacataaaagctaggtaatttataatgagagagcctgactgtgagctggggctgagcggtgctctgtcttctgttccttcctgcataatttttattaaacatttaggccatagtaatcatcctgctgatattgcaagtttgttgctagaatgaggttatataatatatacaaaaacattttttcaactgtaaagtgccttagtaatatagggtaataccagcaacattatggatatataattatagtctattgggccacacttaagtttggagtctaataaagtcacaatcaaattctgcaatttcaattgaagataaccttgtctttatattatgaattagaagctaaagttgatttttctaagagttctttatttaaatgaagtactctgggactgaccttttcggaaatggaatcttcattggtcaggtgattcaacatttttatacaatttatccatcctcatctcttcaggatttgcataccttgccagtttctactggccattgttgaaaatacatttatttggagaagtccaaagccaaggggctcatggggctgtgaagtccttcttgctgcatcgtcctgtggtagaaggtggaggagtcaagagagtgccccagagtgagtgagagcgagaactagaaaaa

SEQ ID NO: 103765 - DNA, 703 bp, Homo sapiens
  Payload ID: 395
  Gene Symbol: ACP1
  Gene Name: acid phosphatase 1, soluble
  Uniprot ID: P24666
  ENST ID: ENST00000407983
  CDS Start-End: 66-404
agtgcgcctgcgccgcgtcggcgtgcggaacgccgcggtgtctcggcgcctctgcgcgcgggaagatggcggaacaggctaccaagtccgtgctgtttgtgtgtctgggtaacatttgtcgatcacccattgcagaagcagttttcaggaaacttgtaaccgatcaaaacatctcagagaattggagggtagacagcgcggcaacttccgggtatgagatagggaacccccctgactaccgagggcagagctgcatgaagaggcacggcattcccatgagccacgttgcccggcaggtaccgtccttggacttgaagttgtgtgttttgtgtttcagtgggtcattgacagcggtgctgtttctgactggaacgtgggccggtccccagacccaagagctgtgagctgcctaagaaatcatggcattcacacagcccataaagcaagacaggtagacaagctcttgttcaatttctaatatatagagtccagtaacttgagaagtagcgaaaggattaaccagacttgtatattaatgaatgtgtttatttagggtgagcttaaccagctatggtgtgtccattttgtttcacttctggttgcacggtgttgaaagacttgcctgactttggaatttacttattaaaatgcacataaaagctaggtaatttataatgagagagcctgactgtgagctggggct

SEQ ID NO: 103766 - DNA, 546 bp, Homo sapiens
  Payload ID: 395
  Gene Symbol: ACP1
  Gene Name: acid phosphatase 1, soluble
  ENST ID: ENST00000442386
  CDS Start-End: 66-206
agtgcgcctgcgccgcgtcggcgtgcggaacgccgcggtgtctcggcgcctctgcgcgcgggaagatggcggaacaggctaccaagtccgtgctgtttgtgtgtctgggtaagattttttactgctgtggaaactacagtctctgtgggaaaaaagtaacatttgtcgatcacccattgcagaagcagttttcaggaaacttgtaaccgatcaaaacatctcagagaattggagggtagacagcgcggcaacttccgggtatgagatagggaacccccctgactaccgagggcagagctgcatgaagaggcacggcattcccatgagccacgttgcccggcagattaccaaagaagattttgccacatttgattatatactatgtatggatgaaagcaatctgagagatttgaatagaaaaagtaatcaagttaaaacctgcaaagctaaaattgaactacttgggagctatgatccacaaaaacaacttattattgaagatccctattatgggaatgactctgactttgagacggtgtaccagca

SEQ ID NO: 103767 - DNA, 605 bp, Homo sapiens
  Payload ID: 395
  Gene Symbol: ACP1
  Gene Name: acid phosphatase 1, soluble
  ENST ID: ENST00000439645
  CDS Start-End: 50-307
gtcggcgtgcggaacgccgcggtgtctcggcgcctctgcgcgcgggaagatggcggaacaggctaccaagtccgtgctgtttgtgtgtctgggtaacatttgtcgatcacccattgcagaagcagttttcaggaaacttgtaaccgatcaaaacatctcagagaattgggtcattgacagcggtgctgtttctgactggaacgtgggccggtccccagacccaagagctgtgagctgcctaagaaatcatggcattcacacagcccataaagcaagacaggtagacaagctcttgttcaatttctaatatatagagtccagtaacttgagaagtagcgaaaggattaaccagacttgtatattaatgaatgtgtttatttagggtgagcttaaccagctatggtgtgtccattttgtttcacttctggttgcacggtgttgaaagacttgcctgactttggaatttacttattaaaatgcacataaaagctaggtaatttataatgagagagcctgactgtgagctggggctgagcggtgctctgtcttctgttccttcctgcataatttttattaaacatttaggccatagtaatcatcctgct

SEQ ID NO: 103768 - DNA, 689 bp, Homo sapiens
  Payload ID: 395
  Gene Symbol: ACP1
  Gene Name: acid phosphatase 1, soluble
  ENST ID: ENST00000413140
  CDS Start-End: 73-315
gggtggcagtgcgcctgcgccgcgtcggcgtgcggaacgccgcggtgtctcggcgcctctgcgcgcgggaagatggcggaacaggctaccaagtccgtgctgtttgtgtgtctgggtaacatttgtcgatcacccattgcagaagcagttttcaggaaacttgtaaccgatcaaaacatctcagagaattggagggtagacagcgcggcaacttccgggtatgagatagggaacccccctgactaccgagggcagagctgcatgaagaggcacggcattcccatgagccacgttgcccggcagagatttgaatagaaaaagtaatcaagttaaaacctgcaaagctaaaattgaactacttgggagctatgatccacaaaaacaacttattattgaagatccctattatgggaatgactctgactttgagacggtgtaccagcagtgtgtcaggtgctgcagagcgttcttggagaaggcccactgaggcaggttcgtgccctgctgcggccagcctgactagaccccaccctgaggtcctgcatttctcagtcggtgtgtaatcacgttccagggcccaaagcccagctctttgttcagttgacttactgtttcttaccttaaaaagtaattgtagatggaaatcagttgtgtttggcaggagaatcaataaaaatctttgattcaga

SEQ ID NO: 103769 - DNA, 577 bp, Homo sapiens
  Payload ID: 395
  Gene Symbol: ACP1
  Gene Name: acid phosphatase 1, soluble
  ENST ID: ENST00000453390
  CDS Start-End: 1-213
atggcggaacaggctaccaagtccgtgctgtttgtgtgtctgggtaacatttgtcgatcacccattgcagaagcagttttcaggaaacttgtaaccgatcaaaacatctcagagaattggagggtagacagcgcggcaacttccggtgggtcattgacagcggtgctgtttctgactggaacgtgggccggtccccagacccaagagctgtgagctgcctaagaaatcatggcattcacacagcccataaagcaagacagattaccaaagaagattttgccacatttgattatatactatgtatggatgaaagcaatctgagagatttgaatagaaaaagtaatcaagttaaaacctgcaaagctaaaattgaactacttgggagctatgatccacaaaaacaacttattattgaagatccctattatgggaatgactctgactttgagacggtgtaccagcagtgtgtcaggtgctgcagagcgttcttggagaaggcccactgaggcaggttcgtgccctgctgcggccagcctgactagaccccaccctgaggtcctgcatttctcagtcggtg

SEQ ID NO: 103770 - DNA, 2203 bp, Homo sapiens
  Payload ID: 396
  Gene Symbol: ACP2
  Gene Name: acid phosphatase 2, lysosomal
  Uniprot ID: P11117
  ENST ID: ENST00000256997
  CDS Start-End: 118-1389
aagtaagatggcggcgaacgcacttccggcgtgtgtccttacgggtgcgtccgggcggctgcttgcaggtgccacccagcgggttccagcttgtttgctgcatagattacaacggtgatggcgggcaagcggtccggctggagccgggcggctctcctccagctccttctcggcgtgaacctggtggtgatgccgcccacccgggcccggagtctgcgcttcgttaccttgctgtaccgccatggagaccgttcaccagtgaagacatatcccaaggacccctatcaggaagaagaatggccccaggggtttggtcagttaaccaaggaggggatgctacagcactgggaactgggccaggccctgcggcagcgctatcacggcttcctaaacacctcttatcaccggcaagaggtttatgtgcgaagcacagactttgaccggactctcatgagtgctgaggccaacctggctggactcttccctcccaacgggatgcagcgcttcaacccgaacatctcgtggcagcctattcctgtgcacactgtgcccatcactgaggacaggctgctgaagttcccgttgggcccatgtccccgttatgagcagctgcagaacgagacccggcagacaccagagtatcagaatgagagttctcggaatgcacaatttctggacatggtggccaacgagacagggcttacagacctgacactggagaccgtctggaatgtctatgacacactcttctgtgagcaaacgcacgggctgcgcctgccgccctgggcctcaccccaaaccatgcagcgtctcagccggctaaaggacttcagcttccgcttcctcttcggaatctaccagcaggcggagaaggcccggcttcaggggggagtcctgctggctcagataaggaagaacctgaccctaatggcgaccacctcccagctccccaagctgctggtttactctgcgcacgacactaccctggttgccctgcaaatggcactggatgtctacaatggtgaacaagccccctacgcctcctgccacatatttgaactgtaccaggaagattctgggaatttctcagtggagatgtactttcggaacgagagtgacaaggccccctggccgctcagcctgcctggctgccctcaccgctgcccactgcaggacttccttcgcctcacagagcccgtcgtgcccaaggattggcagcaggagtgccagctggcaagcggtcctgcagacacagaggtgattgtggccttggctgtatgtggctccatcctcttcctcctcatagtgctgctcctcaccgtcctcttccggatgcaggcccagcctcctggctaccgccacgtcgcagatggggaggaccacgcctgacaaccactcagcccccttccctccacctcctaggggaggtgggctgggccctcgctcctgactgttgctgctccccagcccatggacaggagatcctgggttgggcctccctctgatgaccccagccagatgagcgagtggggctcagcgtggcccatggtgcctgtcactcagcattcccatgcctgatgtttaccaagtgctgtgttggacactggctttctccaaacaggatttgcctcctccacgctccctacacacctgagatgtaaactggcagtcagtgttcactcaggacctaggattagaaaatggcagagttggtgctggatccaccttgcacttctatcaagccctgttctttttcctccagcctgaagtcttcggcaaatagctcagagggacacggtcttgcctctcagtgcttattttagtgggaaaaacagctaataccaggggtacaaacattggctcccaaggaactggatcacccaacagccagccagccacatttccctgtgtctggctagagccaccattagactcagacagaatgcttcaggaatcgttgtcaccccttcaactggagcaggacggaaggttgtctgtacttgggagggagtagggagtggtgggaagggagttgcttgtcacacgaatcaggaaactgctctccctcagctgggctggggtctccagggacctgagctacatgcaggttgtgagctggaaaagaaagttctagactgtggcccagaatagggctggggcagctcccagagaatgaatagtgctgtttcctattggactgata

SEQ ID NO: 103771 - DNA, 1499 bp, Homo sapiens
  Payload ID: 396
  Gene Symbol: ACP2
  Gene Name: acid phosphatase 2, lysosomal
  ENST ID: ENST00000527256
  CDS Start-End: 31-1206
agcttgtttgctgcatagattacaacggtgatggcgggcaagcggtccggctggagccgggcggctctcctccagctccttctcggcgtgaacctggtggtgatgccgcccacccgggcccggagtctgcgcttcgttaccttggaggggatgctacagcactgggaactgggccaggccctgcggcagcgctatcacggcttcctaaacacctcttatcaccggcaagaggtttatgtgcgaagcacagactttgaccggactctcatgagtgctgaggccaacctggctggactcttccctcccaacgggatgcagcgcttcaacccgaacatctcgtggcagcctattcctgtgcacactgtgcccatcactgaggacaggctgctgaagttcccgttgggcccatgtccccgttatgagcagctgcagaacgagacccggcagacaccagagtatcagaatgagagttctcggaatgcacaatttctggacatggtggccaacgagacagggcttacagacctgacactggagaccgtctggaatgtctatgacacactcttctgtgagcaaacgcacgggctgcgcctgccgccctgggcctcaccccaaaccatgcagcgtctcagccggctaaaggacttcagcttccgcttcctcttcggaatctaccagcaggcggagaaggcccggcttcaggggggagtcctgctggctcagataaggaagaacctgaccctaatggcgaccacctcccagctccccaagctgctggtttactctgcgcacgacactaccctggttgccctgcaaatggcactggatgtctacaatggtgaacaagccccctacgcctcctgccacatatttgaactgtaccaggaagattctgggaatttctcagtggagatgtactttcggaacgagagtgacaaggccccctggccgctcagcctgcctggctgccctcaccgctgcccactgcaggacttccttcgcctcacagagcccgtcgtgcccaaggattggcagcaggagtgccagctggcaagcggtcctgcagacacagaggtgattgtggccttggctgtatgtggctccatcctcttcctcctcatagtgctgctcctcaccgtcctcttccggatgcaggcccagcctcctggctaccgccacgtcgcagatggggaggaccacgcctgacaaccactcagcccccttccctccacctcctaggggaggtgggctgggccctcgctcctgactgttgctgctccccagcccatggacaggagatcctgggttgggcctccctctgatgaccccagccagatgagcgagtggggctcagcgtggcccatggtgcctgtcactcagcattcccatgcctgatgtttaccaagtgctgtgttggacactggctttctccaaacaggatttgcctcctccacgctccctacacacctgagatgtaaactggcagtcagtgttcactc

SEQ ID NO: 103772 - DNA, 1366 bp, Homo sapiens
  Payload ID: 396
  Gene Symbol: ACP2
  Gene Name: acid phosphatase 2, lysosomal
  ENST ID: ENST00000533929
  CDS Start-End: 115-1302
aaaggccagctggtggaggtcgaggatctcgggaaggaacagctggtttaggaggggacgactggcctgggtagttgggaggctggattcaggattgacctggagccctggcttatgggagtcaggatgaccgaatacgtcgggctgtaccgccatggagaccgttcaccagtgaagacatatcccaaggacccctatcaggaagaagaatggccccaggggtttggtcagttaaccaaggaggggatgctacagcactgggaactgggccaggccctgcggcagcgctatcacggcttcctaaacacctcttatcaccggcaagaggtttatgtgcgaagcacagactttgaccggactctcatgagtgctgaggccaacctggctggactcttccctcccaacgggatgcagcgcttcaacccgaacatctcgtggcagcctattcctgtgcacactgtgcccatcactgaggacaggctgctgaagttcccgttgggcccatgtccccgttatgagcagctgcagaacgagacccggcagacaccagagtatcagaatgagagttctcggaatgcacaatttctggacatggtggccaacgagacagggcttacagacctgacactggagaccgtctggaatgtctatgacacactcttctgtgagcaaacgcacgggctgcgcctgccgccctgggcctcaccccaaaccatgcagcgtctcagccggctaaaggacttcagcttccgcttcctcttcggaatctaccagcaggcggagaaggcccggcttcaggggggagtcctgctggctcagataaggaagaacctgaccctaatggcgaccacctcccagctccccaagctgctggtttactctgcgcacgacactaccctggttgccctgcaaatggcactggatgtctacaatggtgaacaagccccctacgcctcctgccacatatttgaactgtaccaggaagattctgggaatttctcagtggagatgtactttcggaacgagagtgacaaggccccctggccgctcagcctgcctggctgccctcaccgctgcccactgcaggacttccttcgcctcacagagcccgtcgtgcccaaggattggcagcaggagtgccagctggcaagcggtcctgcagacacagaggtgattgtggccttggctgtatgtggctccatcctcttcctcctcatagtgctgctcctcaccgtcctcttccggatgcaggcccagcctcctggctaccgccacgtcgcagatggggaggaccacgcctgacaaccactcagcccccttccctccacctcctaggggaggtgggctgggccctcgctcctgactg

SEQ ID NO: 103773 - DNA, 980 bp, Homo sapiens
  Payload ID: 396
  Gene Symbol: ACP2
  Gene Name: acid phosphatase 2, lysosomal
  ENST ID: ENST00000531547
  CDS Start-End: 26-508
gtttgctgcatagattacaacggtgatggcgggcaagcggtccggctggagccgggcggctctcctccagctccttctcggcgtgaacctggtggtgatgccgcccacccgggcccggagtctgcgcttcgttaccttgctgtaccgccatggagaccgttcaccagtgaagacatatcccaaggacccctatcaggaagaagaatggccccaggggtttggtcagttaaccaaggaggggatgctacagcactgggaactgggccaggccctgcggcagcgctatcacggcttcctaaacacctcttatcaccggcaagaggtttatgtgcgaagcacagactttgaccggactctcatgagtgctgaggccaacctggctggactcttccctcccaacgggatgcagcgcttcaacccgaacatctcgtggcagcctattcctgtgcacactgtgcccatcactgaggacaggagcaggactgagaccctgatccatttttcatagcaatttctggacatggtggccaacgagacagggcttacagacctgacactggagaccgtctggaatgtctatgacacactcttctgtgagcaaacgcacgggctgcgcctgccgccctgggcctcaccccaaaccatgcagcgtctcagccggctaaaggacttcagcttccgcttcctcttcggaatctaccagcaggcggagaaggcccggcttcaggggggagtcctgctggctcagataaggaagaacctgaccctaatggcgaccacctcccagctccccaagctgctggtttactctgcgcacgacactaccctggttgccctgcaaatggcactggatgtctacaatggtgaacaagccccctacgcctcctgccacatatttgaactgtaccaggaagattctgggaatttctcagtggagatgtactttcggaacgagagtgacaaggccccctggccgctca

SEQ ID NO: 103774 - DNA, 826 bp, Homo sapiens
  Payload ID: 396
  Gene Symbol: ACP2
  Gene Name: acid phosphatase 2, lysosomal
  ENST ID: ENST00000530453
  CDS Start-End: 17-505
atagattacaacggtgatggcgggcaagcggtccggctggagccgggcggctctcctccagctccttctcggcgtgaacctggtggtgatgccgcccacccgggcccggagtctgcgcttcgttaccttgctgtaccgccatggagaccgttcaccagtgaagacatatcccaaggacccctatcaggaagaagaatggccccaggggtttggtcagttaaccaaggaggggatgctacagcactgggaactgggccaggccctgcggcagcgctatcacggcttcctaaacacctcttatcaccggcaagaggtttatgtgcgaagcacagactttgaccggactctcatgagtgctgaggccaacctggctggactcttccctcccaacgggatgcagcgcttcaacccgaacatctcgtggcagcctattcctgtgcacactgtgcccatcactgaggacaggcaggcccaggtcaccaggacggtagaacacagtgcctgataccgtcacgcccctggggaggtccagggaggctgtgcttgtgaaacacgggaacttccctcatgggtgacagagatcctcagagtgggaaatggtttattaattgtcagcagtccctgctgctctccacccagagctcctttctgctgagtctcactttttgtgcctgagcttcctttcctgtgccctgaagcatccacaccgcctgccatgtctactggttccagcccctctgcctctctcccctctccctccctcacacacacaggcaccttcccactagggaagagagctgccccctggagaggctggcctaggcct

SEQ ID NO: 103775 - DNA, 1457 bp, Homo sapiens
  Payload ID: 396
  Gene Symbol: ACP2
  Gene Name: acid phosphatase 2, lysosomal
  ENST ID: ENST00000531004
  CDS Start-End: 26-481
gtttgctgcatagattacaacggtgatggcgggcaagcggtccggctggagccgggcggctctcctccagctccttctcggcgtgaacctggtggtgatgccgcccacccgggcccggagtctgcgcttcgttaccttgctgtaccgccatggagaccgttcaccagtgaagacatatcccaaggacccctatcaggaagaagaatggccccaggggtttggtcagttaaccaaggaggggatgctacagcactgggaactgggccaggccctgcggcagcgctatcacggcttcctaaacacctcttatcaccggcaagaggtttatgtgcgaagcacagactttgaccggactctcatgagtgctgaggccaacctggctggactcttccctcccaacgggatgcagcgcttcaacccgaacatctcgtggcagcctattcctgtgcacactgtgcccatcactgaggacagggactgagaccctgatccatttttcatagcaatttctggacatggtggccaacgagacagggcttacagacctgacactggagaccgtctggaatgtctatgacacactcttctgtgagcaaacgcacgggctgcgcctgccgccctgggcctcaccccaaaccatgcagcgtctcagccggctaaaggacttcagcttccgcttcctcttcggaatctaccagcaggcggagaaggcccggcttcaggggggagtcctgctggctcagataaggaagaacctgaccctaatggcgaccacctcccagctccccaagctgctggtttactctgcgcacgacactaccctggttgccctgcaaatggcactggatgtctacaatggtgaacaagccccctacgcctcctgccacatatttgaactgtaccaggaagattctgggaatttctcagtggagatgtactttcggaacgagagtgacaaggccccctggccgctcagcctgcctggctgccctcaccgctgcccactgcaggacttccttcgcctcacagagcccgtcgtgcccaaggattggcagcaggagtgccagctggcaagcggtcctgcagacacagaggtgattgtggccttggctgtatgtggctccatcctcttcctcctcatagtgctgctcctcaccgtcctcttccggatgcaggcccagcctcctggctaccgccacgtcgcagatggggaggaccacgcctgacaaccactcagcccccttccctccacctcctaggggaggtgggctgggccctcgctcctgactgttgctgctccccagcccatggacaggagatcctgggttgggcctccctctgatgaccccagccagatgagcgagtggggctcagcgtggcccatggtgcctgtcactcagcattcccatgcctgatgtttaccaagtgctgtgttggacactggctttctccaaaca

SEQ ID NO: 103776 - DNA, 967 bp, Homo sapiens
  Payload ID: 396
  Gene Symbol: ACP2
  Gene Name: acid phosphatase 2, lysosomal
  ENST ID: ENST00000529663
  CDS Start-End: 52-967
aggtgccacccagcgggttccagcttgtttgctgcatagattacaacggtgatggcgggcaagcggtccggctggagccgggcggctctcctccagctccttctcggcgtgaacctggtggtgatgccgcccacccgggcccggagtctgcgcttcgttaccttgctgtaccgccatggagaccgttcaccagtgaagacatatcccaaggacccctatcaggaagaagaatggccccaggggtttggtcagttaaccaaggaggggatgctacagcactgggaactgggccaggccctgcggcagcgctatcacggcttcctaaacacctcttatcaccggcaagaggtttatgtgcgaagcacagactttgaccggactctcatgagtgctgaggccaacctggctggactcttccctcccaacgggatgcagcgcttcaacccgaacatctcgtggcagcctattcctgtgcacactgtgcccatcactgaggacaggcaatttctggacatggtggccaacgagacagggcttacagacctgacactggagaccgtctggaatgtctatgacacactcttctgtgagcaaacgcacgggctgcgcctgccgccctgggcctcaccccaaaccatgcagcgtctcagccggctaaaggacttcagcttccgcttcctcttcggaatctaccagcaggcggagaaggcccggcttcaggggggagtcctgctggctcagataaggaagaacctgaccctaatggcgaccacctcccagctccccaagctgctggtttactctgcgcacgacactaccctggttgccctgcaaatggcactggatgtctacaatggtgaacaagccccctacgcctcctgccacatatttgaactgtaccaggaagattctgggaatttctcagtggagatgtactttcggaacgagagtgacaaggccccctggc

SEQ ID NO: 103777 - DNA, 1719 bp, Homo sapiens
  Payload ID: 396
  Gene Symbol: ACP2
  Gene Name: acid phosphatase 2, lysosomal
  ENST ID: ENST00000529444
  CDS Start-End: 14-1096
gattacaacggtgatggcgggcaagcggtccggctggagccgggcggctctcctccagctccttctcggcgtgaacctggtggtgatgccgcccacccgggcccggagtctgcgcttcgttaccttgctgtaccgccatggagaccgttcaccagtgaagacatatcccaaggacccctatcaggaagaagaatggccccaggggtttggtcagttaaccaaggaggggatgctacagcactgggaactgggccaggccctgcggcagcgctatcacggcttcctaaacacctcttatcaccggcaagaggtttatgtgcgaagcacagactttgaccggactctcatgagtgctgaggccaacctggctggactcttccctcccaacgggatgcagcgcttcaacccgaacatctcgtggcagcctattcctgtgcacactgtgcccatcactgaggacaggcaaacgcacgggctgcgcctgccgccctgggcctcaccccaaaccatgcagcgtctcagccggctaaaggacttcagcttccgcttcctcttcggaatctaccagcaggcggagaaggcccggcttcaggggggagtcctgctggctcagataaggaagaacctgaccctaatggcgaccacctcccagctccccaagctgctggtttactctgcgcacgacactaccctggttgccctgcaaatggcactggatgtctacaatggtgaacaagccccctacgcctcctgccacatatttgaactgtaccaggaagattctgggaatttctcagtggagatgtactttcggaacgagagtgacaaggccccctggccgctcagcctgcctggctgccctcaccgctgcccactgcaggacttccttcgcctcacagagcccgtcgtgcccaaggattggcagcaggagtgccagctggcaagcggtcctgcagacacagaggtgattgtggccttggctgtatgtggctccatcctcttcctcctcatagtgctgctcctcaccgtcctcttccggatgcaggcccagcctcctggctaccgccacgtcgcagatggggaggaccacgcctgacaaccactcagcccccttccctccacctcctaggggaggtgggctgggccctcgctcctgactgttgctgctccccagcccatggacaggagatcctgggttgggcctccctctgatgaccccagccagatgagcgagtggggctcagcgtggcccatggtgcctgtcactcagcattcccatgcctgatgtttaccaagtgctgtgttggacactggctttctccaaacaggatttgcctcctccacgctccctacacacctgagatgtaaactggcagtcagtgttcactcaggacctaggattagaaaatggcagagttggtgctggatccaccttgcacttctatcaagccctgttctttttcctccagcctgaagtcttcggcaaatagctcagagggacacggtcttgcctctcagtgcttattttagtgggaaaaacagctaataccaggggtacaaacattggctcccaaggaactggatcacccaacagccagccagccacatttccctgtgtctggctagagccaccattagactcagacagaatgcttcaggaatcgttgtcaccccttcaactggagcaggacggaaggttgtctgtacttgggagggagt

SEQ ID NO: 103778 - DNA, 1630 bp, Homo sapiens
  Payload ID: 397
  Gene Symbol: ACP5
  Gene Name: acid phosphatase 5, tartrate resistant
  Uniprot ID: P13686
  ENST ID: ENST00000218758
  CDS Start-End: 303-1280
gccggggctcacctgggtcagccctgagccctcgagcagggcggatcggccgctgcctgcttaaagctggggccgccaggagtgcgatcgcctgcggatctgcagctgggcaccggccgcaacgcccgccccgcgacggcagggactgaagggactcctgaatgtccgcgggacgtgtcgcggcggcgcccagcacggaggaggcaggcagggagggaataaaggctcagggaccggcagttctactctagagcccaccagcctctcagagcctccggtgactggcctgtgtctccccctggatggacatgtggacggcgctgctcatcctgcaagccttgttgctaccctccctggctgatggtgccacccctgccctgcgctttgtagccgtgggtgactggggaggggtccccaatgccccattccacacggcccgggaaatggccaatgccaaggagatcgctcggactgtgcagatcctgggtgcagacttcatcctgtctctaggggacaatttttacttcactggtgtgcaagacatcaatgacaagaggttccaggagacctttgaggacgtattctctgaccgctcccttcgcaaagtgccctggtacgtgctagccggaaaccatgaccaccttggcaatgtctctgcccagattgcatactctaagatctccaagcgctggaacttccccagccctttctaccgcctgcacttcaagatcccacagaccaatgtgtctgtggccatttttatgctggacacagtgacactatgtggcaactcagatgacttcctcagccagcagcctgagaggccccgagacgtgaagctggcccgcacacagctgtcctggctcaagaaacagctggcggcggccagggaggactacgtgctggtggctggccactaccccgtgtggtccatagccgagcacgggcctacccactgcctggtcaagcagctacggccactgctggccacatacggggtcactgcctacctgtgcggccacgatcacaatctgcagtacctgcaagatgagaatggcgtgggctacgtgctgagtggggctgggaatttcatggacccctcaaagcggcaccagcgcaaggtccccaacggctatctgcgcttccactatgggactgaagactcactgggtggctttgcctatgtggagatcagctccaaagagatgactgtcacttacatcgaggcctcgggcaagtccctctttaagaccaggctgccgaggcgagccaggccctgaactcccatgactgcccagctctgaggcccgatctccactgttgggtgggtgggccctgccgggaccctgctcacaggcaggcttttcctccaacctgtggcgctgcagcagggcaggaaggggaaacacagctgatgaactgtggtgccacatgacccttgtggcacagatgcccacgtatgtgaaacacacatggacatgtgtcccagccacagtgttatgctctgtggctggctcacctttgctgagttccggggtgcaatgggggagggagggagggaaagcttcctcctaaatcaagcatctttctgttactgatgttcaataaaagaatagttgccaaggctgaa

SEQ ID NO: 103779 - DNA, 1527 bp, Homo sapiens
  Payload ID: 397
  Gene Symbol: ACP5
  Gene Name: acid phosphatase 5, tartrate resistant
  Uniprot ID: P13686
  ENST ID: ENST00000412435
  CDS Start-End: 231-1208
cgccggggctcacctgggtcagccctgagccctcgagcagggcggatcggccgctgcctgcttaaagctggggccgccaggagtgcgatcgcctgcggatctgcagctgggcaccggccgcaacgcccgccccgcgacggcagggaataaaggctcagggaccggcagttctactctagagcccaccagcctctcagagcctccggtgactggcctgtgtctccccctggatggacatgtggacggcgctgctcatcctgcaagccttgttgctaccctccctggctgatggtgccacccctgccctgcgctttgtagccgtgggtgactggggaggggtccccaatgccccattccacacggcccgggaaatggccaatgccaaggagatcgctcggactgtgcagatcctgggtgcagacttcatcctgtctctaggggacaatttttacttcactggtgtgcaagacatcaatgacaagaggttccaggagacctttgaggacgtattctctgaccgctcccttcgcaaagtgccctggtacgtgctagccggaaaccatgaccaccttggcaatgtctctgcccagattgcatactctaagatctccaagcgctggaacttccccagccctttctaccgcctgcacttcaagatcccacagaccaatgtgtctgtggccatttttatgctggacacagtgacactatgtggcaactcagatgacttcctcagccagcagcctgagaggccccgagacgtgaagctggcccgcacacagctgtcctggctcaagaaacagctggcggcggccagggaggactacgtgctggtggctggccactaccccgtgtggtccatagccgagcacgggcctacccactgcctggtcaagcagctacggccactgctggccacatacggggtcactgcctacctgtgcggccacgatcacaatctgcagtacctgcaagatgagaatggcgtgggctacgtgctgagtggggctgggaatttcatggacccctcaaagcggcaccagcgcaaggtccccaacggctatctgcgcttccactatgggactgaagactcactgggtggctttgcctatgtggagatcagctccaaagagatgactgtcacttacatcgaggcctcgggcaagtccctctttaagaccaggctgccgaggcgagccaggccctgaactcccatgactgcccagctctgaggcccgatctccactgttgggtgggtgggccctgccgggaccctgctcacaggcaggcttttcctccaacctgtggcgctgcagcagggcaggaaggggaaacacagctgatgaactgtggtgccacatgacccttgtggcacagatgcccacgtatgtgaaacacacatggacatgtgtcccagccacagtgttatgctctgtggctggctcacctttgctgagttccggggtgcaatgggggagggagggagggaaagcttcctcctaaatcaagcatctttctgttactgat

SEQ ID NO: 103780 - DNA, 1397 bp, Homo sapiens
  Payload ID: 397
  Gene Symbol: ACP5
  Gene Name: acid phosphatase 5, tartrate resistant
  Uniprot ID: P13686
  ENST ID: ENST00000433365
  CDS Start-End: 150-1127
gctcccgggacagccctcggagaaactgcatcatcctcactaatgatccacttcctcctcagggaataaaggctcagggaccggcagttctactctagagcccaccagcctctcagagcctccggtgactggcctgtgtctccccctggatggacatgtggacggcgctgctcatcctgcaagccttgttgctaccctccctggctgatggtgccacccctgccctgcgctttgtagccgtgggtgactggggaggggtccccaatgccccattccacacggcccgggaaatggccaatgccaaggagatcgctcggactgtgcagatcctgggtgcagacttcatcctgtctctaggggacaatttttacttcactggtgtgcaagacatcaatgacaagaggttccaggagacctttgaggacgtattctctgaccgctcccttcgcaaagtgccctggtacgtgctagccggaaaccatgaccaccttggcaatgtctctgcccagattgcatactctaagatctccaagcgctggaacttccccagccctttctaccgcctgcacttcaagatcccacagaccaatgtgtctgtggccatttttatgctggacacagtgacactatgtggcaactcagatgacttcctcagccagcagcctgagaggccccgagacgtgaagctggcccgcacacagctgtcctggctcaagaaacagctggcggcggccagggaggactacgtgctggtggctggccactaccccgtgtggtccatagccgagcacgggcctacccactgcctggtcaagcagctacggccactgctggccacatacggggtcactgcctacctgtgcggccacgatcacaatctgcagtacctgcaagatgagaatggcgtgggctacgtgctgagtggggctgggaatttcatggacccctcaaagcggcaccagcgcaaggtccccaacggctatctgcgcttccactatgggactgaagactcactgggtggctttgcctatgtggagatcagctccaaagagatgactgtcacttacatcgaggcctcgggcaagtccctctttaagaccaggctgccgaggcgagccaggccctgaactcccatgactgcccagctctgaggcccgatctccactgttgggtgggtgggccctgccgggaccctgctcacaggcaggcttttcctccaacctgtggcgctgcagcagggcaggaaggggaaacacagctgatgaactgtggtgccacatgacccttgtggcacagatgcccacgtatgtgaaacacacatggacatgtgtcccagccacagtgttatgctctgtggctggctcacctttgctgagttccggggtgcaatgggggag

SEQ ID NO: 103781 - DNA, 581 bp, Homo sapiens
  Payload ID: 397
  Gene Symbol: ACP5
  Gene Name: acid phosphatase 5, tartrate resistant
  ENST ID: ENST00000591319
  CDS Start-End: 424-581
aggccgaggcgcccgccctccccgccggggctcacctgggtcagccctgagccctcgagcagggcggatcggccgctgcctgcttaaagctggggccgccaggagtgcgatcgcctgcggatctgcagctgggcaccggccgcaacgcccgccccgcgacggcagggattcccacccagtgccacgtgagaacacaggcgtgcatcgcagacaagccacacaggcctcgcaggctcagcatacatgtctgcagcaacaccatcaggtacagagccgaggcccaggtaggcatgctcagctgcacgcaggaagcaagacacacccagacacacacagggaataaaggctcagggaccggcagttctactctagagcccaccagcctctcagagcctccggtgactggcctgtgtctccccctggatggacatgtggacggcgctgctcatcctgcaagccttgttgctaccctccctggctgatggtgccacccctgccctgcgctttgtagccgtgggtgactggggaggggtccccaatgccccattccacacggcccgggaaatggccaatgccaagga

SEQ ID NO: 103782 - DNA, 583 bp, Homo sapiens
  Payload ID: 397
  Gene Symbol: ACP5
  Gene Name: acid phosphatase 5, tartrate resistant
  ENST ID: ENST00000590832
  CDS Start-End: 211-583
tcgccctctcacagaccgcgccccccttccctaagccagcttgtgcagccttgtgcagcttgtgtgtcctgagaattagggcaccaaggggttcccgcaggggcagcctgcagcaagcagtctccctctatctcagggcaggcgggggtctcaaggcctccctgcccttgtcacagcccgggccacctatgcttgtctctcttctcccagatggacatgtggacggcgctgctcatcctgcaagccttgttgctaccctccctggctgatggtgccacccctgccctgcgctttgtagccgtgggtgactggggaggggtccccaatgccccattccacacggcccgggaaatggccaatgccaaggagatcgctcggactgtgcagatcctgggtgcagacttcatcctgtctctaggggacaatttttacttcactggtgtgcaagacatcaatgacaagaggttccaggagacctttgaggacgtattctctgaccgctcccttcgcaaagtgccctggtacgtgctagccggaaaccatgaccaccttggcaatgtctctgcccagattgcatactcta

SEQ ID NO: 103783 - DNA, 803 bp, Homo sapiens
  Payload ID: 397
  Gene Symbol: ACP5
  Gene Name: acid phosphatase 5, tartrate resistant
  ENST ID: ENST00000592659
  CDS Start-End: 787-803
tcgagcagggcggatcggccgctgcctgcttaaagctggggccgccaggagtgcgatcgcctgcggatctgcagctgggcaccggccgcaacgcccgccccgcgacggcagggactgaagggactcctgaatgtccgcgggacgtgtcgcggcggcgcccagcacggaggaggcaggcagggagggattcccacccagtgccacgtgagaacacaggcgtgcatcgcagacaagccacacaggcctcgcaggctcagcatacatgtctgcagcaacaccatcaggtacagagccgaggcccaggtaggcatgctcagctgcacgcaggaagcaagacacacccagacacacacaggtaagcccttactcagagaaagaaggtgcaggagatgtgtcttgggtaatcacagccacagcctctcaagtgtgcacacacacacacactcacactgagatacacagacacacagagatacctggacgtgtcaagcctacagcacaaacaggcccctgcaggtccacccggaggctgtgtgggccgaggctgctgcacacgtgtgcccagatcctcccacccccaccccaatcccgtgtcctgctccagggaagtccagggctcacatgacccaaggggagggctcccgggacagccctcggagaaactgcatcatcctcactaatgatccacttcctcctcagggaataaaggctcagggaccggcagttctactctagagcccaccagcctctcagagcctccggtgactggcctgtgtctccccctggatggacatgtggacggc

SEQ ID NO: 103784 - DNA, 301 bp, Homo sapiens
  Payload ID: 397
  Gene Symbol: ACP5
  Gene Name: acid phosphatase 5, tartrate resistant
  ENST ID: ENST00000590420
  CDS Start-End: 41-220
ctctcagagcctccggtgactggcctgtgtctccccctggatggacatgtggacggcgctgctcatcctgcaagccttgttgctaccctccctgggaatttcatggacccctcaaagcggcaccagcgcaaggtccccaacggctatctgcgcttccactatgggactgaagactcactgggtggctttgcctatgtggagatcagctccaaagagatgactgtcacttacatcgaggcctcgggcaagtccctctttaagaccaggctgccgaggcgagccaggccctgaactcccatga

SEQ ID NO: 103785 - DNA, 372 bp, Homo sapiens
  Payload ID: 397
  Gene Symbol: ACP5
  Gene Name: acid phosphatase 5, tartrate resistant
  ENST ID: ENST00000589792
  CDS Start-End: 149-372
gcctcgcaggctcagcatacatgtctgcagcaacaccatcaggtacagagccgaggcccagggaataaaggctcagggaccggcagttctactctagagcccaccagcctctcagagcctccggtgactggcctgtgtctccccctggatggacatgtggacggcgctgctcatcctgcaagccttgttgctaccctccctggctgatggtgccacccctgccctgcgctttgtagccgtgggtgactggggaggggtccccaatgccccattccacacggcccgggaaatggccaatgccaaggagatcgctcggactgtgcagatcctgggtgcagacttcatcctgtctctaggggacaatttttactt

SEQ ID NO: 103786 - DNA, 1699 bp, Homo sapiens
  Payload ID: 397
  Gene Symbol: ACP5
  Gene Name: acid phosphatase 5, tartrate resistant
  Uniprot ID: P13686
  ENST ID: ENST00000592828
  CDS Start-End: 404-1381
gctcacctgggtcagccctgagccctcgagcagggcggatcggccgctgcctgcttaaagctggggccgccaggagtgcgatcgcctgcggatctgcagctgggcaccggccgcaacgcccgccccgcgacggcagggctgggaatgggggggaccaagcacttcgcagggtgacccggggagatctgtgagccagtggcctcagcgttgaatgagagctctctcccgggtccgcgctcgcagggactgaagggactcctgaatgtccgcgggacgtgtcgcggcggcgcccagcacggaggaggcaggcagggagggaataaaggctcagggaccggcagttctactctagagcccaccagcctctcagagcctccggtgactggcctgtgtctccccctggatggacatgtggacggcgctgctcatcctgcaagccttgttgctaccctccctggctgatggtgccacccctgccctgcgctttgtagccgtgggtgactggggaggggtccccaatgccccattccacacggcccgggaaatggccaatgccaaggagatcgctcggactgtgcagatcctgggtgcagacttcatcctgtctctaggggacaatttttacttcactggtgtgcaagacatcaatgacaagaggttccaggagacctttgaggacgtattctctgaccgctcccttcgcaaagtgccctggtacgtgctagccggaaaccatgaccaccttggcaatgtctctgcccagattgcatactctaagatctccaagcgctggaacttccccagccctttctaccgcctgcacttcaagatcccacagaccaatgtgtctgtggccatttttatgctggacacagtgacactatgtggcaactcagatgacttcctcagccagcagcctgagaggccccgagacgtgaagctggcccgcacacagctgtcctggctcaagaaacagctggcggcggccagggaggactacgtgctggtggctggccactaccccgtgtggtccatagccgagcacgggcctacccactgcctggtcaagcagctacggccactgctggccacatacggggtcactgcctacctgtgcggccacgatcacaatctgcagtacctgcaagatgagaatggcgtgggctacgtgctgagtggggctgggaatttcatggacccctcaaagcggcaccagcgcaaggtccccaacggctatctgcgcttccactatgggactgaagactcactgggtggctttgcctatgtggagatcagctccaaagagatgactgtcacttacatcgaggcctcgggcaagtccctctttaagaccaggctgccgaggcgagccaggccctgaactcccatgactgcccagctctgaggcccgatctccactgttgggtgggtgggccctgccgggaccctgctcacaggcaggcttttcctccaacctgtggcgctgcagcagggcaggaaggggaaacacagctgatgaactgtggtgccacatgacccttgtggcacagatgcccacgtatgtgaaacacacatggacatgtgtcccagccacagtgttatgctctgtggctggctcacctttgctgagttccggggtgcaatgggggagggagggagggaaagcttcctcctaaatcaagcatctttctgttactga

SEQ ID NO: 103787 - DNA, 1555 bp, Homo sapiens
  Payload ID: 398
  Gene Symbol: ACP6
  Gene Name: acid phosphatase 6, lysophosphatidic
  ENST ID: ENST00000392988
  CDS Start-End: 231-917
aaaactcccagggactcttcgctgctgccacctcttgttctctcccccgttcccactcggggtctccctcagggccgggaggcacagcggtccctgcttgctgaagggctggatgtacgcatccgcaggttcccgcggacttgggggcgcccgctgagccccggcgcccgcagaagacttgtgtttgcctcctgcagcctcaacccggagggcagcgagggcctaccaccatgatcactggtgtgttcagcatgcgcttgtggaccccagtgggcgtcctgacctcgctggcgtactgcctgcaccagcggcgggtggccctggccgagctgcaggaggccgatggccagtgtccggtcgaccgcagcctgctgaagttgaaaatggtgcaggtcgtgtttcgacacggggctcggagtcctctcaagccgctcccgctggaggagcaggggggcatgtttgctgggcagctgaccaaggtgggcatgcagcaaatgtttgccttgggagagagactgaggaagaactatgtggaagacattccctttctttcaccaaccttcaacccacaggaggtctttattcgttccactaacatttttcggaatctggagtccacccgttgtttgctggctgggcttttccagtgtcagaaagaaggacccatcatcatccacactgatgaagcagattcagaagtcttgtatcccaactaccaaagctgctggagcctgaggcagagaaccagaggccggaggcagactgcctctttacagccaggaatctcagaggatttgaaaaaggtgaaggacaggatgggcattgacagtagtgataaagtggacttcttcatcctcctggacaacgtggctgccgagcaggagaagatgggctcctgcaggttccatggaagctgatcagctgccagaatcagtaggtaagaagcatttttttctaaaactacatgtggccctttcaggcacacaacctcccaagctgccccatgctgaagagatttgcaaggatgatcgaacagagagctgtggacacatccttgtacatactgcccaaggaagacaggtgaggggctctcactgctggcatgaagtcacgcttggtcagacatccaagtgtatggggaagaggagttcatcaggcccactcacacctgacagctgatgtctcctcgtgtaaggaggctgaaccccattctgcccacctaccagtaggccctaggtcctcgcacttctacagctgggactggtggcctagtgcttctgttccctgttatgcagaaccaggagccaccaccctcatgactttatcacttgccttttccttttgctttaaggtttaaaggatttgggtggggggagctgaagaaagaatattcatttctgtctttagtcatcatgttacaatttgcaaaccattttcacattctcactgtgaggtgagagagatacctttctccctggctttatagataaagaaactgaggctgggagatattgcctacctggtctaggcccagctagcaagtgatggagccaga

SEQ ID NO: 103788 - DNA, 6923 bp, Homo sapiens
  Payload ID: 398
  Gene Symbol: ACP6
  Gene Name: acid phosphatase 6, lysophosphatidic
  ENST ID: ENST00000583509
  CDS Start-End: 449-1735
ggaggtgggtaggagcttgcttatagaaaagtggaatcgagtagtccttgctggtggagccgctgccgccagggaactcagggccggctcctgttccttcaagagtgctggaggccaaacttgaaatacaagtttaatgttcctcgtcgggcaaaagataaggatccgatctcccccggcccggtgtgcagcaggagcgaccaaccccgacccgggttaaaactcccagggactcttcgctgctgccacctcttgttctctcccccgttcccactcggggtctccctcagggccgggaggcacagcggtccctgcttgctgaagggctggatgtacgcatccgcaggttcccgcggacttgggggcgcccgctgagccccggcgcccgcagaagacttgtgtttgcctcctgcagcctcaacccggagggcagcgagggcctaccaccatgatcactggtgtgttcagcatgcgcttgtggaccccagtgggcgtcctgacctcgctggcgtactgcctgcaccagcggcgggtggccctggccgagctgcaggaggccgatggccagtgtccggtcgaccgcagcctgctgaagttgaaaatggtgcaggtcgtgtttcgacacggggctcggagtcctctcaagccgctcccgctggaggagcaggtagagtggaacccccagctattagaggtcccaccccaaactcagtttgattacacagtcaccaatctagctggtggtccgaaaccatattctccttacgactctcaataccatgagaccaccctgaaggggggcatgtttgctgggcagctgaccaaggtgggcatgcagcaaatgtttgccttgggagagagactgaggaagaactatgtggaagacattccctttctttcaccaaccttcaacccacaggaggtctttattcgttccactaacatttttcggaatctggagtccacccgttgtttgctggctgggcttttccagtgtcagaaagaaggacccatcatcatccacactgatgaagcagattcagaagtcttgtatcccaactaccaaagctgctggagcctgaggcagagaaccagaggccggaggcagactgcctctttacagccaggaatctcagaggatttgaaaaaggtgaaggacaggatgggcattgacagtagtgataaagtggacttcttcatcctcctggacaacgtggctgccgagcaggcacacaacctcccaagctgccccatgctgaagagatttgcaaggatgatcgaacagagagctgtggacacatccttgtacatactgcccaaggaagacagggaaagtcttcagatggcagtaggcccattcctccacatcctagagagcaacctgctgaaagccatggactctgccactgcccccgacaagatcagaaagctgtatctctatgcggctcatgatgtgaccttcataccgctcttaatgaccctggggatttttgaccacaaatggccaccgtttgctgttgacctgaccatggaactttaccagcacctggaatctaaggagtggtttgtgcagctctattaccacgggaaggagcaggtgccgagaggttgccctgatgggctctgcccgctggacatgttcttgaatgccatgtcagtttataccttaagcccagaaaaataccacgcactctgctctcaaactcaggtgatggaagttggaaatgaagagtaactgatttataaaagcaggatgtgttgattttaaaataaagtgcctttatacaatgcctcctgctttgtgtgtttgggaagaggagagagcaaggggtaatgtactttaatataatgtaaggatatttcctttctgtgggtttactaagatttcttcctgaacggaaaaggggtataatattgagaccaaaaggatatttctctattttgtgagttggtttctaaggttagaagcatctttgtgtgacacgggctggggacatcatgaccctgtagaattgtgtcggttttggactttagttcttttctcctatattaatttcacatgtattgagctacctactaagtagtgatcattataaaggtgaaaacactctgccctcaagttgttgcagtccagtgggagaggcagccgagtaaatcagtgatacagtgctgtatgttttatgctgtaataggtatttgaggggctatttgggtatagagaagaaacttcctgctcacatggcaggggatgtggggaacagtcaaggaaggcttctgaaaaagtcctggcctgatctgagtagagaaaggtgggtaggagttaaccaggaaagcaaggatgaaagcgtgttgcgtttagataaaggataggcttcaaggtcagggaacgttgctgggtggtgagatggaaccctgatgtggaggctcagcaggaagaagcaggaaggacactgggcccctggtggttttagttccagaaacaaatgtgggccccagggctctgcaatggtaaggctggaactactcaacataagagctccacctttaactgtgccccctaagagtacctgatgatccccctatctccttgtcaatgttgctgttcttctccagaatctatttcaacccttctctgatttcaaaccaccagtccctttacctctcagagaaaacagcaaccacaaaagcctctccacttcctactatcttaatattgacaacttccagatcagggagctgagatatctcaagctcaggtttctcttctgagcttcagacacttttatccacttggatttcactggcacaaaactttccatgttagaatcaaacccccctcctcccagacctgcttctcccacacacttccctatctgaatgaaagacacctccactctccacccagttgccaaatcagaaatctgtctttgttttctttgtctcacattttcctatgtctaatcagttaagttttatcaatactacctgtttatttctttaatctattcacatatctttatcctcaatcttcagcatccccttcccatcctcagtctgctggttactgtatttcctattttactaagaatctaaaagagatcagaagaaaacttccacatcccccaacacccaaccaccaaatctgctaacccagttgcattggtgcttttatagccttccttcctccctcttactaagaatgaaccaacactattcctatcaaagcccaaccctctagctttacattgactcctagtgtcttttttctggattgtcaatttttttcctgaccaattattctattagcaatacaaatatgctgtaaaatctcttaaacttttttctctgcatctttgaactgctgttctcttttccttctccccttcatagcagaactcctcaaaagagttgctacctctaattcttcccttccagttctctcatgaaccagctacaattaagtattcacccccaccactccatggaaactgctcttgtcaaaatcatcaatagcctttgtgtggtgaatccaatagccagttttcattcttcttactaagcttctcatcagtattcctagactatttccttcactggcttcgacaaatgctttcttggttttcctccaatttctcgactttgttcctgctgaatctacctttttctaatccgtaagtgttggggtgtcccagggcttactccttggaccttttttccaccttttcccctacactcacccactaggtgatctcaagaatttccagtttgaggccgggcgcggtggctcacgcctgtaatcccagcactttgggaggccaaggcaggcagatcacctgaggccaggagttcgagaccagcctggccaacatggcaaaaccctgtctccactaaacctgcctctactaaaaatacaaaaattattatatttttataaaattattataattttataaaattattatatttatggagtacaatgtgatgtaatcccagctactcggaaggctgtatgtgtctatttatggagtacaatgtgcctgtaatcccagctacttgggaggctgaggcaggagaatcacttcaacctaggaggcagaggttgtgctgagccaagatcgtgccattgcactccagcctgggcaacaagagagaaataacatctcaaaaaaaaaaaaagaatttccagttttaaatatttacacaatgtctcctaaatttataccttcaacctagacctttccctgtgaatcccagtctcatttccaacagtctaatcaatgtctctatttggatgtttaagatatacaataggtatcaaacttcccattgtccacaataaactctcaatttccgtgccttttcaaacttactccttccacaggctttcccatctaggtaaatgacaccaccattcaccctgttgctttggccaagaactttagaactgcccttgactcccctctttttctcatatcctacctctactacatcagtaactcctgttgtatctctcttcaaactatatccagaattgaccatgtcccaatacttccattgctactgtcttagtcccagtgtcatcttttacctggattattgtaaaggcctcgtaactagtcttcctgtttctgcccttcccttctctgcccatctattctcaacacagtgttgcttttaaaacaaagtaagatcgtgccactcttctgctctaaattccccattggtttctcatctcaaactaagggccagtcataatgccctcacggtcctatgacatctcactgcaccccagccatactcgccatcttaccattcttcttcttttttgtaataaaaactttttactttctttttagttgacagataataattgcgtatatttatggagtacaatgtgatgttttgatatatgtatgcatgagggaatgattaaatcaagctaattaacatattcatcacttcatctactcatcactttcttgtggtgaaaatgtttcagatatactctttagtagttttcaggtgtacagtcgctgtggtttgagtgcttttgtcttctctaaatttgatgttgacacttagtgcccagtacaatgttactgggaggtggagcctaatggggatgtttaatggattaatgccattataaaaagggcttgcaggaatgggttccttctcttttgcttttctgccatatgatgacaaagtgttcctcctctctggaggatgcagcaacaggcaccatctttgaagcagagagaccaggccctaaccttctggtgccttgatcttggacttctcagcttccagaactgtgagataataaatttctgttcattacaaattaccccatctgtggtattctgttatagcaacacaaaatggactaagacaacagtatactgttatgaactatggtcaccatgctgtgcactagatcacaaaaacttatttctactgtttaactgaaactttgtacattttgactaacatctccctttttcccatcatcccatcccattcttactatcgttgaagatggagtatgccaagtagtcctgagccatgtcctcacctcggggtgagcacctgttgttcctgtgcctggaatgctctcctagacatttgcgtggctagctccctcttttcattcagatctcagctcattgtcatctcagagaggccctccttgccctccttctacctcctgccttaggtatactctgccaccttctgtcatgggctgaattgtgtcccccctaaatccatatgttgacatcttaacccctagtacagtaagtcctcacttgatgctatcaataggctcttggaaatgtcggctttcagtgaaaggacatatagcaggtccttgaataacattgtgttttgttcaacatcgttgccttgtaacactgatgagcaaaacagttggttctctaatatgttgttttacttaaagctacagtttccaagaacctatcaatgatgttgaggactgaatgtacctcaggtgtaatgtatttggagatagggccttttaagaggtaaagtaaatgaggtcatatgggtaggctgtaatccaatatgactggaatccttataagaagaggaaatgaggacacagacacagagggaagatgactatctgcaagtcaaggagagaggcctcagaagaaaccaatgctgctgacaccacgatcttggacttctagcctctagcactgtgaggaaataaatttctgttgtttaagccacctagtctgtgatactttgctacggcaggccctagcaaatgaatacacttgtcttgtctttcccccgccctgtgatatttatcagtgccggatattacatatttgtgtatctatatgcttatttccctgactaaaatggaagctccatgaaggcagatttcctcttgttcactgatgtgtccccagcacctggaatagtgcctagtgcatgccagtgctcagacacttggacatttgaatgacatatcccctctgtcacttctctccggggcccaaggccaccctcctaggttaccacagtggcttcctaatgggccataccctcacttgctttccatcaccccctgagacctggcccctgcatacctctccagcttcacccctcacatatctccctagccagacctatagtatgtttaaaaaaaaaggaaatcgcactcctctggcctctttaccttggcacacatttttccatcacctgacccctgacccacactcccttttcctgtgtaatccaattatctctaggcctcccgtgtttctgtttgtccttcaatagaaggttgtttgtcttgtcttttattgtatttctagaaccaagtgcagagactgtacaaagtggacctcagcaaagatttaccgaatgaataaatgagttcagaacgctga

SEQ ID NO: 103789 - DNA, 1874 bp, Homo sapiens
  Payload ID: 398
  Gene Symbol: ACP6
  Gene Name: acid phosphatase 6, lysophosphatidic
  ENST ID: ENST00000609196
  CDS Start-End: 1-473
cccgttgtttgctggctgggcttttccagtgtcagaaagaaggacccatcatcatccacactgatgaagcagattcagaagtcttgtatcccaactaccaaagctgctggagcctgaggcagagaaccagaggccggaggcagactgcctctttacagccaggaatctcagaggatttgaaaaaggtgaaggacaggatgggcattgacagtagtgataaagtggacttcttcatcctcctggacaacgtggctgccgagcaggcacacaacctcccaagctgccccatgctgaagagatttgcaaggatgatcgaacagagagctgtggacacatccttgtacatactgcccaaggaagacagggaaagtcttcagatggcagtaggcccattcctccacatcctagagagcaacctgctgaaagccatggactctgccactgcccccgacaagatcaggacttgcaggtagcaagcataacaggaatgaagaaaattctagggcttttccagcctcattgacaaggaaaaagcaaactactcttcattgcagtgttgacatttcaaaactggcatttaattatttacatactttcatatattaaggtacatatacatgtgtataagtaaatctgtatgtgtatatgtgtgtataaaagttttcaatagctcgactactcacagctatcctagagaattttaccaaagcccaggagatcttctgcagtttggagaacaaaataaatcacagtaatccaccatcccctgtaatcaaatacattttgactgaacccaataacaatgactcagtttctagcaaggtgccagacgcagcccttgtcttcatttgacgctgagaaccgagcagccagaagccagtactccagagcccgtaaagcaccgccaaaagcgtggccttagatcacagattgattcatggggatgggcaggagtctccagggaaaacagctcatggggtagctgttgagcttctatgtgggaagtgaggaaaatgaaagctcctggaagcttggtaaagatgagaaacaaacatgagctcctggggtctttaataaagagaacttcggctgtagaaaacaaaaagattattgaaaactaaattcaccctcaacactaattaattggacactggatataactgagatttgtaagctgtttctgcccttgaccctggctccagcctctggagaatggaagagtgtggctagcacagagctgcgggtcagcccctcatgagagggagttgctggtctaggtgcaggtgctgaggtatgagaaacccagccgcccagagccacacagcaacacgcccagctggccccggtgaagacatgcagtttcctagggctgggtctctttaacctgttctttggaaccccagggtacccacataattgttcgtggacactaagcaggtattttgcaagagaaatctggtttctttcgtgtttggtgaaataactgaattttcccatgctttaactatgtgtgaggaaataatttctggttcttctgtttattttctctttctatggtcatacatacactcaccgtcttcctctgacagtattgattaccaagcacaattaagcactgagacagaaagttaacagctgaagtggggtcacctataggcagaaaatagattcgtgtctgtttaacagtaacccaaataagaagccatgttaaatagagacaacttttattacaatccttatagcataccttccttttaacattatttttatgatttagctccctccaataggaaatgtttggccacccactggttttgtgctttatatacttattgctttaaatgtgttattaaaatcttaccaccaaattagga

SEQ ID NO: 103790 - DNA, 543 bp, Homo sapiens
  Payload ID: 398
  Gene Symbol: ACP6
  Gene Name: acid phosphatase 6, lysophosphatidic
  ENST ID: ENST00000493129
  CDS Start-End: 115-543
tccttgctggtggagccgctgccgccagggaactcagggccggctcctgttccttcaagactgcaggaggccgatggccagtgtccggtcgaccgcagcctgctgaagttgaaaatggtgcaggtcgtgtttcgacacggggctcggagtcctctcaagccgctcccgctggaggagcaggtagagtggaacccccagctattagaggtcccaccccaaactcagtttgattacacagtcaccaatctagctggtggtccgaaaccatattctccttacgactctcaataccatgagaccaccctgaaggggggcatgtttgctgggcagctgaccaaggtgggcatgcagcaaatgtttgccttgggagagagactgaggaagaactatgtggaagacattccctttctttcaccaaccttcaacccacaggaggtctttattcgttccactaacatttttcggaatctggagtccacccgttgtttgctggctgggcttttccagtgtcagaaagaaggacccatcatcatccacactgat

SEQ ID NO: 103791 - DNA, 885 bp, Homo sapiens
  Payload ID: 398
  Gene Symbol: ACP6
  Gene Name: acid phosphatase 6, lysophosphatidic
  ENST ID: ENST00000620634
  CDS Start-End: 232-465
taaaactcccagggactcttcgctgctgccacctcttgttctctcccccgttcccactcggggtctccctcagggccgggaggcacagcggtccctgcttgctgaagggctggatgtacgcatccgcaggttcccgcggacttgggggcgcccgctgagccccggcgcccgcagaagacttgtgtttgcctcctgcagcctcaacccggagggcagcgagggcctaccaccatgatcactggtgtgttcagcatgcgcttgtggaccccagtgggcgtcctgacctcgctggcgtactgcctgcaccagcggcgggtggccctggccgagctgcaggaggccgatggccagtgtccggtcgaccgcagcctgctgaagttgaaaatggtgcaggtcgtgtttcgacacggggctcggagtcctctcaagccgctcccgctggaggagcagtattcgttccactaacatttttcggaatctggagtccacccgttgtttgctggctgggcttttccagtgtcagaaagaaggacccatcatcatccacactgatgaagcagattcagaagtcttgtatcccaactaccaaagctgctggagcctgaggcagagaaccagaggccggaggcagactgcctctttacagccaggaatctcagaggatttgaaaaaggtgaaggacaggatgggcattgacagtagtgataaagtggacttcttcatcctcctggacaacgtggctgccgagcaggagaagatgggctcctgcaggttccatggaagctgatcagctgccagaatcagtaggtaagaagcatttttttctaaaactacatgtggccctttcaggcacacaacctcccaagctgccccatgctgaagaga

SEQ ID NO: 103792 - DNA, 1258 bp, Homo sapiens
  Payload ID: 398
  Gene Symbol: ACP6
  Gene Name: acid phosphatase 6, lysophosphatidic
  Uniprot ID: Q9NPH0
  ENST ID: ENST00000487562
  CDS Start-End: 1-816
atgatcactggtgtgttcagcatgcgcttgtggaccccagtgggcgtcctgacctcgctggcgtactgcctgcaccagcggcgggtggccctggccgagctgcaggaggccgatggccagtgtccggtcgaccgcagcctgctgaagttgaaaatggtgcaggtcgtgtttcgacacggggctcggagtcctctcaagccgctcccgctggaggagcaggtagagtggaacccccagctattagaggtcccaccccaaactcagtttgattacacagtcaccaatctagctggtggtccgaaaccatattctccttacgactctcaataccatgagaccaccctgaaggggggcatgtttgctgggcagctgaccaaggtgggcatgcagcaaatgtttgccttgggagagagactgaggaagaactatgtggaagacattccctttctttcaccaaccttcaacccacaggaggtctttattcgttccactaacatttttcggaatctggagtccacccgttgtttgctggctgggcttttccagtgtcagaaagaaggacccatcatcatccacactgatgaagcagattcagaagtcttgtatcccaactaccaaagctgctggagcctgaggcagagaaccagaggccggaggcagactgcctctttacagccaggaatctcagaggatttgaaaaaggtgaaggacaggatgggcattgacagtagtgataaagtggacttcttcatcctcctggacaacgtggctgccgagcaggagaagatgggctcctgcaggttccatggaagctgatcagctgccagaatcagtagggaaagtcttcagatggcagtaggcccattcctccacatcctagagagcaacctgctgaaagccatggactctgccactgcccccgacaagatcaggtacctggcacagcaactctgctttgtgcagctaagggccgtgggaacttctggctgtagggagggaacccaaatcttagtgaggcaagaaccaggctgtcagtgaccgaaggtagatgtttaacaggcctcaagtgtcaaagaggttcacaatcttttaacctttcttcctgctgcacccctcctaccatgttttgaaaattttatttttgctttctctctctcttttttttattaattgaagatatgtcaaacagtagccaattatgatgtcacactgatttgatatgataatagtccaaaacaaagataaattgcttaatgga

SEQ ID NO: 103793 - DNA, 562 bp, Homo sapiens
  Payload ID: 398
  Gene Symbol: ACP6
  Gene Name: acid phosphatase 6, lysophosphatidic
  ENST ID: ENST00000611629
  CDS Start-End: 1-499
cgactctcaataccatgagaccaccctgaaggggggcatgtttgctgggcagctgaccaaggtgggcatgcagcaaatgtttgccttgggagagagactgaggaagaactatgtggaagacattccctttctttcaccaaccttcaacccacaggaggtctttattcgttccactaacatttttcggaatctggagtccacccgttgtttgctggctgggcttttccagtgtcagaaagaaggacccatcatcatccacactgatgaagcagattcagaagtcttgtatcccaactaccaaagctgctggagcctgaggcagagaaccagaggccggaggcagactgcctctttacagccaggaatctcagaggatttgaaaaaggtgaaggacaggatgggcattgacagtagtgataaagtggacttcttcatcctcctggacaacgtggctgccgagcaggagaagatgggctcctgcaggttccatggaagctgatcagctgccagaatcagtaggtaagaagcatttttttctaaaactacatgtggccctttcagg

SEQ ID NO: 103794 - DNA, 1783 bp, Homo sapiens
  Payload ID: 399
  Gene Symbol: ACPP
  Gene Name: acid phosphatase, prostate
  Uniprot ID: P15309
  ENST ID: ENST00000351273
  CDS Start-End: 51-1307
gaagtggtagcagttcctcctaactcctgccagaaacagctctcctcaacatgagagctgcacccctcctcctggccagggcagcaagccttagccttggcttcttgtttctgctttttttctggctagaccgaagtgtactagccaaggagttgaagtttgtgactttggtgtttcggcatggagaccgaagtcccattgacacctttcccactgaccccataaaggaatcctcatggccacaaggatttggccaactcacccagctgggcatggagcagcattatgaacttggagagtatataagaaagagatatagaaaattcttgaatgagtcctataaacatgaacaggtttatattcgaagcacagacgttgaccggactttgatgagtgctatgacaaacctggcagccctgtttcccccagaaggtgtcagcatctggaatcctatcctactctggcagcccatcccggtgcacacagttcctctttctgaagatcagttgctatacctgcctttcaggaactgccctcgttttcaagaacttgagagtgagactttgaaatcagaggaattccagaagaggctgcacccttataaggattttatagctaccttgggaaaactttcaggattacatggccaggacctttttggaatttggagtaaagtctacgaccctttatattgtgagagtgttcacaatttcactttaccctcctgggccactgaggacaccatgactaagttgagagaattgtcagaattgtccctcctgtccctctatggaattcacaagcagaaagagaaatctaggctccaagggggtgtcctggtcaatgaaatcctcaatcacatgaagagagcaactcagataccaagctacaaaaaactcatcatgtattctgcgcatgacactactgtgagtggcctacagatggcgctagatgtttacaacggactccttcctccctatgcttcttgccacttgacggaattgtactttgagaagggggagtactttgtggagatgtactatcggaatgagacgcagcacgagccgtatcccctcatgctacctggctgcagccccagctgtcctctggagaggtttgctgagctggttggccctgtgatccctcaagactggtccacggagtgtatgaccacaaacagccatcaagttctaaaggtcatctttgctgttgccttttgcctgatatctgctgtcctaatggtactactgtttatccacattcgccgtggactctgctggcagagagaatcctatgggaacatctgaacagacagctggataagccaggccaacctcctgtgacacagcatctctcagtggtgccgcatctaaaggacaggcttttgccatgtgggcattgccatcctcacaccctgccttttgaatctgcccagagcagggtctgaactcacagtgacccacaggctgctgctggatgaacactcaggctacctaggtcttctcataatggagtggtagtgcaggctgcttgttcagctagaaagaggctgttatgcataggatggttgtattctctgccacagttgtccggagagaaataagaagccaaactccaatcagccttttacctgcaaagagtgaagggtgagaaggtggacaaagacatagattagaaaaatactggatattgggggaagttagactagaagtattattatacagggtgattcttacgaaagaagacccaatcataaattataaataaactttttatttagcta

SEQ ID NO: 103795 - DNA, 3125 bp, Homo sapiens
  Payload ID: 399
  Gene Symbol: ACPP
  Gene Name: acid phosphatase, prostate
  Uniprot ID: P15309
  ENST ID: ENST00000336375
  CDS Start-End: 91-1251
tcaatcccttaattaaatagcttcccctctacaggcttttgaagtggtagcagttcctcctaactcctgccagaaacagctctcctcaacatgagagctgcacccctcctcctggccagggcagcaagccttagccttggcttcttgtttctgctttttttctggctagaccgaagtgtactagccaaggagttgaagtttgtgactttggtgtttcggcatggagaccgaagtcccattgacacctttcccactgaccccataaaggaatcctcatggccacaaggatttggccaactcacccagctgggcatggagcagcattatgaacttggagagtatataagaaagagatatagaaaattcttgaatgagtcctataaacatgaacaggtttatattcgaagcacagacgttgaccggactttgatgagtgctatgacaaacctggcagccctgtttcccccagaaggtgtcagcatctggaatcctatcctactctggcagcccatcccggtgcacacagttcctctttctgaagatcagttgctatacctgcctttcaggaactgccctcgttttcaagaacttgagagtgagactttgaaatcagaggaattccagaagaggctgcacccttataaggattttatagctaccttgggaaaactttcaggattacatggccaggacctttttggaatttggagtaaagtctacgaccctttatattgtgagagtgttcacaatttcactttaccctcctgggccactgaggacaccatgactaagttgagagaattgtcagaattgtccctcctgtccctctatggaattcacaagcagaaagagaaatctaggctccaagggggtgtcctggtcaatgaaatcctcaatcacatgaagagagcaactcagataccaagctacaaaaaactcatcatgtattctgcgcatgacactactgtgagtggcctacagatggcgctagatgtttacaacggactccttcctccctatgcttcttgccacttgacggaattgtactttgagaagggggagtactttgtggagatgtactatcggaatgagacgcagcacgagccgtatcccctcatgctacctggctgcagccccagctgtcctctggagaggtttgctgagctggttggccctgtgatccctcaagactggtccacggagtgtatgaccacaaacagccatcaaggtactgaagacagtacagattagtgtgcacagagatctctgtagaaggagtagctgccctttctcagggcagatgatgctttgagaacatactttggccattacccccagctttgaggaaaatgggctttggatgattattttatgttttagggacccccaacctcaggcaattcctacctcttcacctgaccctgcccccacttgccataaaacttagctaagttttgttttgtttttcagcgttaatgtaaaggggcagcagtgccaaaatataatcagagataaagcttaggtcaaagttcatagagttcccatgaactatatgactggccacacaggatcttttgtatttaaggattctgagattttgcttgagcaggattagataaggctgttctttaaatgtctgaaatggaacagatttcaaaaaaaaaccccacaatctaggatgggaacaaggaaggaaagatgtgaataggctgatgggcaaaaaaccaatttacccatcagttccagccttctctcaaggagaggcaaagaaaggagatacagtggagacatctggaaagttttctccactggaaaactgctactatctgtttttatatttctgttaaaatatatgaggctacagaactaaaaattaaaacctctttgtgtcccttggtcctggaacatttatgttccttttaaagaaacaaaaatcaaactttacagaaagatttgatgtatgtaatacatatagcagctcttgaagtatatatatcatagcaaataagtcatctgatgagaacaagctatttgggcacaacacatcaggaaagagagcaccacgtgatggagtttctctagaagctccagtgataagagatgttgactctaaagttgatttaaggccaggcatggtggtttacgcctataatcccagcattttgggagtccgaggtgggcagatcacttgagctcaggaggtcaagatcagcctgggcaacatggtgaaacctggtctctacataaaatacaaaaacttagatgggcatggtggtgtgtgcctatagtcccactacttgtggggctaaggcaggaggatcacttgagccccggaggtcgaggctacagtgagccaagagtgcactactgtactccagccagggcaagagagcgagaccctgtctcaataaataaataaataaataaataaataaataaataaataaataaaaacaaagttgattaagaaaggaagtataggccaggcacagtggctcacacctgtaatccttgcattttggaaggctgaggcaggaggatcactttaggcctggtgtgttcaagaccagcctggtcaacatagtgagacactgtctctaccaaaaaaaggaaggaagggacacatatcaaactgaaacaaaattagaaatgtaattatgttctaagtgcctccaagttcaaaacttattggaatgttgagagtgtggttacgaaatacgttaggaggacaaaaggaatgtgtaagtctttaatgccgatatcttcagaaaacctaagcaaacttacaggtcctgctgaaactgcccactctgcaagaagaaatcatgatatagctttgccatgtggcagatctacatgtctagagaacactgtgctctattaccattatggataaagatgagatggtttctagagatggtttctactggctgccagaatctagagcaaagccatccccgctcctggttggtcacagaatgactgacaaagacatcgattgatatgcttctttgtgttatttccctcccaagtaaatgtttgtccttgggtccattttctatgcttgtaactgtcttctagcagtgagccaaatgtaaaatagtgaataaagtcattattaggaa

SEQ ID NO: 103796 - DNA, 1242 bp, Homo sapiens
  Payload ID: 399
  Gene Symbol: ACPP
  Gene Name: acid phosphatase, prostate
  Uniprot ID: P15309
  ENST ID: ENST00000475741
  CDS Start-End: 52-1113
tgaagtggtagcagttcctcctaactcctgccagaaacagctctcctcaacatgagagctgcacccctcctcctggccagggcagcaagccttagccttggcttcttgtttctgctttttttctggctagaccgaagtgtactagccaaggagttgaagtttgtgactttggtgtttcggcatggagaccgaagtcccattgacacctttcccactgaccccataaaggaatcctcatggccacaaggatttggccaactcacccagctgggcatggagcagcattatgaacttggagagtatataagaaagagatatagaaaattcttgaatgagtcctataaacatgaacaggtttatattcgaagcacagacgttgaccggactttgatgagtgctatgacaaacctggcagccctgtttcccccagaaggtgtcagcatctggaatcctatcctactctggcagcccatcccggtgcacacagttcctctttctgaagatcaggattttatagctaccttgggaaaactttcaggattacatggccaggacctttttggaatttggagtaaagtctacgaccctttatattgtgagagtgttcacaatttcactttaccctcctgggccactgaggacaccatgactaagttgagagaattgtcagaattgtccctcctgtccctctatggaattcacaagcagaaagagaaatctaggctccaagggggtgtcctggtcaatgaaatcctcaatcacatgaagagagcaactcagataccaagctacaaaaaactcatcatgtattctgcgcatgacactactgtgagtggcctacagatggcgctagatgtttacaacggactccttcctccctatgcttcttgccacttgacggaattgtactttgagaagggggagtactttgtggagatgtactatcggaatgagacgcagcacgagccgtatcccctcatgctacctggctgcagccccagctgtcctctggagaggtttgctgagctggttggccctgtgatccctcaagactggtccacggagtgtatgaccacaaacagccatcaaggtactgaagacagtacagattagtgtgcacagagatctctgtagaaggagtagctgccctttctcagggcagatgatgctttgagaacatactttggccattacccccagctttgaggaaaatgggctttggatgattattttatgttttag

SEQ ID NO: 103797 - DNA, 584 bp, Homo sapiens
  Payload ID: 399
  Gene Symbol: ACPP
  Gene Name: acid phosphatase, prostate
  ENST ID: ENST00000495911
  CDS Start-End: 89-584
aatcccttaattaaatagcttcccctctacaggcttttgaagtggtagcagttcctcctaactcctgccagaaacagctctcctcaacatgagagctgcacccctcctcctggccagggcagcaagccttagccttggcttcttgtttctgctttttttctggctagaccgaagtgtactagccaaggagttgaagtttgtgactttggtgtttcggcatggagaccgaagtcccattgacacctttcccactgaccccataaaggaatcctcatggccacaaggatttggccaactcacccaggtttatattcgaagcacagacgttgaccggactttgatgagtgctatgacaaacctggcagccctgtttcccccagaaggtgtcagcatctggaatcctatcctactctggcagcccatcccggtgcacacagttcctctttctgaagatcagttgctatacctgcctttcaggaactgccctcgttttcaagaacttgagagtgagactttgaaatcagaggaattccagaagaggctgcacccttataaggattttatagctaccttgggaaaacttt

SEQ ID NO: 103798 - DNA, 496 bp, Homo sapiens
  Payload ID: 399
  Gene Symbol: ACPP
  Gene Name: acid phosphatase, prostate
  ENST ID: ENST00000507647
  CDS Start-End: 1-299
cggaattgtactttgagaagggggagtactttgtggagatgtactatcggaatgagacgcagcacgagccgtatcccctcatgctacctggctgcagccccagctgtcctctggagaggtttgctgagctggttggccctgtgatccctcaagactggtccacggagtgtatgaccacaaacagccatcaaggtcctgctgaaactgcccactctgcaagaagaaatcatgatatagctttgccatgtggcagatctacatgtctagagaacactgtgctctattaccattatggataaagatgagatggtttctagagatggtttctactggctgccagaatctagagcaaagccatccccgctcctggttggtcacagaatgactgacaaagacatcgattgatatgcttctttgtgttatttccctcccaagtaaatgtttgtccttgggtccattttctatgcttgtaactgtcttctagcagtgagccaaa

SEQ ID NO: 103799 - DNA, 1347 bp, Homo sapiens
  Payload ID: 400
  Gene Symbol: ACPT
  Gene Name: acid phosphatase, testicular
  Uniprot ID: Q9BZG2
  ENST ID: ENST00000270593
  CDS Start-End: 1-1281
atggccggcctggggttttggggccaccctgctggacctctcctgctgctgctgctgctggtgctgccaccccgggccctgccagaaggacccctggtgttcgtggctctggtattccgccatggcgaccgggccccgctggcctcctaccccatggacccacacaaggaggtggcctccaccctgtggccacgaggcctgggccagctgaccacggagggggtccgccagcagctggagctgggccgcttcctgaggagccgctacgaggccttcctgagtccggagtaccggcgggaggaggtgtacatccgcagcacggactttgaccgcacgctggagagtgcccaggccaaccttgccgggctgtttcccgaggctgctccagggagccccgaggcccgctggaggccgatcccggtgcacacggtgcccgtggctgaggataagctgctgaggttccccatgcgcagctgtccccgataccacgagctgctgcgggaggccaccgaggccgccgagtaccaggaggccctggagggctggacgggcttcctgagtcgcctggagaacttcacgggactgtcgctggttggagagccactgcgcagggcatggaaggttctggacaccctcatgtgccagcaagcccacggtcttccactaccagcctgggcctccccagatgtcctgcggactcttgcccagatctcggctttggatattggagcccacgtgggcccaccccgggcagcagagaaggcccagctgacaggggggatcctgctgaatgctatccttgcaaacttctcccgggtccagcgcctggggctgcccctcaagatggtcatgtactcagctcatgacagcaccctgctggccctccagggggccctgggcctctatgatggacacaccccgccatatgctgcctgcctcggctttgagttccggaagcacctggggaatcccgccaaagatggagggaatgtcaccgtctccctcttctaccgcaatgactccgcccacctgcccctgcctctcagcctccccgggtgcccggccccctgtccactaggccgcttctaccagctgactgccccggcccggcctcccgcccatggggtctcctgccatggcccctatgaggctgccatccccccagctccagtggtgcccctgctggccggagctgtagctgtgctggtggcactcagcttggggctgggcctgctggcctggagaccagggtgcctgcgggccttggggggccccgtgtgagccagaaaccagggcttccctacccccagctgacactggaccccaacatgtatgctcagtagctgc

SEQ ID NO: 103800 - DNA, 4072 bp, Homo sapiens
  Payload ID: 401
  Gene Symbol: ASIC1
  Gene Name: acid sensing (proton gated) ion channel 1
  Uniprot ID: P78348
  ENST ID: ENST00000228468
  CDS Start-End: 386-2110
agacagcctcgcagacactcgtaggcgcgcacgcgcaccctctcccctccccctcccctcccgccgcctcccggccggacgatggatccctgcagatcccagggctgagagcaccgcgcaccgcgccgagcccgggcagaccgagccgaggcgagcgagccagcgagccagcgcgcgcgggcgggcggacagatcggagccgagcggggccgggcggggcgctccctgcagggctctgcgcggcgtgccgcggcggccgcgggctccggccccgggccatgagcccctccgcgactcggcgctgagcccgccaccggtccagcgccccaggacccgccgccggctgccggcttgccgaagccccctcaggatcccctcaacaaggatggaactgaaggccgaggaggaggaggtgggtggcgtccagccggtgagcatccaggccttcgccagcagctccacactgcacggcctggcccacatcttctcctacgagcggctgtctctgaagcgggcactgtgggccctgtgcttcctgggctccctggctgtgctgctgtgtgtgtgcacggagcgtgtgcagtactacttccactaccaccatgtcaccaagctcgacgaggtggctgcctctcagcttaccttccctgctgtcacgctgtgcaacctcaacgagttccgctttagccaagtctccaagaatgacctgtatcatgctggggagctgctggccctgctcaacaacaggtatgagataccagacacacagatggcagatgaaaagcagctggagatactgcaggacaaagccaacttccgcagcttcaaacccaaacccttcaacatgcgtgagttctacgaccgagctgggcacgacattcgagacatgctgctctcctgccacttccggggggaggtctgcagcgctgaagacttcaaggtggtcttcacacgctatggaaagtgctacacgttcaactcgggccgagatgggcggccgcggctgaagaccatgaagggtgggacgggcaatgggctggaaatcatgctggacatccagcaggacgagtacctgcctgtgtggggggagactgacgagacgtccttcgaagcaggcatcaaagtgcagatccatagtcaggatgaacctcctttcatcgaccagctgggctttggcgtggccccaggcttccagacctttgtggcctgccaggagcagcggctcatctacctgcccccaccctggggcacctgcaaagctgttaccatggactcggatttggatttcttcgactcctacagcatcactgcctgccgcatcgactgtgagacgcgctacctggtggagaactgcaactgccgcatggtgcacatgccaggggatgccccatactgtactccagagcagtacaaggagtgtgcagatcctgctctggacttcctggtggagaaggaccaggagtactgcgtgtgtgaaatgccttgcaacctgacccgctatggcaaagagctgtccatggtcaagatccccagcaaagcctcagccaagtacctggccaagaagttcaacaaatctgagcaatacataggggagaacatcctggtgctggacattttctttgaagtcctcaactatgagaccattgaacagaagaaggcctatgagattgcagggctcctgggtgagctgctgatgacacctgtccccttctcatgccatgggcatggcgtggctccctatcatccaaaagcagggtgctcacttctgtcccatgagggtcctccaccccagaggcccttccccaaaccctgttgtcttggtgacatcgggggccagatggggctgttcatcggggccagcatcctcacggtgctggagctctttgactacgcctacgaggtcattaagcacaagctgtgccgacgaggaaaatgccagaaggaggccaaaaggagcagtgcggacaagggcgtggccctcagcctggacgacgtcaaaagacacaacccgtgcgagagccttcggggccaccctgccgggatgacatacgctgccaacatcctacctcaccatccggcccgaggcacgttcgaggactttacctgctgagccccgcaggccgctgaaccaaaggcctagatggggaggactaggagagcgagggggcccccagctgcctcctcacatctgccctggggactccccacactccggggcagatctttcctcttgtctgtggtaaggaaggagtcttgaccatagagtcctctctctgcctctatcccattctttttacatttaacaaaactaatctaaaaaagaactaaaaagggagaacggggcaagggacctcaggctgcccctctctcctccatgctgcctcccctagctcccagcctgaattctgtctatctagctgtctgccatctgagtgtccatctacattctgctgccaccagtcaccaaaggcccttcccagtgaggggtggaagggatctctggggtctggaatttggccccaaaccagagaatgtaccttaagggggagggctagtgtgggggagggaggcttccccagccttaagagaccctctcagcccagtgactgtccccaaacccaagtctcctggcaggaactaaaacctcagccccactctctcacaccatgtggaatctcgtgggggtcggggatccccttaagaagtggtaatggggacaagatgcggccctggtgctgtaggctacatcctgatacctataagttcacccccaccccacagctgctggagagaaatcccaagaggcagcccttcctcaccatcccattaaagaccgggctggttagcgtccagctcagggagaagggcgctagtgcctaacctcactggtccctctcccggaggcccttgtagagggccacgtccataaattttcttatggaactctcccacatcctcttccccaacttcatttgcttctctcaacaacctcatctgcattttctatttctatatgatacagactctatattgctatatctctgtatatactttcccagccctgtctgtctccaccccatcccctcttgtctctgagaaccattctcccaccccaagttccaccttctatgtttctactccctccctggtctctgaatgccttcgcctgtataaagagttggactctctcccctggtgtctgtactgtgtacacacatccctctgagaagcacaaggagacgacacgcgcattgtaacctttgcactgtctcagtggcgacaaaggaagctgtgaatcacaagctctgcctctttctggcctcaccctctcccccaacccgggcaccctcggccctccctgcagccttaacattctcttcccctgctcctcctatcccattgccctctgcccagctgacagtggcatccccagggaaggggttgctgtagagatagcccccacccaggggatggaggtctaccctggacactaagccaagtgtgtcagagacagaagggagctggggattggcgactcctgaagttggggcagtgggatgctgacaggcagaagctgaggtcctcagtcagtggcctttcctccttctgggtgcccagccccctttcctcacctgatacccaagcccaccacttttattttctggtgaggtgggtttgggaggaaagagaggcctagaggaggagttgaaagctctgctgttgtctcaccctatcttaatgagagacaagtgaggtggagggcctgccccccctccctccaccagacactccttccaggcctgagccccaacccctcttcaggccttccttccctagctgtgtcttggtcttcaatcccagaacaggacctgtgagcagctgcattggcctggagctggagagtaaggctgtaggatctttggaatctcttggttcctaagagtttcctcagagatcatacctccccagagggaagcaggaatgaggccaaaaagtgtgcattggataggggaacagcaggcagggctctgggtgacgcatgcctctggtctaataaactgggtttcaacca

SEQ ID NO: 103801 - DNA, 3778 bp, Homo sapiens
  Payload ID: 401
  Gene Symbol: ASIC1
  Gene Name: acid sensing (proton gated) ion channel 1
  Uniprot ID: P78348
  ENST ID: ENST00000447966
  CDS Start-End: 230-1816
gagccagcgagccagcgcgcgcgggcgggcggacagatcggagccgagcggggccgggcggggcgctccctgcagggctctgcgcggcgtgccgcggcggccgcgggctccggccccgggccatgagcccctccgcgactcggcgctgagcccgccaccggtccagcgccccaggacccgccgccggctgccggcttgccgaagccccctcaggatcccctcaacaaggatggaactgaaggccgaggaggaggaggtgggtggcgtccagccggtgagcatccaggccttcgccagcagctccacactgcacggcctggcccacatcttctcctacgagcggctgtctctgaagcgggcactgtgggccctgtgcttcctgggctccctggctgtgctgctgtgtgtgtgcacggagcgtgtgcagtactacttccactaccaccatgtcaccaagctcgacgaggtggctgcctctcagcttaccttccctgctgtcacgctgtgcaacctcaacgagttccgctttagccaagtctccaagaatgacctgtatcatgctggggagctgctggccctgctcaacaacaggtatgagataccagacacacagatggcagatgaaaagcagctggagatactgcaggacaaagccaacttccgcagcttcaaacccaaacccttcaacatgcgtgagttctacgaccgagctgggcacgacattcgagacatgctgctctcctgccacttccggggggaggtctgcagcgctgaagacttcaaggtggtcttcacacgctatggaaagtgctacacgttcaactcgggccgagatgggcggccgcggctgaagaccatgaagggtgggacgggcaatgggctggaaatcatgctggacatccagcaggacgagtacctgcctgtgtggggggagactgacgagacgtccttcgaagcaggcatcaaagtgcagatccatagtcaggatgaacctcctttcatcgaccagctgggctttggcgtggccccaggcttccagacctttgtggcctgccaggagcagcggctcatctacctgcccccaccctggggcacctgcaaagctgttaccatggactcggatttggatttcttcgactcctacagcatcactgcctgccgcatcgactgtgagacgcgctacctggtggagaactgcaactgccgcatggtgcacatgccaggggatgccccatactgtactccagagcagtacaaggagtgtgcagatcctgctctggacttcctggtggagaaggaccaggagtactgcgtgtgtgaaatgccttgcaacctgacccgctatggcaaagagctgtccatggtcaagatccccagcaaagcctcagccaagtacctggccaagaagttcaacaaatctgagcaatacataggggagaacatcctggtgctggacattttctttgaagtcctcaactatgagaccattgaacagaagaaggcctatgagattgcagggctcctgggtgacatcgggggccagatggggctgttcatcggggccagcatcctcacggtgctggagctctttgactacgcctacgaggtcattaagcacaagctgtgccgacgaggaaaatgccagaaggaggccaaaaggagcagtgcggacaagggcgtggccctcagcctggacgacgtcaaaagacacaacccgtgcgagagccttcggggccaccctgccgggatgacatacgctgccaacatcctacctcaccatccggcccgaggcacgttcgaggactttacctgctgagccccgcaggccgctgaaccaaaggcctagatggggaggactaggagagcgagggggcccccagctgcctcctcacatctgccctggggactccccacactccggggcagatctttcctcttgtctgtggtaaggaaggagtcttgaccatagagtcctctctctgcctctatcccattctttttacatttaacaaaactaatctaaaaaagaactaaaaagggagaacggggcaagggacctcaggctgcccctctctcctccatgctgcctcccctagctcccagcctgaattctgtctatctagctgtctgccatctgagtgtccatctacattctgctgccaccagtcaccaaaggcccttcccagtgaggggtggaagggatctctggggtctggaatttggccccaaaccagagaatgtaccttaagggggagggctagtgtgggggagggaggcttccccagccttaagagaccctctcagcccagtgactgtccccaaacccaagtctcctggcaggaactaaaacctcagccccactctctcacaccatgtggaatctcgtgggggtcggggatccccttaagaagtggtaatggggacaagatgcggccctggtgctgtaggctacatcctgatacctataagttcacccccaccccacagctgctggagagaaatcccaagaggcagcccttcctcaccatcccattaaagaccgggctggttagcgtccagctcagggagaagggcgctagtgcctaacctcactggtccctctcccggaggcccttgtagagggccacgtccataaattttcttatggaactctcccacatcctcttccccaacttcatttgcttctctcaacaacctcatctgcattttctatttctatatgatacagactctatattgctatatctctgtatatactttcccagccctgtctgtctccaccccatcccctcttgtctctgagaaccattctcccaccccaagttccaccttctatgtttctactccctccctggtctctgaatgccttcgcctgtataaagagttggactctctcccctggtgtctgtactgtgtacacacatccctctgagaagcacaaggagacgacacgcgcattgtaacctttgcactgtctcagtggcgacaaaggaagctgtgaatcacaagctctgcctctttctggcctcaccctctcccccaacccgggcaccctcggccctccctgcagccttaacattctcttcccctgctcctcctatcccattgccctctgcccagctgacagtggcatccccagggaaggggttgctgtagagatagcccccacccaggggatggaggtctaccctggacactaagccaagtgtgtcagagacagaagggagctggggattggcgactcctgaagttggggcagtgggatgctgacaggcagaagctgaggtcctcagtcagtggcctttcctccttctgggtgcccagccccctttcctcacctgatacccaagcccaccacttttattttctggtgaggtgggtttgggaggaaagagaggcctagaggaggagttgaaagctctgctgttgtctcaccctatcttaatgagagacaagtgaggtggagggcctgccccccctccctccaccagacactccttccaggcctgagccccaacccctcttcaggccttccttccctagctgtgtcttggtcttcaatcccagaacaggacctgtgagcagctgcattggcctggagctggagagtaaggctgtaggatctttggaatctcttggttcctaagagtttcctcagagatcatacctccccagagggaagcaggaatgaggccaaaaagtgtgcattggataggggaacagcaggcagggctctgggtgacgcatgcctctggtctaataaactgggtttcaacca

SEQ ID NO: 103802 - DNA, 1481 bp, Homo sapiens
  Payload ID: 401
  Gene Symbol: ASIC1
  Gene Name: acid sensing (proton gated) ion channel 1
  ENST ID: ENST00000453327
  CDS Start-End: 1-1190
acattcgagacatgctgctctcctgccacttccggggggaggtctgcagcgctgaagacttcaaggtgaagcccatgcaggtggcaaaggagctcaggcgatgcaccctaccaggaacagttttccagggcacacagagggcaagaaagggtgagaaacaggtcttcacacgctatggaaagtgctacacgttcaactcgggccgagatgggcggccgcggctgaagaccatgaagggtgggacgggcaatgggctggaaatcatgctggacatccagcaggacgagtacctgcctgtgtggggggagactgacgagacgtccttcgaagcaggcatcaaagtgcagatccatagtcaggatgaacctcctttcatcgaccagctgggctttggcgtggccccaggcttccagacctttgtggcctgccaggagcagcggctcatctacctgcccccaccctggggcacctgcaaagctgttaccatggactcggatttggatttcttcgactcctacagcatcactgcctgccgcatcgactgtgagacgcgctacctggtggagaactgcaactgccgcatggtgcacatgccaggggatgccccatactgtactccagagcagtacaaggagtgtgcagatcctgctctggacttcctggtggagaaggaccaggagtactgcgtgtgtgaaatgccttgcaacctgacccgctatggcaaagagctgtccatggtcaagatccccagcaaagcctcagccaagtacctggccaagaagttcaacaaatctgagcaatacataggggagaacatcctggtgctggacattttctttgaagtcctcaactatgagaccattgaacagaagaaggcctatgagattgcagggctcctgggtgacatcgggggccagatggggctgttcatcggggccagcatcctcacggtgctggagctctttgactacgcctacgaggtcattaagcacaagctgtgccgacgaggaaaatgccagaaggaggccaaaaggagcagtgcggacaagggcgtggccctcagcctggacgacgtcaaaagacacaacccgtgcgagagccttcggggccaccctgccgggatgacatacgctgccaacatcctacctcaccatccggcccgaggcacgttcgaggactttacctgctgagccccgcaggccgctgaaccaaaggcctagatggggaggactaggagagcgagggggcccccagctgcctcctcacatctgccctggggactccccacactccggggcagatctttcctcttgtctgtggtaaggaaggagtcttgaccatagagtcctctctctgcctctatcccattctttttacatttaacaaaactaatctaaaaaagaactaaaaagggagaacggggcaagggacctcaggctgcccctctctcctccatgctgcctcccctagctcccagcctg

SEQ ID NO: 103803 - DNA, 614 bp, Homo sapiens
  Payload ID: 401
  Gene Symbol: ASIC1
  Gene Name: acid sensing (proton gated) ion channel 1
  ENST ID: ENST00000552633
  CDS Start-End: 1-382
ggagaacatcctggtgctggacattttctttgaagtcctcaactatgagaccattgaacagaagaaggcctatgagattgcagggctcctgggtgacatcgggggccagatggggctgttcatcggggccagcatcctcacggtgctggagctctttgactacgcctacgaggtcattaagcacaagctgtgccgacgaggaaaatgccagaaggaggccaaaaggagcagtgcggacaagggcgtggccctcagcctggacgacgtcaaaagacacaacccgtgcgagagccttcggggccaccctgccgggatgacatacgctgccaacatcctacctcaccatccggcccgaggcacgttcgaggactttacctgctgagccccgcaggccgctgaaccaaaggcctagatggggaggactaggagagcgagggggcccccagctgcctcctcacatctgccctggggactccccacactccggggcagatctttcctcttgtctgtgagttggactctctcccctggtgtctgtactgtgtacacacatccctctgagaagcacaaggagacgacacgcgcattgtaacctttgcactgtctcagtggcg

SEQ ID NO: 103804 - DNA, 3819 bp, Homo sapiens
  Payload ID: 401
  Gene Symbol: ASIC1
  Gene Name: acid sensing (proton gated) ion channel 1
  ENST ID: ENST00000550558
  CDS Start-End: 189-980
agccgagcggggccgggcggggcgctccctgcagggctctgcgcggcgtgccgcggcggccgcgggctccggccccgggccatgagcccctccgcgactcggcgctgagcccgccaccggtccagcgccccaggacccgccgccggctgccggcttgccgaagccccctcaggatcccctcaacaaggatggaactgaaggccgaggaggaggaggtgggtggcgtccagccggtgagcatccaggccttcgccagcagctccacactgcacggcctggcccacatcttctcctacgagcggctgtctctgaagcgggcactgtgggccctgtgcttcctgggctccctggctgtgctgctgtgtgtgtgcacggagcgtgtgcagtactacttccactaccaccatgtcaccaagctcgacgaggtggctgcctctcagcttaccttccctgctgtcacgctgtgcaacctcaacgagttccgctttagccaagtctccaagaatgacctgtatcatgctggggagctgctggccctgctcaacaacaggtatgagataccagacacacagatggcagatgaaaagcagctggagatactgcaggacaaagccaacttccgcagcttcaaacccaaacccttcaacatgcgtgagttctacgaccgagctgggcacgacattcgagacatgctgctctcctgccacttccggggggaggtctgcagcgctgaagacttcaaggtgaagcccatgcaggtggcaaaggagctcaggcgatgcaccctaccaggaacagttttccagggcacacagagggcaagaaagggtcttcacacgctatggaaagtgctacacgttcaactcgggccgagatgggcggccgcggctgaagaccatgaagggtgggacgggcaatgggctggaaatcatgctggacatccagcaggacgagtacctgcctgtgtggggggagactgacgagacgtccttcgaagcaggcatcaaagtgcagatccatagtcaggatgaacctcctttcatcgaccagctgggctttggcgtggccccaggcttccagacctttgtggcctgccaggagcagcggctcatctacctgcccccaccctggggcacctgcaaagctgttaccatggactcggatttggatttcttcgactcctacagcatcactgcctgccgcatcgactgtgagacgcgctacctggtggagaactgcaactgccgcatggtgcacatgccaggggatgccccatactgtactccagagcagtacaaggagtgtgcagatcctgctctggacttcctggtggagaaggaccaggagtactgcgtgtgtgaaatgccttgcaacctgacccgctatggcaaagagctgtccatggtcaagatccccagcaaagcctcagccaagtacctggccaagaagttcaacaaatctgagcaatacataggggagaacatcctggtgctggacattttctttgaagtcctcaactatgagaccattgaacagaagaaggcctatgagattgcagggctcctgggtgacatcgggggccagatggggctgttcatcggggccagcatcctcacggtgctggagctctttgactacgcctacgaggtcattaagcacaagctgtgccgacgaggaaaatgccagaaggaggccaaaaggagcagtgcggacaagggcgtggccctcagcctggacgacgtcaaaagacacaacccgtgcgagagccttcggggccaccctgccgggatgacatacgctgccaacatcctacctcaccatccggcccgaggcacgttcgaggactttacctgctgagccccgcaggccgctgaaccaaaggcctagatggggaggactaggagagcgagggggcccccagctgcctcctcacatctgccctggggactccccacactccggggcagatctttcctcttgtctgtggtaaggaaggagtcttgaccatagagtcctctctctgcctctatcccattctttttacatttaacaaaactaatctaaaaaagaactaaaaagggagaacggggcaagggacctcaggctgcccctctctcctccatgctgcctcccctagctcccagcctgaattctgtctatctagctgtctgccatctgagtgtccatctacattctgctgccaccagtcaccaaaggcccttcccagtgaggggtggaagggatctctggggtctggaatttggccccaaaccagagaatgtaccttaagggggagggctagtgtgggggagggaggcttccccagccttaagagaccctctcagcccagtgactgtccccaaacccaagtctcctggcaggaactaaaacctcagccccactctctcacaccatgtggaatctcgtgggggtcggggatccccttaagaagtggtaatggggacaagatgcggccctggtgctgtaggctacatcctgatacctataagttcacccccaccccacagctgctggagagaaatcccaagaggcagcccttcctcaccatcccattaaagaccgggctggttagcgtccagctcagggagaagggcgctagtgcctaacctcactggtccctctcccggaggcccttgtagagggccacgtccataaattttcttatggaactctcccacatcctcttccccaacttcatttgcttctctcaacaacctcatctgcattttctatttctatatgatacagactctatattgctatatctctgtatatactttcccagccctgtctgtctccaccccatcccctcttgtctctgagaaccattctcccaccccaagttccaccttctatgtttctactccctccctggtctctgaatgccttcgcctgtataaagagttggactctctcccctggtgtctgtactgtgtacacacatccctctgagaagcacaaggagacgacacgcgcattgtaacctttgcactgtctcagtggcgacaaaggaagctgtgaatcacaagctctgcctctttctggcctcaccctctcccccaacccgggcaccctcggccctccctgcagccttaacattctcttcccctgctcctcctatcccattgccctctgcccagctgacagtggcatccccagggaaggggttgctgtagagatagcccccacccaggggatggaggtctaccctggacactaagccaagtgtgtcagagacagaagggagctggggattggcgactcctgaagttggggcagtgggatgctgacaggcagaagctgaggtcctcagtcagtggcctttcctccttctgggtgcccagccccctttcctcacctgatacccaagcccaccacttttattttctggtgaggtgggtttgggaggaaagagaggcctagaggaggagttgaaagctctgctgttgtctcaccctatcttaatgagagacaagtgaggtggagggcctgccccccctccctccaccagacactccttccaggcctgagccccaacccctcttcaggccttccttccctagctgtgtcttggtcttcaatcccagaacaggacctgtgagcagctgcattggcctggagctggagagtaaggctgtaggatctttggaatctcttggttcctaagagtttcctcagagatcatacctccccagagggaagcaggaatgaggccaaaaagtgtgcattggataggggaacagcaggcagggctctgggtgacgcatgcctctggtctaataaactgggtttcaacca

SEQ ID NO: 103805 - DNA, 3327 bp, Homo sapiens
  Payload ID: 401
  Gene Symbol: ASIC1
  Gene Name: acid sensing (proton gated) ion channel 1
  Uniprot ID: P78348
  ENST ID: ENST00000552438
  CDS Start-End: 11-1699
cctggagaaaatgcccatccagatcttctgctccatgtcattctcctctggagaggaagccccagggcccttgggagatatttggggtccccaccaccatcagcagcagcaggacatctcagaatcggaagaggaggaagaagagaaggaaaaggaggcagtgaggaaggaggccagtgaggggcattcacccatggacttggtggcctttgccaacagctgcaccctccatggcaccaaccacatttttgtggaggggggtccagggccaaggcaggtgctgtgggcggtggcctttgtcctggcactgggtgccttcctgtgccaggtaggggaccgcgttgcttattacctcagctacccacacgtgacccttctaaacgaagtggccaccacggagctggccttcccggcagtcaccctctgcaacactaatgctgtgcggctgtcccagctcagctaccctgacttgctttatttggcccccatgctgggactggatgaaagtgatgaccccggggtgcccctcgctccaccgggccctgaggccttctctggggagccctttaacctgcaccgcttctacaatcgctcctgccaccggctggaggacatgctgctctattgctcctaccaagggggaccctgcggccctcacaacttctcagtggtcttcacacgctatggaaagtgctacacgttcaactcgggccgagatgggcggccgcggctgaagaccatgaagggtgggacgggcaatgggctggaaatcatgctggacatccagcaggacgagtacctgcctgtgtggggggagactgacgagacgtccttcgaagcaggcatcaaagtgcagatccatagtcaggatgaacctcctttcatcgaccagctgggctttggcgtggccccaggcttccagacctttgtggcctgccaggagcagcggctcatctacctgcccccaccctggggcacctgcaaagctgttaccatggactcggatttggatttcttcgactcctacagcatcactgcctgccgcatcgactgtgagacgcgctacctggtggagaactgcaactgccgcatggtgcacatgccaggggatgccccatactgtactccagagcagtacaaggagtgtgcagatcctgctctggacttcctggtggagaaggaccaggagtactgcgtgtgtgaaatgccttgcaacctgacccgctatggcaaagagctgtccatggtcaagatccccagcaaagcctcagccaagtacctggccaagaagttcaacaaatctgagcaatacataggggagaacatcctggtgctggacattttctttgaagtcctcaactatgagaccattgaacagaagaaggcctatgagattgcagggctcctgggtgacatcgggggccagatggggctgttcatcggggccagcatcctcacggtgctggagctctttgactacgcctacgaggtcattaagcacaagctgtgccgacgaggaaaatgccagaaggaggccaaaaggagcagtgcggacaagggcgtggccctcagcctggacgacgtcaaaagacacaacccgtgcgagagccttcggggccaccctgccgggatgacatacgctgccaacatcctacctcaccatccggcccgaggcacgttcgaggactttacctgctgagccccgcaggccgctgaaccaaaggcctagatggggaggactaggagagcgagggggcccccagctgcctcctcacatctgccctggggactccccacactccggggcagatctttcctcttgtctgtggtaaggaaggagtcttgaccatagagtcctctctctgcctctatcccattctttttacatttaacaaaactaatctaaaaaagaactaaaaagggagaacggggcaagggacctcaggctgcccctctctcctccatgctgcctcccctagctcccagcctgaattctgtctatctagctgtctgccatctgagtgtccatctacattctgctgccaccagtcaccaaaggcccttcccagtgaggggtggaagggatctctggggtctggaatttggccccaaaccagagaatgtaccttaagggggagggctagtgtgggggagggaggcttccccagccttaagagaccctctcagcccagtgactgtccccaaacccaagtctcctggcaggaactaaaacctcagccccactctctcacaccatgtggaatctcgtgggggtcggggatccccttaagaagtggtaatggggacaagatgcggccctggtgctgtaggctacatcctgatacctataagttcacccccaccccacagctgctggagagaaatcccaagaggcagcccttcctcaccatcccattaaagaccgggctggttagcgtccagctcagggagaagggcgctagtgcctaacctcactggtccctctcccggaggcccttgtagagggccacgtccataaattttcttatggaactctcccacatcctcttccccaacttcatttgcttctctcaacaacctcatctgcattttctatttctatatgatacagactctatattgctatatctctgtatatactttcccagccctgtctgtctccaccccatcccctcttgtctctgagaaccattctcccaccccaagttccaccttctatgtttctactccctccctggtctctgaatgccttcgcctgtataaagagttggactctctcccctggtgtctgtactgtgtacacacatccctctgagaagcacaaggagacgacacgcgcattgtaacctttgcactgtctcagtggcgacaaaggaagctgtgaatcacaagctctgcctctttctggcctcaccctctcccccaacccgggcaccctcggccctccctgcagccttaacattctcttcccctgctcctcctatcccattgccctctgcccagctgacagtggcatccccagggaaggggttgctgtagagatagcccccacccaggggatggaggtctaccctggacactaagccaagtgtgtcagagacagaagggagctggggattggcgactcctgaagttggggcagtgggatgctgacaggcagaagctgaggtcctcagtcagtggcctttcctccttctgggtgcccagccccctttcctcacctgatacccaagcccaccacttttattttctggtgaggtgggtttgggaggaaagagaggcctagaggaggagttgaaagctctgctgttgtctcaccctatctta

SEQ ID NO: 103806 - DNA, 3443 bp, Homo sapiens
  Payload ID: 402
  Gene Symbol: ASIC2
  Gene Name: acid sensing (proton gated) ion channel 2
  Uniprot ID: Q16515
  ENST ID: ENST00000225823
  CDS Start-End: 874-2565
cacctgggagagccgaggcgagaagcgacacttccctgcggctagcatccttgaaggaccccggcggcgaacagcctcccgcaggacgccctgagaagctctcagccccaggcgagagcgggcgcctggcaggacttaggcgcaggacttggggaagcctaagcaggtctctgccgagcgcagcccagggagcagtaacaaggaagggtcctggaggggaagggaaagaaggcggcagccggcaaggcgaccactcacccccgtacacacccaccccgcccgcccagccaggagccgcggtgcgcctctgggggcgctcgttccttggcgccttctctcccgtgtcccagcaccgctgggctacgggccgggctggtggggtccctggggatgtccagatcaggcatggtggccgagtggcccttctcccaggaccagcgtaaaagctggggttaggcggggcaggggggactcggctcagggtcccccgaggtccaggacgagggaaggcgggcgcagcacccagggactggagaggcggctcccagtgggacccctccagaagtagtgccgggcgccgggcatcctccaggaagaccaggggccgggaaagcctgggaggcgctcgggagaggccactgccaggggctgcgggctgaggcggcgctcagccccgggcgggcgcccgcggaggcggcagcggcggcgccgggcgggcatgccgcgccaccggagctcctttcgggcgcacgcttccctggcgcgggctgcgcgcggctgccgctgctgctgcttccactgctgctgcggactcccatggcggctccgcccggccggggccgccgccgctgccgccagccgcgggctgaatgaatgagccggattggcggagccgggctgcccgcagccgcgctcaccggcccgggacgcttccgcatggcccgcgaggagccggcgcccgcggcgttggcggctgccgggcagcccgggggcggcagaggcggcgagcgggcgctgcaggggccaggggtcgcccgcagggggcggccatcgctgagccgcgctaaactgcacgggctgcggcacatgtgtgccgggcgcacggcggctgggggctccttccagcggcgggcgctgtgggtgctggccttctgtacatccttcggcttgctgctgtcctggtcctcgaaccgcttgctctactggctcagcttcccgtcacacacgcgggtgcaccgcgagtggagccgccagttacccttccccgccgtcactgtgtgcaacaacaacccgctgcgcttcccgcgcctctccaagggggacctctactatgccggccactggctcgggctgctgctgcccaaccgcaccgcgcgcccgcttgtcagcgagctgctgcggggcgacgagccgcgccgccagtggttccgcaagctggcggacttccgcctcttcctgcctccgcgccacttcgagggaatcagcgccgccttcatggaccgcctgggccaccagctggaggacatgctgctctcctgcaagtaccgcggcgagctctgcgggccgcacaacttctcctccgtgtttacaaaatatgggaagtgttacatgtttaactcaggcgaggatggcaaacctctgctcaccacggtcaagggggggacaggcaacgggctggagatcatgctggacattcagcaggatgagtacctgcccatctggggagagacagaggaaacgacatttgaagcaggagtgaaagttcagatccacagtcagtctgagccacctttcatccaagagctgggctttggggtggctccagggttccagacctttgtggccacacaggagcagaggctcacatacctgcccccaccgtggggtgagtgccgatcctcagagatgggcctcgacttttttcctgtttacagcatcaccgcctgtaggattgactgtgagacccgctacattgtggaaaactgcaactgccgcatggttcacatgccaggggatgcccctttttgtacccctgagcagcacaaggagtgtgcagagcctgccctaggtctgttggcggaaaaggacagcaattactgtctctgcaggacaccctgcaacctaacccgctacaacaaagagctctccatggtgaagatccccagcaagacatcagccaagtaccttgagaagaaatttaacaaatcagaaaaatatatctcagagaacatccttgttctggatatattttttgaagctctcaattatgagacaattgaacagaagaaggcgtatgaagttgctgccttacttggtgatattggtggtcagatgggattgttcattggtgctagtatccttacaatactagagctctttgattatatttatgagctgatcaaagagaagctattagacctgcttggcaaagaggaggacgaagggagccacgatgagaatgtgagtacttgtgacacaatgccaaaccactctgaaaccatcagtcacactgtgaacgtgcccctgcagacgaccctggggaccttggaggagattgcctgctgacacccctcgagtcacccagcactccctccaaacagaccttgaggcccaagacccaggacaaggaacagcaagctcaggtgggatggccccagtgctggaaagaagcaagagccccctatgcacacattgcagactagctgcctagacctcgctccggccacgtccaacacgacgcatccttgggccccgccgtgcgtccctcttaggagagatgagtcacactctggaactgtccaagaacgaacctgccatcacatctcactgccagatgtataaagcacctgcatgctcagacttcttgtggcgccacctccacgtctgtcttgtacatgacactcctccacgcggtttccagtgtccacactgctgcccgtgcagtgggaccagattccaggtccaaagtcaccatgaggccaccctggaatcagaactgcacaatcaagagggaacccatgggactctctgctacattcagttcttgtgtcgtttgtgaaagttcttaacctgcccaaaaacccccttttccccaagctgcccatggggcttcggcgccaaaggtgacccgcgccaacctccctcccccccagtgcctatgacggcggcacagcagccagcgggtgggggacgcctgtgttcacccatggtgcccatgtcgttcttctctccctgtgacacagcttgtacagtctgattctttttatctggggtaggggggcttttatgtttgtccgatggagatttgttttgttttgcttcattttatgcttttttattttagttttgatgttctgaggtttgctttggtttttccattttctttggcatttatttattcgtgcttcaaatcacagtcatattaaaagctggtcttgtggaaa

SEQ ID NO: 103807 - DNA, 3179 bp, Homo sapiens
  Payload ID: 402
  Gene Symbol: ASIC2
  Gene Name: acid sensing (proton gated) ion channel 2
  Uniprot ID: Q16515
  ENST ID: ENST00000359872
  CDS Start-End: 763-2301
ttttttcccaggaggcgaggagagaatggatcccggtctgagctccccgcttccgtccccagtctccagataccggtcctcgcctctccgcgccgcgcgctgcctcctctccccggtgctagcagcggccgctggcatttggaattctgcccacaaaagggggcctggaggaggaggagaggagggacggaggccggcggcgagaaacggcattcggagtccaaaacatcatgggaaaaggaaccgagcggcggcggctctgaaggctgtgccgctgcgcccgaccgcagtgcatcagcgtggccgccctgacatcccccaggatggttaacatggggcattatgcgctggttaacaggctccgagctgctcagcgacttgttttaagcattttctctctcgctctcgcttttaatcttgtctctagtggcgtgtgtaggggggaggactttatttccattggctaagctctcccttcccacccacatctcttccacatcaccttggtgtctccctaaataaaaccagccctccttatcgcctggaaaaaatcaagagctagagtttgaatgggttttatataaacactcacccctgtcagcgtgcggctgggctctcaggataaactcacagcatctggcgcgatgcttgccttgcgttctctcccctgaacgtcaaggtttaagcagagcccgaggactgggagctcttctctgaaattcgatcaacctgaagccagttgcggaactgcacggggtcccgatggacctcaaggaaagccccagtgagggcagcctgcaaccttctagcatccagatctttgccaacacctccaccctccatggcatccgccacatcttcgtgtatgggccgctgaccatccggcgtgtgctgtgggcagtggccttcgtgggctctctgggcctgctgctggtggagagctctgagagggtgtcctactacttctcctaccagcatgtcactaaggtggacgaagtggtggctcaaagcctggtcttcccagctgtgaccctctgtaacctgaatggcttccggttctccaggctcaccaccaatgacctgtaccatgctggggagctgctggccctgctggatgtcaacctgcagatcccggacccccatctggctgacccctccgtgctggaggccctgcggcagaaggccaacttcaagcactacaaacccaagcagttcagcatgctggagttcctgcaccgtgtgggccatgacctgaaggatatgatgctctactgcaagttcaaagggcaggagtgcggccaccaagacttcaccacagtgtttacaaaatatgggaagtgttacatgtttaactcaggcgaggatggcaaacctctgctcaccacggtcaagggggggacaggcaacgggctggagatcatgctggacattcagcaggatgagtacctgcccatctggggagagacagaggaaacgacatttgaagcaggagtgaaagttcagatccacagtcagtctgagccacctttcatccaagagctgggctttggggtggctccagggttccagacctttgtggccacacaggagcagaggctcacatacctgcccccaccgtggggtgagtgccgatcctcagagatgggcctcgacttttttcctgtttacagcatcaccgcctgtaggattgactgtgagacccgctacattgtggaaaactgcaactgccgcatggttcacatgccaggggatgcccctttttgtacccctgagcagcacaaggagtgtgcagagcctgccctaggtctgttggcggaaaaggacagcaattactgtctctgcaggacaccctgcaacctaacccgctacaacaaagagctctccatggtgaagatccccagcaagacatcagccaagtaccttgagaagaaatttaacaaatcagaaaaatatatctcagagaacatccttgttctggatatattttttgaagctctcaattatgagacaattgaacagaagaaggcgtatgaagttgctgccttacttggtgatattggtggtcagatgggattgttcattggtgctagtatccttacaatactagagctctttgattatatttatgagctgatcaaagagaagctattagacctgcttggcaaagaggaggacgaagggagccacgatgagaatgtgagtacttgtgacacaatgccaaaccactctgaaaccatcagtcacactgtgaacgtgcccctgcagacgaccctggggaccttggaggagattgcctgctgacacccctcgagtcacccagcactccctccaaacagaccttgaggcccaagacccaggacaaggaacagcaagctcaggtgggatggccccagtgctggaaagaagcaagagccccctatgcacacattgcagactagctgcctagacctcgctccggccacgtccaacacgacgcatccttgggccccgccgtgcgtccctcttaggagagatgagtcacactctggaactgtccaagaacgaacctgccatcacatctcactgccagatgtataaagcacctgcatgctcagacttcttgtggcgccacctccacgtctgtcttgtacatgacactcctccacgcggtttccagtgtccacactgctgcccgtgcagtgggaccagattccaggtccaaagtcaccatgaggccaccctggaatcagaactgcacaatcaagagggaacccatgggactctctgctacattcagttcttgtgtcgtttgtgaaagttcttaacctgcccaaaaacccccttttccccaagctgcccatggggcttcggcgccaaaggtgacccgcgccaacctccctcccccccagtgcctatgacggcggcacagcagccagcgggtgggggacgcctgtgttcacccatggtgcccatgtcgttcttctctccctgtgacacagcttgtacagtctgattctttttatctggggtaggggggcttttatgtttgtccgatggagatttgttttgttttgcttcattttatgcttttttattttagttttgatgttctgaggtttgctttggtttttccattttctttggcatttatttattcgtgcttcaaatcacagtcatattaaaagctggtcttgtggaaa

SEQ ID NO: 103808 - DNA, 1718 bp, Homo sapiens
  Payload ID: 403
  Gene Symbol: ASIC3
  Gene Name: acid sensing (proton gated) ion channel 3
  Uniprot ID: Q9UHC3
  ENST ID: ENST00000297512
  CDS Start-End: 1-1650
atgaagcccacctcaggcccagaggaggcccggcggccagcctcggacatccgcgtgttcgccagcaactgctcgatgcacgggctgggccacgtcttcgggccaggcagcctgagcctgcgccgggggatgtgggcagcggccgtggtcctgtcagtggccaccttcctctaccaggtggctgagagggtgcgctactacagggagttccaccaccagactgccctggatgagcgagaaagccaccggctcatcttcccggctgtcaccctgtgcaacatcaacccactgcgccgctcgcgcctaacgcccaacgacctgcactgggctgggtctgcgctgctgggcctggatcccgcagagcacgccgccttcctgcgcgccctgggccggccccctgcaccgcccggcttcatgcccagtcccacctttgacatggcgcaactctatgcccgtgctgggcactccctggatgacatgctgctggactgtcgcttccgtggccaaccttgtgggcctgagaacttcaccacgatcttcacccggatgggaaagtgctacacatttaactctggcgctgatggggcagagctgctcaccactactaggggtggcatgggcaatgggctggacatcatgctggacgtgcagcaggaggaatatctacctgtgtggagggacaatgaggagaccccgtttgaggtggggatccgagtgcagatccacagccaggaggagccgcccatcatcgatcagctgggcttgggggtgtccccgggctaccagacctttgtttcttgccagcagcagcagctgagcttcctgccaccgccctggggcgattgcagttcagcatctctgaaccccaactatgagccagagccctctgatcccctaggctcccccagccccagccccagccctccctatacccttatggggtgtcgcctggcctgcgaaacccgctacgtggctcggaagtgcggctgccgaatggtgtacatgccaggcgacgtgccagtgtgcagcccccagcagtacaagaactgtgcccacccggccatagatgccatgcttcgcaaggactcgtgcgcctgccccaacccgtgcgccagcacgcgctacgccaaggagctctccatggtgcggatcccgagccgcgccgccgcgcgcttcctggcccggaagctcaaccgcagcgaggcctacatcgcggagaacgtgctggccctggacatcttctttgaggccctcaactatgagaccgtggagcagaagaaggcctatgagatgtcagagctgcttggtgacattgggggccagatggggctgttcatcggggccagcctgctcaccatcctcgagatcctagactacctctgtgaggtgttccgagacaaggtcctgggatatttctggaaccgacagcactcccaaaggcactccagcaccaatctgcttcaggaagggctgggcagccatcgaacccaagttccccacctcagcctgggccccagcactctgctctgttccgaagacctcccacccctccctgtgccgtcaccaagactctctccgcctcccaccgcacctgctaccttgtcacacagctctagacctgctgtctgtgtcctcggagccccgccctgacatcctggacatgcctagcctgcacgtagcttttccgtcttcaccccaaataaagtcctaatgcatca

SEQ ID NO: 103809 - DNA, 1895 bp, Homo sapiens
  Payload ID: 403
  Gene Symbol: ASIC3
  Gene Name: acid sensing (proton gated) ion channel 3
  Uniprot ID: Q9UHC3
  ENST ID: ENST00000349064
  CDS Start-End: 199-1794
acctgaccggccagatcacctcctccaatcctgccaggctagtgcctccctgccttccaaccttggctgtctcccaccctctcttctcctctccttgcctggcctcctgaatcctatcttagcctccttagccccctgactgactctctctcgcttcttccaagcctctgtagctggttccgctcctgggttctggccatgaagcccacctcaggcccagaggaggcccggcggccagcctcggacatccgcgtgttcgccagcaactgctcgatgcacgggctgggccacgtcttcgggccaggcagcctgagcctgcgccgggggatgtgggcagcggccgtggtcctgtcagtggccaccttcctctaccaggtggctgagagggtgcgctactacagggagttccaccaccagactgccctggatgagcgagaaagccaccggctcatcttcccggctgtcaccctgtgcaacatcaacccactgcgccgctcgcgcctaacgcccaacgacctgcactgggctgggtctgcgctgctgggcctggatcccgcagagcacgccgccttcctgcgcgccctgggccggccccctgcaccgcccggcttcatgcccagtcccacctttgacatggcgcaactctatgcccgtgctgggcactccctggatgacatgctgctggactgtcgcttccgtggccaaccttgtgggcctgagaacttcaccacgatcttcacccggatgggaaagtgctacacatttaactctggcgctgatggggcagagctgctcaccactactaggggtggcatgggcaatgggctggacatcatgctggacgtgcagcaggaggaatatctacctgtgtggagggacaatgaggagaccccgtttgaggtggggatccgagtgcagatccacagccaggaggagccgcccatcatcgatcagctgggcttgggggtgtccccgggctaccagacctttgtttcttgccagcagcagcagctgagcttcctgccaccgccctggggcgattgcagttcagcatctctgaaccccaactatgagccagagccctctgatcccctaggctcccccagccccagccccagccctccctatacccttatggggtgtcgcctggcctgcgaaacccgctacgtggctcggaagtgcggctgccgaatggtgtacatgccaggcgacgtgccagtgtgcagcccccagcagtacaagaactgtgcccacccggccatagatgccatgcttcgcaaggactcgtgcgcctgccccaacccgtgcgccagcacgcgctacgccaaggagctctccatggtgcggatcccgagccgcgccgccgcgcgcttcctggcccggaagctcaaccgcagcgaggcctacatcgcggagaacgtgctggccctggacatcttctttgaggccctcaactatgagaccgtggagcagaagaaggcctatgagatgtcagagctgcttggtgacattgggggccagatggggctgttcatcggggccagcctgctcaccatcctcgagatcctagactacctctgtgaggtgttccgagacaaggtcctgggatatttctggaaccgacagcactcccaaaggcactccagcaccaatctgcttcaggaagggctgggcagccatcgaacccaagttccccacctcagcctgggccccagacctcccacccctccctgtgccgtcaccaagactctctccgcctcccaccgcacctgctaccttgtcacacagctctagacctgctgtctgtgtcctcggagccccgccctgacatcctggacatgcctagcctgcacgtagcttttccgtcttcaccccaaataaagtcctaatgcatc

SEQ ID NO: 103810 - DNA, 2232 bp, Homo sapiens
  Payload ID: 403
  Gene Symbol: ASIC3
  Gene Name: acid sensing (proton gated) ion channel 3
  Uniprot ID: Q9UHC3
  ENST ID: ENST00000357922
  CDS Start-End: 595-2226
tacaggggttgcaactgggagcctagggggccccaaggcatctccaggcccaatctacctctgggcttttctcaagctctccctaggattactgcggtttcctcctggcgcctctcgtcttggacagccatgcccccctccatgctgcactaatggctcagcctggggccctagggacctctcctaccccccagactgctctgtcggccccctttcccccctactgctgaaacccaatcctctgcagcagcgccggctcagcaccgccggctcagcaccgctccgcagcccctgcctgccacggtcagctacgtcccacctggtctgctgcggagtccccagcccagtgcctagcccagtggagccaccgcctgttcctcgggaaggaacagtgggacctgaccggccagatcacctcctccaatcctgccaggctagtgcctccctgccttccaaccttggctgtctcccaccctctcttctcctctccttgcctggcctcctgaatcctatcttagcctccttagccccctgactgactctctctcgcttcttccaagcctctgtagctggttccgctcctgggttctggccatgaagcccacctcaggcccagaggaggcccggcggccagcctcggacatccgcgtgttcgccagcaactgctcgatgcacgggctgggccacgtcttcgggccaggcagcctgagcctgcgccgggggatgtgggcagcggccgtggtcctgtcagtggccaccttcctctaccaggtggctgagagggtgcgctactacagggagttccaccaccagactgccctggatgagcgagaaagccaccggctcatcttcccggctgtcaccctgtgcaacatcaacccactgcgccgctcgcgcctaacgcccaacgacctgcactgggctgggtctgcgctgctgggcctggatcccgcagagcacgccgccttcctgcgcgccctgggccggccccctgcaccgcccggcttcatgcccagtcccacctttgacatggcgcaactctatgcccgtgctgggcactccctggatgacatgctgctggactgtcgcttccgtggccaaccttgtgggcctgagaacttcaccacgatcttcacccggatgggaaagtgctacacatttaactctggcgctgatggggcagagctgctcaccactactaggggtggcatgggcaatgggctggacatcatgctggacgtgcagcaggaggaatatctacctgtgtggagggacaatgaggagaccccgtttgaggtggggatccgagtgcagatccacagccaggaggagccgcccatcatcgatcagctgggcttgggggtgtccccgggctaccagacctttgtttcttgccagcagcagcagctgagcttcctgccaccgccctggggcgattgcagttcagcatctctgaaccccaactatgagccagagccctctgatcccctaggctcccccagccccagccccagccctccctatacccttatggggtgtcgcctggcctgcgaaacccgctacgtggctcggaagtgcggctgccgaatggtgtacatgccaggcgacgtgccagtgtgcagcccccagcagtacaagaactgtgcccacccggccatagatgccatgcttcgcaaggactcgtgcgcctgccccaacccgtgcgccagcacgcgctacgccaaggagctctccatggtgcggatcccgagccgcgccgccgcgcgcttcctggcccggaagctcaaccgcagcgaggcctacatcgcggagaacgtgctggccctggacatcttctttgaggccctcaactatgagaccgtggagcagaagaaggcctatgagatgtcagagctgcttggtgacattgggggccagatggggctgttcatcggggccagcctgctcaccatcctcgagatcctagactacctctgtgaggtgttccgagacaaggtcctgggatatttctggaaccgacagcactcccaaaggcactccagcaccaatctgacctcccacccctccctgtgccgtcaccaagactctctccgcctcccaccgcacctgctaccttgtcacacagctctagacctgctgtctgtgtcctcggagccccgccctgacatcctggacatgcctagcctgcacgtagcttttccgtcttcaccccaaataaagtcctaatgcatc

SEQ ID NO: 103811 - DNA, 2096 bp, Homo sapiens
  Payload ID: 403
  Gene Symbol: ASIC3
  Gene Name: acid sensing (proton gated) ion channel 3
  Uniprot ID: Q9UHC3
  ENST ID: ENST00000377904
  CDS Start-End: 369-1592
ctgaaacccaatcctctgcagcagcgccggctcagcaccgccggctcagcaccgctccgcagcccctgcctgccacggtcagctacgtcccacctggtctgctgcggagtccccagcccagtgcctagcccagtggagccaccgcctgttcctcgggaaggaacagtgggacctgaccggccagatcacctcctccaatcctgccaggctagtgcctccctgccttccaaccttggctgtctcccaccctctcttctcctctccttgcctggcctcctgaatcctatcttagcctccttagccccctgactgactctctctcgcttcttccaagcctctgtagctggttccgctcctgggttctggccatgaagcccacctcaggcccagaggaggcccggcggccagcctcggacatccgcgtgttcgccagcaactgctcgatgcacgggctgggccacgtcttcgggccaggcagcctgagcctgcgccgggggatgtgggcagcggccgtggtcctgtcagtggccaccttcctctaccaggtggctgagagggtgcgctactacagggagttccaccaccagactgccctggatgagcgagaaagccaccggctcatcttcccggctgtcaccctgtgcaacatcaacccactgcgccgctcgcgcctaacgcccaacgacctgcactgggctgggtctgcgctgctgggcctggatcccgcagagcacgccgccttcctgcgcgccctgggccggccccctgcaccgcccggcttcatgcccagtcccacctttgacatggcgcaactctatgcccgtgctgggcactccctggatgacatgctgctggactgtcgcttccgtggccaaccttgtgggcctgagaacttcaccacgatcttcacccggatgggaaagtgctacacatttaactctggcgctgatggggcagagctgctcaccactactaggggtggcatgggcaatgggctggacatcatgctggacgtgcagcaggaggaatatctacctgtgtggagggacaatgaggagaccccgtttgaggtggggatccgagtgcagatccacagccaggaggagccgcccatcatcgatcagctgggcttgggggtgtccccgggctaccagacctttgtttcttgccagcagcagcagctgagcttcctgccaccgccctggggcgattgcagttcagcatctctgaaccccaactatgagccagagccctctgatcccctaggctcccccagccccagccccagccctccctatacccttatggggtgtcgcctggcctgcgaaacccgctacgtggctcggaagtgcggctgccgaatggtgtacatgccaggcgacgtgccagtgtgcagcccccagcagtacaagaactgtgcccacccggccatagggagaacgtgctggccctggacatcttctttgaggccctcaactatgagaccgtggagcagaagaaggcctatgagatgtcagagctgcttggtgacattgggggccagatggggctgttcatcggggccagcctgctcaccatcctcgagatcctagactacctctgtgaggtgttccgagacaaggtcctgggatatttctggaaccgacagcactcccaaaggcactccagcaccaatctggtaacagcccctcttctggagcccttgcctgctccaagggtgctagggcccacccctgaagcctagaccaccatcccgccccagctgaggagaaacaggcaggagggtgtgcagtgacctcgactggtccctgggaggaggaccactccccacctctgaccctctcgtcctcacacagcttcaggaagggctgggcagccatcgaacccaagttccccacctcagcctgggccccagacctcccacccctccctgtgccgtcaccaagactctctccgcctcccaccgcacctgctaccttgtcacacagctctagacctgctgtctgtgtcctcggagccccgccctgacatcctggacatgcctagcctgcacgtagcttttccgtcttcaccccaaataaagtcctaatgcatca

SEQ ID NO: 103812 - DNA, 520 bp, Homo sapiens
  Payload ID: 403
  Gene Symbol: ASIC3
  Gene Name: acid sensing (proton gated) ion channel 3
  ENST ID: ENST00000490540
  CDS Start-End: 1-450
tgcgccagcacgcgctacgccaaggagctctccatggtgcggatcccgagccgcgccgccgcgcgcttcctggcccggaagctcaaccgcagcgaggcctacatcgcggagaacgtgctggccctggacatcttctttgaggccctcaactatgagaccgtggagcagaagaaggcctatgagatgtcagagctgcttggtgacattgggggccagatggggctgttcatcggggccagcctgctcaccatcctcgagatcctagactacctctgtgaggtgttccgagacaaggtcctgggatatttctggaaccgacagcactcccaaaggcactccagcaccaatctgcttcaggaagggctgggcagccatcgaacccaagttccccacctcagcctgggccccagctctagacctgctgtctgtgtcctcggagccccgccctgacatcctggacatgcctagcctgcacgtagcttttccgtcttcaccccaaataaagtcctaatgcatcagc

SEQ ID NO: 103813 - DNA, 1668 bp, Homo sapiens
  Payload ID: 403
  Gene Symbol: ASIC3
  Gene Name: acid sensing (proton gated) ion channel 3
  Uniprot ID: Q9UHC3
  ENST ID: ENST00000468325
  CDS Start-End: 120-1343
tctcttctcctctccttgcctggcctcctgaatcctatcttagcctccttagccccctgactgactctctctcgcttcttccaagcctctgtagctggttccgctcctgggttctggccatgaagcccacctcaggcccagaggaggcccggcggccagcctcggacatccgcgtgttcgccagcaactgctcgatgcacgggctgggccacgtcttcgggccaggcagcctgagcctgcgccgggggatgtgggcagcggccgtggtcctgtcagtggccaccttcctctaccaggtggctgagagggtgcgctactacagggagttccaccaccagactgccctggatgagcgagaaagccaccggctcatcttcccggctgtcaccctgtgcaacatcaacccactgcgccgctcgcgcctaacgcccaacgacctgcactgggctgggtctgcgctgctgggcctggatcccgcagagcacgccgccttcctgcgcgccctgggccggccccctgcaccgcccggcttcatgcccagtcccacctttgacatggcgcaactctatgcccgtgctgggcactccctggatgacatgctgctggactgtcgcttccgtggccaaccttgtgggcctgagaacttcaccacgatcttcacccggatgggaaagtgctacacatttaactctggcgctgatggggcagagctgctcaccactactaggggtggcatgggcaatgggctggacatcatgctggacgtgcagcaggaggaatatctacctgtgtggagggacaatgaggagaccccgtttgaggtggggatccgagtgcagatccacagccaggaggagccgcccatcatcgatcagctgggcttgggggtgtccccgggctaccagacctttgtttcttgccagcagcagcagctgagcttcctgccaccgccctggggcgattgcagttcagcatctctgaaccccaactatgagccagagccctctgatcccctaggctcccccagccccagccccagccctccctatacccttatggggtgtcgcctggcctgcgaaacccgctacgtggctcggaagtgcggctgccgaatggtgtacatgccaggcgacgtgccagtgtgcagcccccagcagtacaagaactgtgcccacccggccatagggagaacgtgctggccctggacatcttctttgaggccctcaactatgagaccgtggagcagaagaaggcctatgagatgtcagagctgcttggtgacattgggggccagatggggctgttcatcggggccagcctgctcaccatcctcgagatcctagactacctctgtgaggtgttccgagacaaggtcctgggatatttctggaaccgacagcactcccaaaggcactccagcaccaatctgcttcaggaagggctgggcagccatcgaacccaagttccccacctcagcctgggccccagacctcccacccctccctgtgccgtcaccaagactctctccgcctcccaccgcacctgctaccttgtcacacagctctagacctgctgtctgtgtcctcggagccccgccctgacatcctggacatgcctagcctgcacgtagcttttccgtcttcaccccaaataaagtcctaatgcatc

SEQ ID NO: 103814 - DNA, 502 bp, Homo sapiens
  Payload ID: 403
  Gene Symbol: ASIC3
  Gene Name: acid sensing (proton gated) ion channel 3
  ENST ID: ENST00000485929
  CDS Start-End: 1-434
cggaagtgcggctgccgaatggtgtacatgccaggcgacgtgccagtgtgcagcccccagcagtacaagaactgtgcccacccggccatagggagaacgtgctggccctggacatcttctttgaggccctcaactatgagaccgtggagcagaagaaggcctatgagatgtcagagctgcttggtgacattgggggccagatggggctgttcatcggggccagcctgctcaccatcctcgagatcctagactacctctgtgaggtgttccgagacaaggtcctgggatatttctggaaccgacagcactcccaaaggcactccagcaccaatctgcttcaggaagggctgggcagccatcgaacccaagttccccacctcagcctgggccccagctctagacctgctgtctgtgtcctcggagccccgccctgacatcctggacatgcctagcctgcacgtagcttttccgtcttcaccccaaataaagtcctaatgcatca

SEQ ID NO: 103815 - DNA, 2684 bp, Homo sapiens
  Payload ID: 404
  Gene Symbol: ASIC4
  Gene Name: acid sensing (proton gated) ion channel family member 4
  Uniprot ID: Q96FT7
  ENST ID: ENST00000347842
  CDS Start-End: 15-1958
gggctccggagcacatgctgagcggagcggctggggctgcgcggcgtggcggagcagcgctcgctccctcgctcactcgctcgctcgcagggacacacgcaggggctgacagctgtgctggtgctgataagggaagccacaaggagacgatcgaggagagagacaagcggcagcagaggcagcagcggcagaggcagcaccagggctgcggagctgctgggagtgggagtgactcccccacctcgggcccccaccctgtccctgtcctcttcccgcttgccctgagtttagaagagcagccgctgccaccactgccactcgggagggcaccagggctgctggctagggagggacagggcagggaggctctggccagtcccagcagccggggacagatgccgatcgagattgtgtgcaaaatcaaatttgctgaggaggatgcgaaacccaaggagaaggaggcaggggatgagcagagcctcctcggggctgttgcccctggagcagccccccgagacctggccacctttgccagcaccagcaccctgcatggactgggccgggcctgtggcccaggcccccacggactgcgcagaaccctgtgggcactggccctactcacctcgctggctgccttcctgtaccaggcggctggcctggcccggggctacctgacccggcctcacctggtggcaatggaccccgctgccccagccccagtggcgggcttcccggctgtcaccctctgcaatatcaaccgcttccggcattcggcactcagcgatgccgacatcttccacctggccaatctgacagggctgccccccaaagaccgggatgggcaccgtgcggctggcctgcgctacccagagcctgacatggtagacatcctcaaccgcactggccaccagctcgccgacatgcttaagagctgcaacttcagtgggcatcactgctccgccagcaacttctctgtggtctatactcgctatgggaagtgttacaccttcaacgcggacccgcggagctcgctgcccagccgggcagggggcatgggcagtggcctggagatcatgctggacatccagcaggaggagtacctgcccatctggagggagacaaatgagacgtcgtttgaggcaggtattcgggtgcagatccacagccaggaggagccgccctacatccaccagctggggttcggggtgtccccaggcttccagacctttgtgtcctgccaggaacagcggctgacctacctgccccagccctggggcaactgccgcgcagagagtgagctcagggagcctgagcttcagggctactcggcctacagtgtgtctgcctgccggctgcgctgtgaaaaggaggccgtgcttcagcgctgccactgccggatggtgcacatgccagactccctgggtgggggccctgagggcccgtgcttctgccccaccccctgcaacctgacacgctatgggaaagagatctccatggtcaggatccccaacaggggctcagcccggtacctggcgaggaagtacaaccgcaacgagacctacatacgggagaacttcctggtcctagatgtcttctttgaggccctgacctctgaagccatggagcagcgagcagcctatggcctgtcagccctgctgggagacctcgggggacagatgggcctgttcattggggccagcatcctcacgttgctggagatcctcgactacatctatgaggtgtcctgggatcgactgaagcgggtatggaggcgtcccaagacccccctgcggacctccactgggggcatctccactttggggcttcaggagctgaaggaacagagtccctgcccgagccggggccgagtggagggtgggggggtcagcagtctgctccccaatcaccaccacccccacggtcccccaggaggtctctttgaagattttgcttgctaggacggtgctgtgactgaaaggacccaggagtctgggacccctcctgggatccccagcacattctcctgctcctgggagaggcctgggggcggtgctcactgggagggccaggactcagttcctgctctcatcctcccctgccctgatgtcagctgctttgcacaaaggtccttcttgtccacaccccttatccccaggctggtgccccgggagggctggagaccaggccatgggccctcacggagaggaagggaaggaaggagagggagggggaggatagagcccatcccagccggggagggggagccctctgtacatttgtaaatatttagggaaagccgggtggggggaggggatacagatgtagaaggtgggtagggctacaggggtgggtgatttagggacagccagggtcccagccccaatgtcagcaggatagggagagccccaggactcaggagtgctgggctggtcctacttcctgcccctctccaggcccagctcccctcttggcagggggagaggatggcccagcaggcctggcccagctcccagttccccctgcaccagccccacccctagagtcccttctatagggagggggcaggagaccttccagacttcggctgagcttggagggtgggaagggagccttctcagtcctctctccctccagtctgattttataaagtgctgacgagattgggaataaagaggcataaagaa

SEQ ID NO: 103816 - DNA, 2741 bp, Homo sapiens
  Payload ID: 404
  Gene Symbol: ASIC4
  Gene Name: acid sensing (proton gated) ion channel family member 4
  Uniprot ID: Q96FT7
  ENST ID: ENST00000358078
  CDS Start-End: 15-2015
gggctccggagcacatgctgagcggagcggctggggctgcgcggcgtggcggagcagcgctcgctccctcgctcactcgctcgctcgcagggacacacgcaggggctgacagctgtgctggtgctgataagggaagccacaaggagacgatcgaggagagagacaagcggcagcagaggcagcagcggcagaggcagcaccagggctgcggagctgctgggagtgggagtgactcccccacctcgggcccccaccctgtccctgtcctcttcccgcttgccctgagtttagaagagcagccgctgccaccactgccactcgggagggcaccagggctgctggctagggagggacagggcagggaggctctggccagtcccagcagccggggacagatgccgatcgagattgtgtgcaaaatcaaatttgctgaggaggatgcgaaacccaaggagaaggaggcaggggatgagcagagcctcctcggggctgttgcccctggagcagccccccgagacctggccacctttgccagcaccagcaccctgcatggactgggccgggcctgtggcccaggcccccacggactgcgcagaaccctgtgggcactggccctactcacctcgctggctgccttcctgtaccaggcggctggcctggcccggggctacctgacccggcctcacctggtggcaatggaccccgctgccccagccccagtggcgggcttcccggctgtcaccctctgcaatatcaaccgcttccggcattcggcactcagcgatgccgacatcttccacctggccaatctgacagggctgccccccaaagaccgggatgggcaccgtgcggctggcctgcgctacccagagcctgacatggtagacatcctcaaccgcactggccaccagctcgccgacatgcttaagagctgcaacttcagtgggcatcactgctccgccagcaacttctctgtggtctatactcgctatgggaagtgttacaccttcaacgcggacccgcggagctcgctgcccagccgggcagggggcatgggcagtggcctggagatcatgctggacatccagcaggaggagtacctgcccatctggagggagacaaatgagacgtcgtttgaggcaggtattcgggtgcagatccacagccaggaggagccgccctacatccaccagctggggttcggggtgtccccaggcttccagacctttgtgtcctgccaggaacagcggctgacctacctgccccagccctggggcaactgccgcgcagagagtgagctcagggagcctgagcttcagggctactcggcctacagtgtgtctgcctgccggctgcgctgtgaaaaggaggccgtgcttcagcgctgccactgccggatggtgcacatgccaggcaatgagaccatctgcccaccaaatatctacatcgagtgtgcagaccacacactggactccctgggtgggggccctgagggcccgtgcttctgccccaccccctgcaacctgacacgctatgggaaagagatctccatggtcaggatccccaacaggggctcagcccggtacctggcgaggaagtacaaccgcaacgagacctacatacgggagaacttcctggtcctagatgtcttctttgaggccctgacctctgaagccatggagcagcgagcagcctatggcctgtcagccctgctgggagacctcgggggacagatgggcctgttcattggggccagcatcctcacgttgctggagatcctcgactacatctatgaggtgtcctgggatcgactgaagcgggtatggaggcgtcccaagacccccctgcggacctccactgggggcatctccactttggggcttcaggagctgaaggaacagagtccctgcccgagccggggccgagtggagggtgggggggtcagcagtctgctccccaatcaccaccacccccacggtcccccaggaggtctctttgaagattttgcttgctaggacggtgctgtgactgaaaggacccaggagtctgggacccctcctgggatccccagcacattctcctgctcctgggagaggcctgggggcggtgctcactgggagggccaggactcagttcctgctctcatcctcccctgccctgatgtcagctgctttgcacaaaggtccttcttgtccacaccccttatccccaggctggtgccccgggagggctggagaccaggccatgggccctcacggagaggaagggaaggaaggagagggagggggaggatagagcccatcccagccggggagggggagccctctgtacatttgtaaatatttagggaaagccgggtggggggaggggatacagatgtagaaggtgggtagggctacaggggtgggtgatttagggacagccagggtcccagccccaatgtcagcaggatagggagagccccaggactcaggagtgctgggctggtcctacttcctgcccctctccaggcccagctcccctcttggcagggggagaggatggcccagcaggcctggcccagctcccagttccccctgcaccagccccacccctagagtcccttctatagggagggggcaggagaccttccagacttcggctgagcttggagggtgggaagggagccttctcagtcctctctccctccagtctgattttataaagtgctgacgagattgggaataaagaggcataaagaa

SEQ ID NO: 103817 - DNA, 1692 bp, Homo sapiens
  Payload ID: 405
  Gene Symbol: ASIC5
  Gene Name: acid sensing (proton gated) ion channel family member 5
  Uniprot ID: Q9NY37
  ENST ID: ENST00000537611
  CDS Start-End: 48-1565
atgaaaattgggttaccctgaggactcttgcttaactgaaatcacaaatggagcagacagaaaaatcaaaagtatatgctgagaacggactcttagaaaagataaagctttgcctttcaaagaaaccactgccatctcccactgagcgaaagaagtttgaccatgactttgccatctccacttcctttcatgggatacacaatattgttcagaaccggagcaaaattcgcagggtgctctggttggtggtggttctgggctcagtctcacttgtgacatggcagatctacattcgcttgctcaactacttcacatggccaaccacaacgtccattgaggttcaatatgtggaaaagatggagttcccagctgtgacattttgtaatttgaacaggttccaaacagatgctgtagccaaatttggtgttatttttttcttatggcacattgtatccaaagtcctccatcttcaagaaattactgccaattccactggctctagagaggctactgattttgctgcaagtcaccaaaacttcagcattgtggaatttatcaggaacaaaggtttttatctcaacaatagcactttgttggactgtgagttttttggaaagccatgtagcccaaaggattttgcacatgtcttcactgaatatggaaattgttttacttttaatcatggtgaaactctccaagcaaagagaaaagtgagtgtctctggaagaggtttgagcttactcttcaatgtgaatcaggaggcattcactgataacccagcccttggtttcgttgatgctgggatcatctttgttatccattcaccaaagaaggtgccacagtttgatgggttaggcttgttgtcacctgtgggaatgcacgcaagggtaaccatccgccaagtgaagacagttcatcaagaatacccttggggagaatgcaatcctaacatcaagctgcagaattttagcagctacagcacttctggttgcttgaaggaatgcaaagcccagcacataaaaaagcaatgtggatgtgtgccttttcttcttcctggatatgggatagaatgtgacctacaaaagtacttcagctgtgtttctcctgtacttgaccacattgaatttaaggatttatgtacagtaggaacacataactctagctgccccgtttcttgtgaagaaatagaatacccggccactatttcttattcctcttttccaagtcaaaaagctttgaaatatctttccaagaagttgaatcaaagccggaaatacatcagggagaatcttgtaaaaattgaaattaactatagtgacctaaactataagataacccagcagcaaaaggcggtgagtgtgtctgagttacttgcagatcttggtggtcagctgggtctattttgtggggccagtctgatcacgatcatagaaattattgaatatctattcaccaatttctactggatatgcattttctttttgctgaagatatctgaaatgacccagtggactcctccacctcagaatcatctgggaaataaaaataggatagaggagtgttaatggtcacttagaataaaatagtttccttttcatgataccttcagatttatcttgactaattcattgttacgtcacttttctatagttttgagagttcgataaaagccattaaagatatgtatctctt

SEQ ID NO: 103818 - DNA, 1282 bp, Homo sapiens
  Payload ID: 406
  Gene Symbol: ASIC5
  Gene Name: Acid sensing ion channel subunit family member 5
  ENST ID: ENST00000572394
  CDS Start-End: 48-1282
atgaaaattgggttaccctgaggactcttgcttaactgaaatcacaaatggagcagacagaaaaatcaaaagtatatgctgagaacggactcttagaaaagataaagctttgcctttcaaagaaaccactgccatctcccactgagcgaaagaagtttgaccatgactttgccatctccacttcctttcatgggatacacaatattgttcagaaccggagcaaaattcgcagggtgctctggttggtggtggttctgggctcagtctcacttgtgacatggcagatctacattcgcttgctcaactacttcacatggccaaccacaacgtccattgaggttcaatatgtggaaaagatggagttcccagctgtgacattttgtaatttgaacaggttccaaacagatgctgtagccaaatttggtgttatttttttcttatggcacattgtatccaaagtcctccatcttcaagaaattactgccaattccactggctctagagaggctactgattttgctgcaagtcaccaaaacttcagcattgtggaatttatcaggaacaaaggtttttatctcaacaatagcactttgttggactgtgagttttttggaaagccatgtagcccaaaggattttgcacatgtcttcactgaatatggaaattgttttacttttaatcatggtgaaactctccaagcaaagagaaaagtgagtgtctctggaagaggtttgagcttactcttcaatgtgaatcaggaggcattcactgataacccagcccttggtttcgttgatgctgggatcatctttgttatccattcaccaaagaaggtgccacagtttgatgggttaggcttgttgtcacctgtgggaatgcacgcaagggtaaccatccgccaagtgaagacagttcatcaagaatacccttggggagaatgcaatcctaacatcaagctgcagaattttagcagctacagcacttctggttgcttgaaggaatgcaaagcccagcacataaaaaagcaatgtggatgtgtgccttttcttcttcctggatatgggatagaatgtgacctacaaaagtacttcagctgtgtttctcctgtacttgaccacattgaatttaaggatttatgtacagtaggaacacataactctagctgccccgtttcttgtgaagaaatagaatacccggccactatttcttattcctcttttccaagtcaaaaagctttgaaatatctttccaagaagttgaatcaaagccggaaatacatcag

SEQ ID NO: 103819 - DNA, 2001 bp, Homo sapiens
  Payload ID: 407
  Gene Symbol: ANP32A
  Gene Name: acidic (leucine-rich) nuclear phosphoprotein 32 family, member A
  ENST ID: ENST00000409628
  CDS Start-End: 118-357
gagaaccgagcggagctggttgagccttcaaagtcctaaaacgcgcggccgtgggttcggggtttattgattgaattccgccggcgcgggagcctctgcagagagagagcgcgagagatggagatgggcagacggattcatttagagctgcggaacaggacgccctctgatgtgaaagaacttgtcctggacaacagtcggtcgaatgaaggcaaactcgaaggcctcacagatgaatttgaagaactggaattcttaagtacaatcaacgtaggcctcacctcaatcgcaaacttaccaaagttaaacaaacttaagaagtattggcagaaaagtgtccgaacctcacgcatctaaatttaagtggcaacaaaattaaagacctcagcacaatagagccactgaaaaagttagaaaacctcaagagcttagaccttttcaattgcgaggtaaccaacctgaacgactaccgagaaaatgtgttcaagctcctcccgcaactcacatatctcgacggctatgaccgggacgacaaggaggcccctgactcggatgctgagggctacgtggagggcctggatgatgaggaggaggatgaggatgaggaggagtatgatgaagatgctcaggtagtggaagacgaggaggacgaggatgaggaggaggaaggtgaagaggaggacgtgagtggagaggaggaggaggatgaagaaggttataacgatggagaggtagatgacgaggaagatgaagaagagcttggtgaagaagaaaggggtcagaagcgaaaacgagaacctgaagatgagggagaagatgatgactaagtggaataacctattttgaaaaattcctattgtgatttgactgtttttacccatatcccctctcccccccccctccaatcctgccccctgaaacttatttttttctgattgtaacgttgctgtgggaacgagaggggaagagtgtactgggggttgcggggggagggatggcgggtgggggtggaataaaatactatttttactgccactctttatttttttcccctactttttctttgtgtccggtttttgtccctgtaaatgcgatagctaagtacacactaagtgagcatttgttcctgactctcaaagaggatggtttggagttctcttacgtttcctggtatttcccaagtctcttgggttggttggaaggctgtggctggtctcagtttggttactcaatgcccaggaggggctgagcaccagccatatcttttgctttggttcacatgatgatacctgcttttctcaggcctgctagaggcatccaacgccctggtttgtaaatagcaacctaaaggcgtattttggcactggtctggggacattccccatctctcatcccttttcccccttcacagatggtggtgggcttcgctctacaaagaggactctgatgttactcttgagcttatgagccagagagctgaaaaccgcaggcttgttgtgttaagttacaaggaaaatggatttggtaattaaaattagaagaaacacaccttcaaacttcaacttctttaaaagaaaaaaaaaactgtcctatcttgttctgtaaaatattagaacgctttgttttacaaaaaatgatgagagaattcttccacatgtacttctgtgcttagaacatttttacggacctaagcgctggagacgttgctgcatgtcggctgggttttttttttcatacacccgagcacggaaaaactaacgcaaaattgtattttcttacctagtggaaatctgaaatgactgcaaattcctagtgaatgtacaggtttgctttcgtgtccctcttctggttgctttagaagtgacgtgtaatttctgaacccatgtttcatctgtataaaagaacatctgcaccagtttttctcctgcccctcagaagagccaaactttgagttttatgtctgtttgtcattgataaatttcaataaatctttttatacaa

SEQ ID NO: 103820 - DNA, 2440 bp, Homo sapiens
  Payload ID: 407
  Gene Symbol: ANP32A
  Gene Name: acidic (leucine-rich) nuclear phosphoprotein 32 family, member A
  Uniprot ID: P39687
  ENST ID: ENST00000465139
  CDS Start-End: 145-894
agtgtgcgccgcgggtgctgggggctcgagaaccgagcggagctggttgagccttcaaagtcctaaaacgcgcggccgtgggttcggggtttattgattgaattccgccggcgcgggagcctctgcagagagagagcgcgagagatggagatgggcagacggattcatttagagctgcggaacaggacgccctctgatgtgaaagaacttgtcctggacaacagtcggtcgaatgaaggcaaactcgaaggcctcacagatgaatttgaagaactggaattcttaagtacaatcaacgtaggcctcacctcaatcgcaaacttaccaaagttaaacaaacttaagaagcttgaactaagcgataacagagtctcagggggcctggaagtattggcagaaaagtgtccgaacctcacgcatctaaatttaagtggcaacaaaattaaagacctcagcacaatagagccactgaaaaagttagaaaacctcaagagcttagaccttttcaattgcgaggtaaccaacctgaacgactaccgagaaaatgtgttcaagctcctcccgcaactcacatatctcgacggctatgaccgggacgacaaggaggcccctgactcggatgctgagggctacgtggagggcctggatgatgaggaggaggatgaggatgaggaggagtatgatgaagatgctcaggtagtggaagacgaggaggacgaggatgaggaggaggaaggtgaagaggaggacgtgagtggagaggaggaggaggatgaagaaggttataacgatggagaggtagatgacgaggaagatgaagaagagcttggtgaagaagaaaggggtcagaagcgaaaacgagaacctgaagatgagggagaagatgatgactaagtggaataacctattttgaaaaattcctattgtgatttgactgtttttacccatatcccctctcccccccccctccaatcctgccccctgaaacttatttttttctgattgtaacgttgctgtgggaacgagaggggaagagtgtactgggggttgcggggggagggatggcgggtgggggtggaataaaatactatttttactgccactctttatttttttcccctactttttctttgtgtccggtttttgtccctgtaaatgcgatagctaagtacacactaagtgagcatttgttcctgactctcaaagaggatggtttggagttctcttacgtttcctggtatttcccaagtctcttgggttggttggaaggctgtggctggtctcagtttggttactcaatgcccaggaggggctgagcaccagccatatcttttgctttggttcacatgatgatacctgcttttctcaggcctgctagaggcatccaacgccctggtttgtaaatagcaacctaaaggcgtattttggcactggtctggggacattccccatctctcatcccttttcccccttcacagatggtggtgggcttcgctctacaaagaggactctgatgttactcttgagcttatgagccagagagctgaaaaccgcaggcttgttgtgttaagttacaaggaaaatggatttggtaattaaaattagaagaaacacaccttcaaacttcaacttctttaaaagaaaaaaaaaactgtcctatcttgttctgtaaaatattagaacgctttgttttacaaaaaatgatgagagaattcttccacatgtacttctgtgcttagaacatttttacggacctaagcgctggagacgttgctgcatgtcggctgggttttttttttcatacacccgagcacggaaaaactaacgcaaaattgtattttcttacctagtggaaatctgaaatgactgcaaattcctagtgaatgtacaggtttgctttcgtgtccctcttctggttgctttagaagtgacgtgtaatttctgaacccatgtttcatctgtataaaagaacatctgcaccagtttttctcctgcccctcagaagagccaaactttgagttttatgtctgtttgtcattgataaatttcaataaatctttttatacaatttttttggggatggcttctttgagtccaacaggccattgatcttttcaagatgcattccagatgaactgctaggtgagggggaagcttcatttttgttacctgatagaatagcttttcttatgagatatatataatgtgatactatgtttggatatttttggtcttaaagcaagactcagtggtgtatcttcattaaaagcttcctttaaaaaagttacagagttactaaaaaaacaagtacccaaacaatcaagttgggccaaccttggaaccttgttttgaatatctttcattgttttgtttgtcgtattgtaaaaagaatgtatggttgaaaactcaggaatgtttataaaacaaattatttcacaaa

SEQ ID NO: 103821 - DNA, 724 bp, Homo sapiens
  Payload ID: 407
  Gene Symbol: ANP32A
  Gene Name: acidic (leucine-rich) nuclear phosphoprotein 32 family, member A
  ENST ID: ENST00000560303
  CDS Start-End: 136-669
cgcgggtgctgggggctcgagaaccgagcggagctggttgagccttcaaagtcctaaaacgcgcggccgtgggttcggggtttattgattgaattccgccggcgcgggagcctctgcagagagagagcgcgagagatggagatgggcagacggattcatttagagctgcggaacaggacgccctctgatgtgaaagaacttgtcctggacaacagtcggtcgaatgaaggcaaactcgaaggcctcacagatgaatttgaagaactggaattcttaagtacaatcaacgtaggcctcacctcaatcgcaaacttaccaaagttaaacaaacttaagaagcttgaactaagcgataacagagtctcagggggcctggaagtattggcagaaaagtgtccgaacctcacgcatctaaatttaagtggcaacaaaattaaagacctcagcacaatagagccactgaaaaagttagaaaacctcaagagcttagaccttttcaattgcgaggtaaccaacctgaacgactaccgagaaaatgtgttcaagctcctcccgcaactcacatatctcgacggctatgaccgggacgacaaggaggcccctgactcggatgctgagggctacgtggagggcctggatgatgaggaggaggatgaggatggtgggtgacagggatgaagaaggttataacgatggagaggtagatgacgaggaagatgaagaa

SEQ ID NO: 103822 - DNA, 1463 bp, Homo sapiens
  Payload ID: 408
  Gene Symbol: ANP32B
  Gene Name: acidic (leucine-rich) nuclear phosphoprotein 32 family, member B
  Uniprot ID: Q92688
  ENST ID: ENST00000339399
  CDS Start-End: 196-951
ctccgctcccgtgagtaacttggctccgggggctccgctcgcctgcccgcacgccgcccgccacccaggaccgcgccgccggcctccgccgctagcaaacccttccgacggccctcgctgcgcaagccgggacgcctctcccccctccgcccccgccgcggaaagttaagtttgaagaggggggaagaggggaacatggacatgaagaggaggatccacctggagctgaggaaccggaccccggcagctgttcgagaacttgtcttggacaattgcaaatcaaatgatggaaaaattgagggcttaacagctgaatttgtgaacttagagttcctcagtttaataaatgtaggcttgatctcagtttcaaatctccccaagctgcctaaattgaaaaagcttgaactcagtgaaaatagaatctttggaggtctggacatgttagctgaaaaacttccaaatctcacacatctaaacttaagtggaaataaactgaaagatatcagcaccttggaacctttgaaaaagttagaatgtctgaaaagcctggacctctttaactgtgaggttaccaacctgaatgactaccgagagagtgtcttcaagctcctgccccagcttacctacttggatggctatgaccgagaggaccaggaagcacctgactcagatgccgaggtggatggtgtggatgaagaggaggaggacgaagaaggagaagatgaggaagacgaggacgatgaggatggtgaagaagaggagtttgatgaagaagatgatgaagatgaagatgtagaaggggatgaggacgacgatgaagtcagtgaggaggaagaagaatttggacttgatgaagaagatgaagatgaggatgaggatgaagaggaggaagaaggtgggaaaggtgaaaagaggaagagagaaacagatgatgaaggagaagatgattaagaccccagatgacctgcagaaacagaactgttcagtattggttggactgctcatggattttgtagctgtttaaaaaaaaaaaaaaggtagctgtgatacaaaccccaggacacccacccacccaaagagccaaagaatagttcctgtgacattccgccttccttccatgtagtccctcttggtaatctaccaccaagcttgtggacttcaccccaacaaaattgtaagcgttgttaggtttttgtgtaagattcttgctgtagcgtggatagctgtgattggtgagtcaaccgtctgtggctaccagttacactgagattgtaacagcatttttactttctgtacaacaaaaaagctttgtaaataaaatcttaacattttgggtctgttttttcatgctttgctttttaattattattattattttttttacattaggacattttatgtgacaactgccaaaaaagtatttttaagaatttaagcgaaataaacagttactctttggtaaa

SEQ ID NO: 103823 - DNA, 960 bp, Homo sapiens
  Payload ID: 409
  Gene Symbol: ANP32D
  Gene Name: acidic (leucine-rich) nuclear phosphoprotein 32 family, member D
  Uniprot ID: O95626
  ENST ID: ENST00000266594
  CDS Start-End: 1-396
atggagatgggcaaatggattcatttagagctgcggaacaggacgccctccgatgtgaaagaacttttcctggacaacagtcagtcaaatgaaggcaaattggaaggcctcacagatgaatttgaagaactggaattattaaatacaatcaacataggcctcacctcaattgcaaacttgccaaagttaaacaaacttaagaagcttgaactaagcagtaacagagcctcagtgggcctagaagtattggcagaaaagtgtccaaacctcatacatctaaatttaagtggcaacaaaattaaagacctcagcacaatagagcccctgaaaaagttagaaaacctcgagagcttagaccttttcacttgcgaggtaaccaacctgaacaactactgagaaaagatgttcaagctcctcctgcaactcacatatctcaacggctgtgacccggatgacaaggaggcccctaactcggatggtgagggctttgtggagtgcctggatgacaaggaggaggatgaggatgaggaggagtatgatgaagatgctcaggtaatggaagatgaggaggacgaggatgaggaggaggaacgtgaagaggaggacgtgagtggagacgaggaggagaaggatgaaggttataacaatggagaggtagatgatgaggaagatgaagaagagcttggtgaagaagaaaggggtcagaagcgaaaataagaaactgaagatgagggagaagacgatgcctaagtggaataatctattttgaaaaattccttttgtgattttactgtttttagccgtatcccctcccccactccaatcctgccccctgaaacttatttttttctgattgtaacgttgctgtgggagcaagagaggaaaagtgtactgggggttgtgagggaagggaggggaggagggggtggaataaaatactatttttactgccactcttta

SEQ ID NO: 103824 - DNA, 1048 bp, Homo sapiens
  Payload ID: 410
  Gene Symbol: ANP32E
  Gene Name: acidic (leucine-rich) nuclear phosphoprotein 32 family, member E
  ENST ID: ENST00000369114
  CDS Start-End: 300-749
ggaactgcgggtgtgtgtgtgtatgtgtgtgtgtatgtgtgtgcgcgcgtgcgtgcgtgtgtgtgcgcgcgctagtgtgtggacaaggaggtgggggcagctgagttagagtcccaactcttggactccatttgctattctcttctttctcccccacacctatctggtggtggtagtgggcgtttatatttgcgttccttttcattcatttctaaatctcttaaaaattttgggttgggggtattggggaaggcaggaaagggaaaaggagagtagtagctgaagagcaagaggaggacatggagatgaagaagaagattaacctggagttaaggaacagatccccggaggaggtgacagagttagtccttgataattgcctgtgtgtcaatggggaaattgaaggcctgaatgatactttcaaagaactagaatttctgagtatggctaatgtggaactaagttcgctggcccggcttcccagcttaaataaacttcgaaaattggagcttagtgataatataatttctggaggcttggaagtcctggcagagaaatgtccaaatcttacctacctcaatctgagtggaaacaaaataaaagatctcagtacagtagaagctctggatgaagaagatgatgatgactatgttgaagaaggggaagaagaggaagaagaggaaggaggtcttcgaggggagaagaggaaacgagatgctgaagacgatggagaggaagaagatgactagatcattctaagaccagattctctaatgtttctgggtgtgcaatagagtgatcacatctttgtttcttcatgtacgatagctatccctacagaagataatgtgtaactttttataggaaaagtgtggttttactatttttgccttatcattccaaataagaactagtctgttaatgatcatattgtatgtagagaaaaattttcattgactcccattgtggaattccctagcaatttatttagacttaattttttaaattcaagcttactgtattagtcatttttagcccataattaaaa

SEQ ID NO: 103825 - DNA, 708 bp, Homo sapiens
  Payload ID: 410
  Gene Symbol: ANP32E
  Gene Name: acidic (leucine-rich) nuclear phosphoprotein 32 family, member E
  ENST ID: ENST00000369115
  CDS Start-End: 68-478
ccattgaaggggaaggaactgcgggaaagggaaaaggagagtagtagctgaagagcaagaggaggacatggagatgaagaagaagattaacctggagttaaggaacagatccccggaggaggaggataatgaagcgccggactctgaagaggaggatgatgaggatggcgatgaagatgatgaagaggaagaggaaaatgaagctggtccaccggaaggatatgaggaagaggaggaggaagaggaagaggaggatgaggatgaggatgaagatgaagatgaagcaggttcagagttgggagagggagaagaggaagtgggcctctcatacttaatgaaagaagaaattcaggatgaagaagatgatgatgactatgttgaagaaggggaagaagaggaagaagaggaagaaggaggtcttcgaggggagaagaggaaacgagatgctgaagacgatggagaggaagaagatgactagatcattctaagaccagattctctaatgtttctgggtgtgcaatagagtgatcacatctttgtttcttcatgtacgatagctatccctacagaagataatgtgtaactttttataggaaaagtgtggttttactatttttgccttatcattccaaataagaactagtctgttaatgatcatattgtatgtagagaaaaattttcattgactcccattgtggaattccctag

SEQ ID NO: 103826 - DNA, 1339 bp, Homo sapiens
  Payload ID: 410
  Gene Symbol: ANP32E
  Gene Name: acidic (leucine-rich) nuclear phosphoprotein 32 family, member E
  Uniprot ID: Q9BTT0
  ENST ID: ENST00000436748
  CDS Start-End: 237-920
tgcgcgcgctagtgtgtggacaaggaggtgggggcagctgagttagagtcccaactcttggactccatttgctattctcttctttctcccccacacctatctggtggtggtagtgggcgtttatatttgcgttccttttcattcatttctaaatctcttaaaaattttgggttgggggtattggggaaggcaggaaagggaaaaggagagtagtagctgaagagcaagaggaggacatggagatgaagaagaagattaacctggagttaaggaacagatccccggaggaggtgacagagttagtccttgataattgcctgtgtgtcaatggggaaattgaaggcctgaatgatactttcaaagaactagaatttctgagtatggctaatgtggaactaagttcgctggcccggcttcccagcttaaataaacttcgaaaacaaaatcttaaaaatttgaaaagtcttgacctgtttaactgtgagatcacaaacctggaagattatagagaaagtatttttgaactactgcagcaaatcacatacttagatggatttgatcaggaggataatgaagcgccggactctgaagaggaggatgatgaggatggcgatgaagatgatgaagaggaagaggaaaatgaagctggtccaccggaaggatatgaggaagaggaggaggaagaggaagaggaggatgaggatgaggatgaagatgaagatgaagcaggttcagagttgggagagggagaagaggaagtgggcctctcatacttaatgaaagaagaaattcaggatgaagaagatgatgatgactatgttgaagaaggggaagaagaggaagaagaggaagaaggaggtcttcgaggggagaagaggaaacgagatgctgaagacgatggagaggaagaagatgactagatcattctaagaccagattctctaatgtttctgggtgtgcaatagagtgatcacatctttgtttcttcatgtacgatagctatccctacagaagataatgtgtaactttttataggaaaagtgtggttttactatttttgccttatcattccaaataagaactagtctgttaatgatcatattgtatgtagagaaaaattttcattgactcccattgtggaattccctagcaatttatttagacttaattttttaaattcaagcttactgtattagtcatttttagcccataattaaaacatgatcacttttacacaggtgtagtatggtgcatttcattccttatttataaattaactgaaattacagtttgctataatataaaatgacaatagtctcttgagtggtaagttggttat

SEQ ID NO: 103827 - DNA, 616 bp, Homo sapiens
  Payload ID: 410
  Gene Symbol: ANP32E
  Gene Name: acidic (leucine-rich) nuclear phosphoprotein 32 family, member E
  ENST ID: ENST00000534437
  CDS Start-End: 1-303
gaggaggaggaagaggaagaggaggatgaggatgaggatgaagatgaagatgaagcaggttcagagttgggagagggagaagaggaagtgggcctctcatacttaatgaaagaagaaattcagagtgaaaaatcatatggatttttcaatcttcaaactgaatatttgaatttcaaggatgaagaagatgatgatgactatgttgaagaaggggaagaagaggaagaagaggaagaaggaggtcttcgaggggagaagaggaaacgagatgctgaagacgatggagaggaagaagatgactagatcattctaagaccagattctctaatgtttctgggtgtgcaatagagtgatcacatctttgtttcttcatgtacgatagctatccctacagaagataatgtgtaactttttataggaaaagtgtggttttactatttttgccttatcattccaaataagaactagtctgttaatgatcatattgtatgtagagaaaaattttcattgactcccattgtggaattccctagcaatttatttagacttaattttttaaattcaagcttactgtattagtcatttttagcccataattaaaacatgatcactttta

SEQ ID NO: 103828 - DNA, 621 bp, Homo sapiens
  Payload ID: 410
  Gene Symbol: ANP32E
  Gene Name: acidic (leucine-rich) nuclear phosphoprotein 32 family, member E
  ENST ID: ENST00000532744
  CDS Start-End: 279-621
tatgtgtgtgtgtatgtgtgtgcgcgcgtgcgtgcgtgtgtgtgcgcgcgctagtgtgtggacaaggaggtgggggcagctgagttagagtcccaactcttggactccatttgctattctcttctttctcccccacacctatctggtggtggtagtgggcgtttatatttgcgttccttttcattcatttctaaatctcttaaaaattttgggttgggggtattggggaaggcaggaaagggaaaaggagagtagtagctgaagagcaagaggaggacatggagatgaagaagaagattaacctggagttaaggaacagatccccggaggagttggagcttagtgataatataatttctggaggcttggaagtcctggcagagaaatgtccaaatcttacctacctcaatctgagtggaaacaaaataaaagatctcagtacagtagaagctctgcaaaatcttaaaaatttgaaaagtcttgacctgtttaactgtgagatcacaaacctggaagattatagagaaagtatttttgaactactgcagcaaatcacatacttagatggatttgatcaggaggataatgaagcgccggactctgaagaggaggatgatgagg

SEQ ID NO: 103829 - DNA, 908 bp, Homo sapiens
  Payload ID: 410
  Gene Symbol: ANP32E
  Gene Name: acidic (leucine-rich) nuclear phosphoprotein 32 family, member E
  ENST ID: ENST00000533654
  CDS Start-End: 170-667
tttgctattctcttctttctcccccacacctatctggtggtggtagtgggcgtttatatttgcgttccttttcattcatttctaaatctcttaaaaattttgggttgggggtattggggaaggcaggaaagggaaaaggagagtagtagctgaagagcaagaggaggacatggagatgaagaagaagattaacctggagttaaggaacagatccccggaggaggtgacagagttagtccttgataattgcctgtgtgtcaatggggaaattgaaggcctgaatgatactttcaaagaactagaatttctgagtatggctaatgtggaactaagttcgctggcccggcttcccagcttaaataaacttcgaaaattggagcttagtgataatataatttctggaggcttggaagtcctggcagagaaatgtccaaatcttacctacctcaatctgagtggaaacaaaataaaagatctcagtacagtagaagctctgatggcgatgaagatgatgaagaggaagaggaaaatgaagctggtccaccggaaggatatgaggaagaggaggaggaagaggaagaggaggatgaggatgaggatgaagatgaagatgaagcaggttcagagttgggagagggagaagaggaagtgggcctctcatacttaatgaaagaagaaattcagaagaaggaggtcttcgaggggagaagaggaaacgagatgctgaagacgatggagaggaagaagatgactagatcattctaagaccagattctctaatgtttctgggtgtgcaatagagtgatcacatctttgtttcttcatgtacgatagctatccctacagaagataatgtgtaactttttataggaaaagtgtggttttactatttttgccttatcattcca

SEQ ID NO: 103830 - DNA, 512 bp, Homo sapiens
  Payload ID: 410
  Gene Symbol: ANP32E
  Gene Name: acidic (leucine-rich) nuclear phosphoprotein 32 family, member E
  ENST ID: ENST00000534220
  CDS Start-End: 198-512
gagttagagtcccaactcttggactccatttgctattctcttctttctcccccacacctatctggtggtggtagtgggcgtttatatttgcgttccttttcattcatttctaaatctcttaaaaattttgggttgggggtattggggaaggcaggaaagggaaaaggagagtagtagctgaagagcaagaggaggacatggagatgaagaagaagattaacctggagttaaggaacagatccccggaggagcaaatcacatacttagatggatttgatcaggaggataatgaagcgccggactctgaagaggaggatgatgaggatggcgatgaagatgatgaagaggaagaggaaaatgaagctggtccaccggaaggatatgaggaagaggaggaggaagaggaagaggaggatgaggatgaggatgaagatgaagatgaagcaggttcagagttgggagagggagaagaggaagtgggcctctcatacttaatgaaagaagaaattcag

SEQ ID NO: 103831 - DNA, 3451 bp, Homo sapiens
  Payload ID: 410
  Gene Symbol: ANP32E
  Gene Name: acidic (leucine-rich) nuclear phosphoprotein 32 family, member E
  Uniprot ID: Q9BTT0
  ENST ID: ENST00000583931
  CDS Start-End: 371-1177
ggagtgtaggccagggggttggcggtgccgtgtcatggaggctcagtctctgagcagccattgaaggggaaggaactgcgggtgtgtgtgtgtatgtgtgtgtgtatgtgtgtgcgcgcgtgcgtgcgtgtgtgtgcgcgcgctagtgtgtggacaaggaggtgggggcagctgagttagagtcccaactcttggactccatttgctattctcttctttctcccccacacctatctggtggtggtagtgggcgtttatatttgcgttccttttcattcatttctaaatctcttaaaaattttgggttgggggtattggggaaggcaggaaagggaaaaggagagtagtagctgaagagcaagaggaggacatggagatgaagaagaagattaacctggagttaaggaacagatccccggaggaggtgacagagttagtccttgataattgcctgtgtgtcaatggggaaattgaaggcctgaatgatactttcaaagaactagaatttctgagtatggctaatgtggaactaagttcgctggcccggcttcccagcttaaataaacttcgaaaattggagcttagtgataatataatttctggaggcttggaagtcctggcagagaaatgtccaaatcttacctacctcaatctgagtggaaacaaaataaaagatctcagtacagtagaagctctgcaaaatcttaaaaatttgaaaagtcttgacctgtttaactgtgagatcacaaacctggaagattatagagaaagtatttttgaactactgcagcaaatcacatacttagatggatttgatcaggaggataatgaagcgccggactctgaagaggaggatgatgaggatggcgatgaagatgatgaagaggaagaggaaaatgaagctggtccaccggaaggatatgaggaagaggaggaggaagaggaagaggaggatgaggatgaggatgaagatgaagatgaagcaggttcagagttgggagagggagaagaggaagtgggcctctcatacttaatgaaagaagaaattcaggatgaagaagatgatgatgactatgttgaagaaggggaagaagaggaagaagaggaagaaggaggtcttcgaggggagaagaggaaacgagatgctgaagacgatggagaggaagaagatgactagatcattctaagaccagattctctaatgtttctgggtgtgcaatagagtgatcacatctttgtttcttcatgtacgatagctatccctacagaagataatgtgtaactttttataggaaaagtgtggttttactatttttgccttatcattccaaataagaactagtctgttaatgatcatattgtatgtagagaaaaattttcattgactcccattgtggaattccctagcaatttatttagacttaattttttaaattcaagcttactgtattagtcatttttagcccataattaaaacatgatcacttttacacaggtgtagtatggtgcatttcattccttatttataaattaactgaaattacagtttgctataatataaaatgacaatagtctcttgagtggtaagttggttatttttttagtaggtgatccaggaatctttagtttgaaggcagttacctttttttttttttttttttgactaagagtgtttggttgcttttttgtcacaagtaacttggaaaatagaagcagaatagtaaaggttctattcagcaacatagttcatggattttgtggaggttctattcagtaatatggttcatggatttagtggtgactgataagattttatttttgaaggaaaaattgcttatactaagtccagagacatgcaggtgagcccttttgtcaggctgcaaatcatgacatgccgatggttgtttattttgtttttaggtgtgcattctttttcttcttagcaattcctttatgatcaccttcccttcttgtttcactccctcccgctctctcaaaaggaacttgggaaacttgtgaaacccaggaaaacctttagtcttatacctcaactacctttcagtcctgtctgggttttaaataagtgaagtagaagaaattgagtattttctgacataagaatatattatcaatacagttttatgcagtaagctctccttaccataaatgtttcttggttgacaacatctaagacaatattagtgggatgaagaaagaaaagcaggggtgcttttggaagcagtgttagtgttcctcaaaagtcggaacaattgcctgttgatatattaataagacattaaagtcaaattttaatgttggcctctcaaatgatttggataccactctgcaaagtatttctaacctttaattcccagttttaaaacagatataataatagcatttaattggaatatactaggcagctggaaaagtatttgaaactaaattgacattaaaattaagatttgttttcaagtggatgtccattaaaagtagaaaaatatttgggataagtgagtgtgtgtttccttacatggctactaaataaaatataatgagtatacaagtatatctcctcttttgctatggaggctccatgttcaaggcaatggctttttaaatcttggctatctaaaattttttccctttgttttgaatatttgtaagtttttaagaagttagtgtcagcaaattaattgaagttatgcttctatactgggacatatttaaatactgagtatagtactgctgctactgcttctacaatgtaaaatgtatgacttggtgttttaaagtaaaaattatgatgttacttgtggagaaactaaaaatgttgtacaactgaccgaaagaaaacccttggggataagtttagtgaggggattggaatccccaaaaagataacatttttcttctgcttttaaaaactgaaattccctgttctagttcctaacaattctcattacatactatgccagattacaaaatacttatttttaaaatgaaatctatatattgactttcttatcaatcatcttactgtgcaatcaaaattagagtactttggtttgaaaacaacacttagagcctccagataacttttaagacttatttagctttgtgggtggtattttcatgcaaataagtaagggtgggttttatattttgtagaagttttcggtcctattttaatgctctttgtatggcagtatgtatatattgtgttaagttcctcaagaatctccttaaaaactttgaagttaatacttttgtgcaactgtgttttgaataaagccatgacagtgttaaaaacaaacaaaaaaatttgcagtactcctgattattcttttattgtttttgactgttccctgtttttttctgtgactgctgtaacttaaagtttttgaaactgaattgcttcaaataaattgaagatttgttataatgatta

SEQ ID NO: 103832 - DNA, 2989 bp, Homo sapiens
  Payload ID: 410
  Gene Symbol: ANP32E
  Gene Name: acidic (leucine-rich) nuclear phosphoprotein 32 family, member E
  Uniprot ID: Q9BTT0
  ENST ID: ENST00000616917
  CDS Start-End: 191-853
gtcagtcggagcggcaggtcgcgagagcagggctggtggccagcggggagcctcgcagaggaaagcatcagtcttgctgaaataagcctagaattggaacgtgacagagttagtccttgataattgcctgtgtgtcaatggggaaattgaaggcctgaatgatactttcaaagaactagaatttctgagtatggctaatgtggaactaagttcgctggcccggcttcccagcttaaataaacttcgaaaattggagcttagtgataatataatttctggaggcttggaagtcctggcagagaaatgtccaaatcttacctacctcaatctgagtggaaacaaaataaaagatctcagtacagtagaagctctgcaaaatcttaaaaatttgaaaagtcttgacctgtttaactgtgagatcacaaacctggaagattatagagaaagtatttttgaactactgcagcaaatcacatacttagatggatttgatcaggaggataatgaagcgccggactctgaagaggaggatgatgaggatggcgatgaagatgatgaagaggaagaggaaaatgaagctggtccaccggaaggatatgaggaagaggaggaggaagaggaagaggaggatgaggatgaggatgaagatgaagatgaagcaggttcagagttgggagagggagaagaggaagtgggcctctcatacttaatgaaagaagaaattcaggatgaagaagatgatgatgactatgttgaagaaggggaagaagaggaagaagaggaagaaggaggtcttcgaggggagaagaggaaacgagatgctgaagacgatggagaggaagaagatgactagatcattctaagaccagattctctaatgtttctgggtgtgcaatagagtgatcacatctttgtttcttcatgtacgatagctatccctacagaagataatgtgtaactttttataggaaaagtgtggttttactatttttgccttatcattccaaataagaactagtctgttaatgatcatattgtatgtagagaaaaattttcattgactcccattgtggaattccctagcaatttatttagacttaattttttaaattcaagcttactgtattagtcatttttagcccataattaaaacatgatcacttttacacaggtgtagtatggtgcatttcattccttatttataaattaactgaaattacagtttgctataatataaaatgacaatagtctcttgagtggtaagttggttatttttttagtaggtgatccaggaatctttagtttgaaggcagttacctttttttttttttttttttgactaagagtgtttggttgcttttttgtcacaagtaacttggaaaatagaagcagaatagtaaaggttctattcagcaacatagttcatggattttgtggaggttctattcagtaatatggttcatggatttagtggtgactgataagattttatttttgaaggaaaaattgcttatactaagtccagagacatgcaggtgagcccttttgtcaggctgcaaatcatgacatgccgatggttgtttattttgtttttaggtgtgcattctttttcttcttagcaattcctttatgatcaccttcccttcttgtttcactccctcccgctctctcaaaaggaacttgggaaacttgtgaaacccaggaaaacctttagtcttatacctcaactacctttcagtcctgtctgggttttaaataagtgaagtagaagaaattgagtattttctgacataagaatatattatcaatacagttttatgcagtaagctctccttaccataaatgtttcttggttgacaacatctaagacaatattagtgggatgaagaaagaaaagcaggggtgcttttggaagcagtgttagtgttcctcaaaagtcggaacaattgcctgttgatatattaataagacattaaagtcaaattttaatgttggcctctcaaatgatttggataccactctgcaaagtatttctaacctttaattcccagttttaaaacagatataataatagcatttaattggaatatactaggcagctggaaaagtatttgaaactaaattgacattaaaattaagatttgttttcaagtggatgtccattaaaagtagaaaaatatttgggataagtgagtgtgtgtttccttacatggctactaaataaaatataatgagtatacaagtatatctcctcttttgctatggaggctccatgttcaaggcaatggctttttaaatcttggctatctaaaattttttccctttgttttgaatatttgtaagtttttaagaagttagtgtcagcaaattaattgaagttatgcttctatactgggacatatttaaatactgagtatagtactgctgctactgcttctacaatgtaaaatgtatgacttggtgttttaaagtaaaaattatgatgttacttgtggagaaactaaaaatgttgtacaactgaccgaaagaaaacccttggggataagtttagtgaggggattggaatccccaaaaagataacatttttcttctgcttttaaaaactgaaattccctgttctagttcctaacaattctcattacatactatgccagattacaaaatacttatttttaaaatgaaatctatatattgactttcttatcaatcatcttactgtgcaatcaaaattagagtactttggtttgaaaacaacacttagagcctccagataacttttaagacttatttagctttgtgggtggtattttcatgcaaataagtaagggtgggttttatattttgtagaagttttcggtcctattttaatgctctttgtatggcagtatgtatatattgtgttaagttcctcaagaatctccttaaaaactttgaagttaatacttttgtgcaactgtgttttgaataaagccatgacagtgttaaaaac

SEQ ID NO: 103833 - DNA, 3054 bp, Homo sapiens
  Payload ID: 410
  Gene Symbol: ANP32E
  Gene Name: acidic (leucine-rich) nuclear phosphoprotein 32 family, member E
  ENST ID: ENST00000629042
  CDS Start-End: 371-781
ggagtgtaggccagggggttggcggtgccgtgtcatggaggctcagtctctgagcagccattgaaggggaaggaactgcgggtgtgtgtgtgtatgtgtgtgtgtatgtgtgtgcgcgcgtgcgtgcgtgtgtgtgcgcgcgctagtgtgtggacaaggaggtgggggcagctgagttagagtcccaactcttggactccatttgctattctcttctttctcccccacacctatctggtggtggtagtgggcgtttatatttgcgttccttttcattcatttctaaatctcttaaaaattttgggttgggggtattggggaaggcaggaaagggaaaaggagagtagtagctgaagagcaagaggaggacatggagatgaagaagaagattaacctggagttaaggaacagatccccggaggaggaggataatgaagcgccggactctgaagaggaggatgatgaggatggcgatgaagatgatgaagaggaagaggaaaatgaagctggtccaccggaaggatatgaggaagaggaggaggaagaggaagaggaggatgaggatgaggatgaagatgaagatgaagcaggttcagagttgggagagggagaagaggaagtgggcctctcatacttaatgaaagaagaaattcaggatgaagaagatgatgatgactatgttgaagaaggggaagaagaggaagaagaggaagaaggaggtcttcgaggggagaagaggaaacgagatgctgaagacgatggagaggaagaagatgactagatcattctaagaccagattctctaatgtttctgggtgtgcaatagagtgatcacatctttgtttcttcatgtacgatagctatccctacagaagataatgtgtaactttttataggaaaagtgtggttttactatttttgccttatcattccaaataagaactagtctgttaatgatcatattgtatgtagagaaaaattttcattgactcccattgtggaattccctagcaatttatttagacttaattttttaaattcaagcttactgtattagtcatttttagcccataattaaaacatgatcacttttacacaggtgtagtatggtgcatttcattccttatttataaattaactgaaattacagtttgctataatataaaatgacaatagtctcttgagtggtaagttggttatttttttagtaggtgatccaggaatctttagtttgaaggcagttacctttttttttttttttttttgactaagagtgtttggttgcttttttgtcacaagtaacttggaaaatagaagcagaatagtaaaggttctattcagcaacatagttcatggattttgtggaggttctattcagtaatatggttcatggatttagtggtgactgataagattttatttttgaaggaaaaattgcttatactaagtccagagacatgcaggtgagcccttttgtcaggctgcaaatcatgacatgccgatggttgtttattttgtttttaggtgtgcattctttttcttcttagcaattcctttatgatcaccttcccttcttgtttcactccctcccgctctctcaaaaggaacttgggaaacttgtgaaacccaggaaaacctttagtcttatacctcaactacctttcagtcctgtctgggttttaaataagtgaagtagaagaaattgagtattttctgacataagaatatattatcaatacagttttatgcagtaagctctccttaccataaatgtttcttggttgacaacatctaagacaatattagtgggatgaagaaagaaaagcaggggtgcttttggaagcagtgttagtgttcctcaaaagtcggaacaattgcctgttgatatattaataagacattaaagtcaaattttaatgttggcctctcaaatgatttggataccactctgcaaagtatttctaacctttaattcccagttttaaaacagatataataatagcatttaattggaatatactaggcagctggaaaagtatttgaaactaaattgacattaaaattaagatttgttttcaagtggatgtccattaaaagtagaaaaatatttgggataagtgagtgtgtgtttccttacatggctactaaataaaatataatgagtatacaagtatatctcctcttttgctatggaggctccatgttcaaggcaatggctttttaaatcttggctatctaaaattttttccctttgttttgaatatttgtaagtttttaagaagttagtgtcagcaaattaattgaagttatgcttctatactgggacatatttaaatactgagtatagtactgctgctactgcttctacaatgtaaaatgtatgacttggtgttttaaagtaaaaattatgatgttacttgtggagaaactaaaaatgttgtacaactgaccgaaagaaaacccttggggataagtttagtgaggggattggaatccccaaaaagataacatttttcttctgcttttaaaaactgaaattccctgttctagttcctaacaattctcattacatactatgccagattacaaaatacttatttttaaaatgaaatctatatattgactttcttatcaatcatcttactgtgcaatcaaaattagagtactttggtttgaaaacaacacttagagcctccagataacttttaagacttatttagctttgtgggtggtattttcatgcaaataagtaagggtgggttttatattttgtagaagttttcggtcctattttaatgctctttgtatggcagtatgtatatattgtgttaagttcctcaagaatctccttaaaaactttgaagttaatacttttgtgcaactgtgttttgaataaagccatgacagtgttaaaaacaaacaaaaaaatttgcagtactcctgattattcttttattgtttttgactgttccctgtttttttctgtgactgctgtaacttaaagtttttgaaactgaattgcttcaaataaattgaagatttgttataatgatt

SEQ ID NO: 103834 - DNA, 3213 bp, Homo sapiens
  Payload ID: 411
  Gene Symbol: ACRC
  Gene Name: acidic repeat containing
  Uniprot ID: Q96QF7
  ENST ID: ENST00000373695
  CDS Start-End: 538-2613
gattggggtggtagaggcctgagtgggaaaagtttgcaacaaaacaaatttaaatccttttcattttgcagagcaaagtttcggctttaaggtggggaagatacccaaagataaatgcagaatgtaaatgtagagatgtctctgcttttgagttctggctttcttttttttttctttttattttattttctttttctttttcttttttgagatggagtctagctctgtggcccaggctggagtgcagtggcacaatctcggctcactgcaagctctgcctcccgggttcacgccattttcctgcctcagcctctcgagtagctgggactacaggcgcccgccaccacgcctggctaattttttgtatttttaatagagatagggtttcaccgtgttagccaggatggtctcgatctcatgacattgtgatctgcccgcctcggcctcccaaagtgctgggattataggcgtgagccactgcgcccggccgagttctggctttcttaagaaagtgtatctttgtctttcactacagacatggatgggtgcaaaaaagagctgccccgcttgcaagagccggaggaggacgaggattgttacatccttaatgttcagtcaagcagtgatgacaccagtgggtcttctgtggccagaagagctccgaagagacaggcgagttgcatccttaatgtccagtcaaggagtggtgacaccagtgggtcttctgtggccagaagagctccgaagagacaggcgagctccgtggtagtgattgactctgattctgatgaggaatgtcacacccatgaagagaagaaagctaagttattggaaataaacagcgacgatgagagtccggagtgttgtcatgtgaagcctgccatccaggaacctccaatagttattagtgatgatgacaatgacgatgacaacggtaatgatttggaagttcccgacgacaacagtgatgattcagaagctcccgacgacaacagtgatgattcggaagctcctgacgacaacagtgatgattcggaagctcccgacgacaacagtgatgattcggaagctcccgacgacaatagtgatgattcggatgttcccgacgacaacagtgatgattcatccgacgacaacagtgatgattcatccgacgacaacagtgatgattcggatgttcccgacgacaagagtgatgattcggatgttcccgacgacagcagtgatgattcggatgttcccgacgacagcagtgatgattcggaagctcccgacgacagcagtgatgattcggaagctcccgacgacagcagtgatgattcggaagctcccgacgacagcagtgatgattcggaagctcccgacgacagcagtgatgattcggaagcttccgacgacagcagtgatgattcggaagcttccgacgacagcagtgatgattcggaagctcccgacgacaagagtgatgattcggatgttcccgaagacaagagtgatgattcggatgttcccgatgacaatagtgatgatttggaagttcctgtgccagcagaagatttgtgtaatgaaggccaaattgcttcagatgaagaagagctggttgaggctgctgctgctgtctcccagcatgattcatctgatgatgctggtgagcaggatcttggtgagaatctcagcaaaccaccaagtgatcctgaggctaaccctgaagtttcagagagaaagctgccaactgaggaagagcctgcacctgtggtggaacaatcagggaaaaggaagtcaaaaaccaaaactattgtggagccaccgaggaaaaggcagacaaagaccaaaaatatagtggagccaccaaggaaaaggcagacaaagaccaaaaatatagtggagccactgaggaagaggaaggcgaaaaccaaaaatgtatctgtgacacctggacataagaagcgtgggccttcaaagaagaaacccggtgcagcaaaagttgaaaaacgcaagactaggactcctaaatgcaaagtccctggatgtttcttgcaagaccttgaaaagtcaaagaaatactctggaaaaaatttaaagcgaaataaggatgaattggttcagagaatctacgacctgtttaacagatccgtctgtgataaaaagctgccagagaaactacgcataggctggaataacaagatggtgaaaactgctggcttatgcagcactggtgagatgtggtacccaaagtggcggcgctttgccaagatccagattggcttgaaagtctgcgactctgcagaccgaatccgggataccttgatccatgaaatgtgccatgctgcctcctggctgattgatggtatccatgattctcatggtgacgcatggaagtattatgccaggaaatccaacaggatacacccggagctgcccagggtcacccgttgccataactataagattaactacaaggtccattatgaatgtactggatgcaaaacgaggattggctgctacaccaaatcgttggacaccagccgcttcatctgtgccaaatgcaaggggtctctggtcatggtgccattaactcagaaagatgggacccgtattgtgccccacgtgtgaccatttgctgtgtatgtgcagaagtattatagaaaaattatgcaggagatggctaggattagccttggggatgtgatgaaaacacttggcaggaattacaaggcaatgaagaattcttaaggttatcttagagtatattaatgtgagctatatcctttactggtaagaagttttagaaaagtttgttttgtgaagttaggaatattagaatttaggtactgttaagtaagtaatgttagaatttaagattcatgttattaacgatgattgaccttaaatagggactctattgctaaccattctgtgcccttgacagggtatttctgaagcccttgggatctaccttgggtcttacttgagttccatatttttcacatgtagaacaaaatgcaaaagaaaagtgagttttcaagagtggcaggttgagagaggagaatgctggaaagaggacaagtttgagaggcaacacttaaacactagggctactgtggcatctatgtagacaggaaagacaaacgtgtttcataaaattcgttgttgatggtattgattgaaactatctgagccatgtaatcaaaaaataaaagttttctgcatctt

SEQ ID NO: 103835 - DNA, 2791 bp, Homo sapiens
  Payload ID: 411
  Gene Symbol: ACRC
  Gene Name: acidic repeat containing
  Uniprot ID: Q96QF7
  ENST ID: ENST00000373696
  CDS Start-End: 115-2190
aaaggggcctgcgcctggcgttgttcatcgcagttgctccggatctttgcacacactccacgggcagttggaggtgagctgctgccggccacgccagaggctgcaacaccagacatggatgggtgcaaaaaagagctgccccgcttgcaagagccggaggaggacgaggattgttacatccttaatgttcagtcaagcagtgatgacaccagtgggtcttctgtggccagaagagctccgaagagacaggcgagttgcatccttaatgtccagtcaaggagtggtgacaccagtgggtcttctgtggccagaagagctccgaagagacaggcgagctccgtggtagtgattgactctgattctgatgaggaatgtcacacccatgaagagaagaaagctaagttattggaaataaacagcgacgatgagagtccggagtgttgtcatgtgaagcctgccatccaggaacctccaatagttattagtgatgatgacaatgacgatgacaacggtaatgatttggaagttcccgacgacaacagtgatgattcagaagctcccgacgacaacagtgatgattcggaagctcctgacgacaacagtgatgattcggaagctcccgacgacaacagtgatgattcggaagctcccgacgacaatagtgatgattcggatgttcccgacgacaacagtgatgattcatccgacgacaacagtgatgattcatccgacgacaacagtgatgattcggatgttcccgacgacaagagtgatgattcggatgttcccgacgacagcagtgatgattcggatgttcccgacgacagcagtgatgattcggaagctcccgacgacagcagtgatgattcggaagctcccgacgacagcagtgatgattcggaagctcccgacgacagcagtgatgattcggaagctcccgacgacagcagtgatgattcggaagcttccgacgacagcagtgatgattcggaagcttccgacgacagcagtgatgattcggaagctcccgacgacaagagtgatgattcggatgttcccgaagacaagagtgatgattcggatgttcccgatgacaatagtgatgatttggaagttcctgtgccagcagaagatttgtgtaatgaaggccaaattgcttcagatgaagaagagctggttgaggctgctgctgctgtctcccagcatgattcatctgatgatgctggtgagcaggatcttggtgagaatctcagcaaaccaccaagtgatcctgaggctaaccctgaagtttcagagagaaagctgccaactgaggaagagcctgcacctgtggtggaacaatcagggaaaaggaagtcaaaaaccaaaactattgtggagccaccgaggaaaaggcagacaaagaccaaaaatatagtggagccaccaaggaaaaggcagacaaagaccaaaaatatagtggagccactgaggaagaggaaggcgaaaaccaaaaatgtatctgtgacacctggacataagaagcgtgggccttcaaagaagaaacccggtgcagcaaaagttgaaaaacgcaagactaggactcctaaatgcaaagtccctggatgtttcttgcaagaccttgaaaagtcaaagaaatactctggaaaaaatttaaagcgaaataaggatgaattggttcagagaatctacgacctgtttaacagatccgtctgtgataaaaagctgccagagaaactacgcataggctggaataacaagatggtgaaaactgctggcttatgcagcactggtgagatgtggtacccaaagtggcggcgctttgccaagatccagattggcttgaaagtctgcgactctgcagaccgaatccgggataccttgatccatgaaatgtgccatgctgcctcctggctgattgatggtatccatgattctcatggtgacgcatggaagtattatgccaggaaatccaacaggatacacccggagctgcccagggtcacccgttgccataactataagattaactacaaggtccattatgaatgtactggatgcaaaacgaggattggctgctacaccaaatcgttggacaccagccgcttcatctgtgccaaatgcaaggggtctctggtcatggtgccattaactcagaaagatgggacccgtattgtgccccacgtgtgaccatttgctgtgtatgtgcagaagtattatagaaaaattatgcaggagatggctaggattagccttggggatgtgatgaaaacacttggcaggaattacaaggcaatgaagaattcttaaggttatcttagagtatattaatgtgagctatatcctttactggtaagaagttttagaaaagtttgttttgtgaagttaggaatattagaatttaggtactgttaagtaagtaatgttagaatttaagattcatgttattaacgatgattgaccttaaatagggactctattgctaaccattctgtgcccttgacagggtatttctgaagcccttgggatctaccttgggtcttacttgagttccatatttttcacatgtagaacaaaatgcaaaagaaaagtgagttttcaagagtggcaggttgagagaggagaatgctggaaagaggacaagtttgagaggcaacacttaaacactagggctactgtggcatctatgtagacaggaaagacaaacgtgtttcataaaattcgttgttgatggtattgattgaaactatctgagccatgtaatcaaaaaataaaagttttctgcatcttg

SEQ ID NO: 103836 - DNA, 2576 bp, Homo sapiens
  Payload ID: 412
  Gene Symbol: ARMT1
  Gene Name: acidic residue methyltransferase 1
  Uniprot ID: Q9H993
  ENST ID: ENST00000367294
  CDS Start-End: 260-1585
gcttccggctttcgctcgcttccatatccgctcctctagtcgccctccgctggccccgccttcgtccccggaagattgggtcttctggcgagccactgtttgccgtttgatcgggcaccaaataaagtttctttattcaaaagcactttttttttaaagccacaccacccccattctcagctcctccttcgcggcggtaccgcctctgtttctgcggcgattgaacagccgagctttgcggccgggatcgcggaaagtgatggctgtcgtcccggcgtctctctcaggacaggacgtgggatcatttgcatatcttacaattaaagacagaataccacagatcttaactaaggttattgatacattgcatcgacataaaagtgaattttttgagaaacacggagaggaaggcgtggaagctgaaaagaaagctatctctctcctttctaaattacggaatgaattgcaaacagataaaccatttatccccttggttgagaaatttgttgatactgatatatggaatcagtacctagaatatcaacagagtcttttaaatgaaagtgatggaaaatcaagatggttctactcaccgtggttgttggtagaatgttacatgtatcgaagaattcatgaagcaattatccagagtccaccaatcgattactttgatgtatttaaagaatcaaaagagcaaaatttctatgggtcacaggaatccatcattgctttatgtactcacctgcaacaattgataagaactattgaagacctagatgaaaatcagctgaaagatgagttttttaaacttctgcagatttcactgtggggaaataagtgtgatctgtctctctcaggtggagaaagtagttctcagaataccaatgtactaaattcattggaagacctaaaacctttcattttattgaatgatatggaacatctttggtcattgcttagcaattgcaagaaaacaagagaaaaagcttctgctactagagtgtatattgttctcgataattctggatttgagcttgttacagatttaatattagccgacttcttgttgtcctctgaactggctactgaggttcatttttatggaaaaacaattccatggtttgtttctgatactactatacatgattttaattggttaattgaacaggtaaaacacagtaatcataagtggatgtccaagtgtggggctgactgggaagagtatattaaaatgggtaaatgggtttaccacaatcatatattttggactctgcctcatgagtactgtgcaatgcctcaggttgcacctgacttatatgctgaactacagaaggcacatttaattttattcaagggtgatttgaattacaggaagttgacaggtgacagaaaatgggagttttctgttccatttcatcaggctctgaatggcttccatcctgcaccactctgtaccataagaacattaaaagctgaaattcaggttggtctgcagcctgggcaaggggaacagctcctggcctctgagcccagctggtggaccactggaaaatatggaatatttcagtacgatggtcccctttgacttgatttaggagctctcagttgcatagaaagatctggtgagcaccttttcatccccagaaaaggagcacgtgaattgagtcgcctggcggctctgtacgcgctcagggaagcttagcttcttggtgcccatctacgtgcactggatgatttttcttttgaacattttgccccactacactgttttggggatagctgggttaagcaagttaaagatatttacatttatattggaattttagcaactttttttcaggttaaatatataatttcaagtgcttttaatgaacttatttttaattggctagggagcaaaaaataagtgagttctgcttttagttagttaaccttgttcttttcttaaatagtacactgcatggtatttaatattccaggaagcatgggattttattttgcttgattttgggcacatgaaataatagctctaggaaaatgcgcatcttaatgactctttgtaaagagaggcatttcttacaactgtgatgtttgcttacataaaagttacctcataagttaattctaacttttattcttgaattttatttcatttcaatagcttgtttcatttgcacgcctttgtattttgattgacctgtagaatggatgttaggaaactcaaaattgaacacagtgaaacaaatggtatttgaagaaatgtaatatcttttatattctatttatgatatccataatcaaatgagattattttaccacataaatgttttaaatatcagatttttagtttgcagttttaggaaaatgctttagatagaaaaggttcttatgcattgaatttggagtactaccaacaatgaatgaatttattttttatattcttacacattttattggtcattgtcacagatagtaaatactaaaaatttcaggtcagtttgttttgaaactgaaattggaaataaatctggaaatgttttgttgcactaaaataataaaatgaattgtactgaaaa

SEQ ID NO: 103837 - DNA, 712 bp, Homo sapiens
  Payload ID: 412
  Gene Symbol: ARMT1
  Gene Name: acidic residue methyltransferase 1
  ENST ID: ENST00000494826
  CDS Start-End: 61-231
ccgcctctgtttctgcggcgattgaacagccgagctttgcggccgggatcgcggaaagtgatggctgtcgtcccggcgtctctctcaggacaggacgtggggaaggcgtggaagctgaaaagaaagctatctctctcctttctaaattacggaatgaattgcaaacagataaaccatttatccccttggttgagaaatttgttgatactgatatatggaatcagtacctagaatatcaacagagtcttttaaatgaaagtgatggaaaatcaagatggttctactcaccgtggttgttggtagaatgttacatgtatcgaagaattcatgaagcaattatccagagtccaccaatcgattactttgatgtatttaaagaatcaaaagagcaaaatttctatgggtcacaggaatccatcattgctttatgtactcacctgcaacaattgataagaactattgaagacctagatgaaaatcagctgaaagatgagttttttaaacttctgcagatttcactgtggggaaataagtgtgatctgtctctctcaggtggagaaagtagttctcagaataccaatgtactaaattcattggaagacctaaaacctttcattttattgaatgatatggaacatctttggtcattgcttagcaattgcaagaaaacaagagaaaaagcttctgctactagagtgtatattgttctcga

SEQ ID NO: 103838 - DNA, 2495 bp, Homo sapiens
  Payload ID: 412
  Gene Symbol: ARMT1
  Gene Name: acidic residue methyltransferase 1
  ENST ID: ENST00000545879
  CDS Start-End: 540-1508
aggccctgggacctcccggtcccttgcctgcttccggctttcgctcgcttccatatccgctcctctagtcgccctccgctggccccgccttcgtccccggaagattgggtcttctggcgagccactgtttgccgtttgatcgggcaccaaataaagtttctttattcaaaagcactttttttttaaagccacaccacccccattctcagctcctccttcgcggcggtaccgcctctgtttctgcggcgattgaacagccgagctttgcggccgggatcgcggaaagtgatggctgtcgtcccggcgtctctctcaggacaggacgtggggaaggcgtggaagctgaaaagaaagctatctctctcctttctaaattacggaatgaattgcaaacagataaaccatttatccccttggttgagaaatttgttgatactgatatatggaatcagtacctagaatatcaacagagtcttttaaatgaaagtgatggaaaatcaagatggttctactcaccgtggttgttggtagaatgttacatgtatcgaagaattcatgaagcaattatccagagtccaccaatcgattactttgatgtatttaaagaatcaaaagagcaaaatttctatgggtcacaggaatccatcattgctttatgtactcacctgcaacaattgataagaactattgaagacctagatgaaaatcagctgaaagatgagttttttaaacttctgcagatttcactgtggggaaataagtgtgatctgtctctctcaggtggagaaagtagttctcagaataccaatgtactaaattcattggaagacctaaaacctttcattttattgaatgatatggaacatctttggtcattgcttagcaattgcaagaaaacaagagaaaaagcttctgctactagagtgtatattgttctcgataattctggatttgagcttgttacagatttaatattagccgacttcttgttgtcctctgaactggctactgaggttcatttttatggaaaaacaattccatggtttgtttctgatactactatacatgattttaattggttaattgaacaggtaaaacacagtaatcataagtggatgtccaagtgtggggctgactgggaagagtatattaaaatgggtaaatgggtttaccacaatcatatattttggactctgcctcatgagtactgtgcaatgcctcaggttgcacctgacttatatgctgaactacagaaggcacatttaattttattcaagggtgatttgaattacaggaagttgacaggtgacagaaaatgggagttttctgttccatttcatcaggctctgaatggcttccatcctgcaccactctgtaccataagaacattaaaagctgaaattcaggttggtctgcagcctgggcaaggggaacagctcctggcctctgagcccagctggtggaccactggaaaatatggaatatttcagtacgatggtcccctttgacttgatttaggagctctcagttgcatagaaagatctggtgagcaccttttcatccccagaaaaggagcacgtgaattgagtcgcctggcggctctgtacgcgctcagggaagcttagcttcttggtgcccatctacgtgcactggatgatttttcttttgaacattttgccccactacactgttttggggatagctgggttaagcaagttaaagatatttacatttatattggaattttagcaactttttttcaggttaaatatataatttcaagtgcttttaatgaacttatttttaattggctagggagcaaaaaataagtgagttctgcttttagttagttaaccttgttcttttcttaaatagtacactgcatggtatttaatattccaggaagcatgggattttattttgcttgattttgggcacatgaaataatagctctaggaaaatgcgcatcttaatgactctttgtaaagagaggcatttcttacaactgtgatgtttgcttacataaaagttacctcataagttaattctaacttttattcttgaattttatttcatttcaatagcttgtttcatttgcacgcctttgtattttgattgacctgtagaatggatgttaggaaactcaaaattgaacacagtgaaacaaatggtatttgaagaaatgtaatatcttttatattctatttatgatatccataatcaaatgagattattttaccacataaatgttttaaatatcagatttttagtttgcagttttaggaaaatgctttagatagaaaaggttcttatgcattgaatttggagtactaccaacaatgaatgaatttattttttatattcttacacattttattggtcattgtcacagatagtaaatactaaaaatttcaggtcagtttgttttgaaactgaaattggaaataaatctggaaatgttttgttgcactaaaataataaaatgaattgtactg

SEQ ID NO: 103839 - DNA, 2391 bp, Homo sapiens
  Payload ID: 413
  Gene Symbol: ADI1
  Gene Name: acireductone dioxygenase 1
  Uniprot ID: Q9BV57
  ENST ID: ENST00000327435
  CDS Start-End: 250-789
tggcgaacggctggccccgggccgcgggcctcaggcaggtccgagggtgcccaggacagggtcggggcttgaatgcctttgcttccgaaaacagcggagccgtggggcctcccccgcgccggccctgcctccaaccagccgcccaatcccggctcccatgcgcgtccacgcctccctataagataaagcgcggccgacgggctccgagcgcggcccctgggttcgaacacggcacccgcactgcgcgtcatggtgcaggcctggtatatggacgacgccccgggcgacccgcggcaaccccaccgccccgaccccggccgcccagtgggcctggagcagctgcggcggctcggggtgctctactggaagctggatgctgacaaatatgagaatgatccagaattagaaaagatccgaagagagaggaactactcctggatggacatcataaccatatgcaaagataaactaccaaattatgaagaaaagattaagatgttctacgaggagcatttgcacttggacgatgagatccgctacatcctggatggcagtgggtacttcgatgtgagggacaaggaggaccagtggatccggatcttcatggagaagggagacatggtgacgctccccgcggggatctatcaccgcttcacggtggacgagaagaactacacgaaggccatgcggctgtttgtgggagaaccggtgtggacagcgtacaaccggcccgctgaccattttgaagcccgcgggcagtacgtgaaatttctggcacagaccgcctagcagtgctgcctgggaactaacacgtgcctcgtaaaggtccccaatgtaatgactgagcagaaaatcaatcactttctctttgcttttagaggatagccttgaggctagattatctttcctttgtaagattatttgatcagaatattttgtaatgaaaggatctagaaagcaacttggaagtgtaaagagtcaccttcattttctgtaactcaatcaagactggtgggtccatggccctgtgttagttcatgcattcagttgagtcccaaatgaaagtttcatctcccgaaatgcagttccttagatgcccatctggacgtgatgccgcgcctgccgtgtaagaaggtgcaatcctagataacacagctagccagatagaagacacttttttctccaaaatgatgccttggggtggggagtggtagggggaagagctcccaccctaaggggcacacactgagttgcttatgccacttccttgttcaaaataaagtaactgccttaatcttatactcatggcttggagttaccttatattcaggtatatgtgatattttgcctggtttgttaaaattgccccatttagattccttctataattgttcttatagataagtaatttatatatgagctgtgttagtattttttcagtgtgagatctctggattctttcacaataaagctgttgaattttaacaggagtattagtacataaattttctactcaacaattccgagataggattatgcctagtttgtcatatcacagaaaaactccaagttaacttcatgttttggaagggcaggtcgtttttaaagtatttctttttttaactggatgaaaaatcttcatgttaggattaattttcttaatcacctccacactgtacagaggaaactcaagccttaaatgtttaagtaaactctgtctcagttttaggattaaaatacccaccggtggtgtgatgatgccatataccgcagggcttgcttctgtcaagtgtgactctatctcagtaattaaaataagtgctgatctactgattttttttaatggattcatttctaaatgggcattataaatagagcttgttcatttttaagaacgaaacattcatatgataaactatcgctttaaattgcctttcttgcttcatataacttttccctgtcaggatccttagtgtttgaaactcctcgtgcggggctggcctcctgcggactctagtttcgcctccttgatgtggcgcctgggatttcttcacttcagagctgtatttttacaggcaagagtaagttcctgggcacagtggctcatgcctgtaatctcagctactcaggaggctaaggtgggaggattcttagagcctgggaggtcgaggctgcagtgagctgtgattgtggccactgcactccagcctgggtgacagagcgagactctgtctcaaaaaagaagaaagagtaagagctgaggcatataatagaattctgctaaagcacttaaggtgaaatcacattttcttttcccaggatgttgctcacatctttcgtttttattgaggtgtcatttatatacaataaaatgtactcattttcagtgtt

SEQ ID NO: 103840 - DNA, 3870 bp, Homo sapiens
  Payload ID: 413
  Gene Symbol: ADI1
  Gene Name: acireductone dioxygenase 1
  Uniprot ID: Q9BV57
  ENST ID: ENST00000382093
  CDS Start-End: 2839-3360
tttgcccaggctggagtgcagtggcatgatctcggctcaccgcaacctcatcttcccgagttcaagccattctcatgtgtcagcctcccgagtagctgggattacaaggtgcacagcaccatgccgggctaattttgtatttttagtagagacagggtttctccatgttggtcaggctgatcttgaactgctgacctcaggtgatccacccacttcggcctcccaaagtgctggcattatagacacgaaccaccgcacccggcctatatgctttcttaatatccattctggatcagtgctgttggaagacaaaattacaacaaatttagttaaagatctaattagcttttattcttgatttgtgaatagggcaacctccgttctacaaaatagaataagagctcgatagggtaatagcacaacagtgggttttgtagggcggcaacaaagaaacagaacaataggtagaaaagctgattggttaacgtcaagttacattaggttacttttttcctaagggttaaagcagaagcgacttccttattattctgactcaggaagactggaatcttctgatcgcaggaaaagctggtctgtttgagatgcacctccttctttaaagttttagtttgatcaagtggcatatggcatgagtggctgcattttggtttggtctcatcctggggcctagtgcaggggctcagtccaaaacagtgacctctcctgggccaggcatggtggcttctgtcatcccagcactttgggaggctgaggcggcagattgcctgaagccagaagtttgagacctcatctctaaaaaaacccaaaaaacaaaaaagccacacacacaccccatattaacattatatatatgtaacatctcccataatttttaacagaggtaacacatgtggacatgtttgtgtatctgtttaatcaatctgttattagtgacatagagttctaaaaaaccttttgtcatacatacaaacaattggaagattattttagcttggaataaactaaatacctgctgctataacaaaatgacaaaaatagcttaaactgggcaatttataaacaacagcaatttatagaattcttatagttctagaggctaagaagtccaagattaaggtgccagcagatttagtgtctgatgaggatcctgtcctcatagacggccatttccttgctctgtcctcatgtggtggaaggggcaaactgctctcttacatctctcttgctcttttttttttttttttttttttttgagatggagcctcgctctgtcacccaggctggtagcgcagtcttggctcactgcaacctctgcctcctggattcaagtgattctcctgcctcagcctcccgagtagctgggatcacaggcgtggaccaccatgcctggctaatttttgtatttttagtagagatggggtttcaccatgttggacaggctggtcttgaacccctgacctcaggtgatctgcccaccttggcctcccaaagttctgggattataggtgtgagccacagtgcccagctccatctctcttacaaggccactaatcctataaatgagggcttgccctcatgacttaatcacatcctaaaggtcccaccccttaatactatcacatttgtgttaagtttcaacattcgtatatttaaacttatgacacgtgtcatataatgtgtcatattacatattatgtgtcataatatggacacattcagaccatagcaaatagtactgtgcatatcatgcagtggataggctaagttttagagtcaactttgtagaaaataacgtattgatgactagtactttaatatgttctggagtatcgggggaacccacccccaatatttcaacataggttccattttccataagtgtcggccagctgagaaataaagagagacagtataaagagaggaattttacagctgggccgccaggggtgacatcacatatcggtaggaccgtgatgcccgcctgagtctcagaccagcaagtttttattaagggtttcaaaaggggagggggtgtaagaacagggagtaggtacaaatatcacaggcttcaaagggcaaaaagcagaactactaataagggtctaacaaagatcacatgcttctgagggaacaggacaaagggcaaaagcagaaccactgataagggtccaacaaagatcacagggcaaagggcaaaagcagaaccactgataaagatctatgttcagtgctgcacatattgtcttgataaacatcttaaataacagaaaacagggttcgagagcagagaactggtctgaccacaaatttaccagggtggagtttttccccaccttagtaagcctgagggtactgcagaagaccagggcgtatctcagtccttatctcaaccgcataagacagacattcccagagcagctgtttatagacctccccccagaaatgcattccttccccagagtattaatattaatattccttcctaggaaaagaatttagtgataccttctctacttgcacgcccatttataggctctctgcaagaagaaaaatatgggtgtttttgcctgaccctgcaggcagtcaaaccttatggttgtcttcccttgttccctaaaaatcgctgttattttattttttaaggtgtactgatttcatattgttcaaacacacatgttttacaatcaatttgtacagttaacacaattatcacagtggtcctgaggtgacatacatcctcagcttacgaagataacaggattaagagattaaagacaggcataataaattataaaagtattatttgagaactgatagatgtccgtgaaatcttcaaaacttatgttcctctgccatggctccagccggtccctccattcggggtccctgacttcctgcaacactggagtttgttgttcactggatgctgacaaatatgagaatgatccagaattagaaaagatccgaagagagaggaactactcctggatggacatcataaccatatgcaaagataaactaccaaattatgaagaaaagattaagatgttctacgaggagcatttgcacttggacgatgagatccgctacatcctggatggcagtgggtacttcgatgtgagggacaaggaggaccagtggatccggatcttcatggagaagggagacatggtgacgctccccgcggggatctatcaccgcttcacggtggacgagaagaactacacgaaggccatgcggctgtttgtgggagaaccggtgtggacagcgtacaaccggcccgctgaccattttgaagcccgcgggcagtacgtgaaatttctggcacagaccgcctagcagtgctgcctgggaactaacacgtgcctcgtaaaggtccccaatgtaatgactgagcagaaaatcaatcactttctctttgcttttagaggatagccttgaggctagattatctttcctttgtaagattatttgatcagaatattttgtaatgaaaggatctagaaagcaacttggaagtgtaaagagtcaccttcattttctgtaactcaatcaagactggtgggtccatggccctgtgttagttcatgcattcagttgagtcccaaatgaaagtttcatctcccgaaatgcagttccttagatgcccatctggacgtgatgccgcgcctgccgtgtaagaaggtgcaatcctagataacacagctagccagatagaagacacttttttctccaaaatgatgccttggggtggggagtggtagggggaagagctcccaccctaaggggcacacactgagttgcttatgccacttccttgttcaaaataaagtaactgccttaatctta

SEQ ID NO: 103841 - DNA, 654 bp, Homo sapiens
  Payload ID: 413
  Gene Symbol: ADI1
  Gene Name: acireductone dioxygenase 1
  ENST ID: ENST00000415131
  CDS Start-End: 1-352
aaggtgggagtgctgtgctttctccccaggcccggcctgtgtggtggccctggccgtggcatctctgccgctgaactgcgcggcttccgcagactccaagcgcggtcgctgggctcgggactcctcgacctgtgcttcaaggagagtctgtggagccgcaggcgatgtccgaggtgacagctgtccttccgtggcagcctccgtggcccctgcctgcgatcctggtggacagaactacacgaaggccatgcggctgtttgtgggagaaccggtgtggacagcgtacaaccggcccgctgaccattttgaagcccgcgggcagtacgtgaaatttctggcacagaccgcctagcagtgctgcctgggaactaacacgtgcctcgtaaaggtccccaatgtaatgactgagcagaaaatcaatcactttctctttgcttttagaggatagccttgaggctagattatctttcctttgtaagattatttgatcagaatattttgtaatgaaaggatctagaaagcaacttggaagtgtaaagagtcaccttcattttctgtaactcaatcaagactggtgggtccatggccctgtgttagttcatgcattcagttgagtcccaaatgaaagtttcatctcccgaaatgcagttcctt

SEQ ID NO: 103842 - DNA, 1902 bp, Homo sapiens
  Payload ID: 413
  Gene Symbol: ADI1
  Gene Name: acireductone dioxygenase 1
  ENST ID: ENST00000627048
  CDS Start-End: 1-300
attaagatgttctacgaggagcatttgcacttggacgatgagatccgctacatcctggatggcagtgggtacttcgatgtgagggacaaggaggaccagtggatccggatcttcatggagaagggagacatggtgacgctccccgcggggatctatcaccgcttcacggtggacgagaagaactacacgaaggccatgcggctgtttgtgggagaaccggtgtggacagcgtacaaccggcccgctgaccattttgaagcccgcgggcagtacgtgaaatttctggcacagaccgcctagcagtgctgcctgggaactaacacgtgcctcgtaaaggtccccaatgtaatgactgagcagaaaatcaatcactttctctttgcttttagaggatagccttgaggctagattatctttcctttgtaagattatttgatcagaatattttgtaatgaaaggatctagaaagcaacttggaagtgtaaagagtcaccttcattttctgtaactcaatcaagactggtgggtccatggccctgtgttagttcatgcattcagttgagtcccaaatgaaagtttcatctcccgaaatgcagttccttagatgcccatctggacgtgatgccgcgcctgccgtgtaagaaggtgcaatcctagataacacagctagccagatagaagacacttttttctccaaaatgatgccttggggtggggagtggtagggggaagagctcccaccctaaggggcacacactgagttgcttatgccacttccttgttcaaaataaagtaactgccttaatcttatactcatggcttggagttaccttatattcaggtatatgtgatattttgcctggtttgttaaaattgccccatttagattccttctataattgttcttatagataagtaatttatatatgagctgtgttagtattttttcagtgtgagatctctggattctttcacaataaagctgttgaattttaacaggagtattagtacataaattttctactcaacaattccgagataggattatgcctagtttgtcatatcacagaaaaactccaagttaacttcatgttttggaagggcaggtcgtttttaaagtatttctttttttaactggatgaaaaatcttcatgttaggattaattttcttaatcacctccacactgtacagaggaaactcaagccttaaatgtttaagtaaactctgtctcagttttaggattaaaatacccaccggtggtgtgatgatgccatataccgcagggcttgcttctgtcaagtgtgactctatctcagtaattaaaataagtgctgatctactgattttttttaatggattcatttctaaatgggcattataaatagagcttgttcatttttaagaacgaaacattcatatgataaactatcgctttaaattgcctttcttgcttcatataacttttccctgtcaggatccttagtgtttgaaactcctcgtgcggggctggcctcctgcggactctagtttcgcctccttgatgtggcgcctgggatttcttcacttcagagctgtatttttacaggcaagagtaagttcctgggcacagtggctcatgcctgtaatctcagctactcaggaggctaaggtgggaggattcttagagcctgggaggtcgaggctgcagtgagctgtgattgtggccactgcactccagcctgggtgacagagcgagactctgtctcaaaaaagaagaaagagtaagagctgaggcatataatagaattctgctaaagcacttaaggtgaaatcacattttcttttcccaggatgttgctcacatctttcgtttttattgaggtgtcatttatatacaataaaatgtactcattttcagtgtt

SEQ ID NO: 103843 - DNA, 7466 bp, Homo sapiens
  Payload ID: 414
  Gene Symbol: ACO1
  Gene Name: aconitase 1, soluble
  Uniprot ID: P21399
  ENST ID: ENST00000309951
  CDS Start-End: 139-2808
ggggcgagagggggcggagcgtggaggcggcagctggaaccgcgcagcgcacgggaacgcgtcccgctgcttgggtcaggttcgccggtcgcgggagccccgccgtgcagtcggaggaacacgtggccatcagtaatcatgagcaacccattcgcacaccttgctgagccattggatcctgtacaaccaggaaagaaattcttcaatttgaataaattggaggattcaagatatgggcgcttaccattttcgatcagagttcttctggaagcagccattcggaattgtgatgagtttttggtgaagaaacaggatattgaaaatattctacattggaatgtcacgcagcacaagaacatagaagtgccatttaagcctgctcgtgtcatcctgcaggactttacgggtgtgcccgctgtggttgactttgctgcaatgcgtgatgctgtgaaaaagttaggaggagatccagagaaaataaaccctgtctgccctgctgatcttgtaatagatcattccatccaggttgatttcaacagaagggcagacagtttacagaagaatcaagacctggaatttgaaagaaatagagagcgatttgaatttttaaagtggggttcccaggcttttcacaacatgcggattattccccctggctcaggaatcatccaccaggtgaatttggaatatttggcaagagtggtatttgatcaggatggatattattacccagacagcctcgtgggcacagactcgcacactaccatgattgatggcttgggcattcttggttggggtgtcggtggtattgaagcagaagctgtcatgctgggtcagccaatcagtatggtgcttcctcaggtgattggctacaggctgatggggaagccccaccctctggtaacatccactgacatcgtgctcaccattaccaagcacctccgccaggttggggtagtgggcaaatttgtcgagttcttcgggcctggagtagcccagttgtccattgctgaccgagctacgattgctaacatgtgtccagagtacggagcaactgctgcctttttcccagttgatgaagttagtatcacgtacctggtgcaaacaggtcgtgatgaagaaaaattaaagtatattaaaaaatatcttcaggctgtaggaatgtttcgagatttcaatgacccttctcaagacccagacttcacccaggttgtggaattagatttgaaaacagtagtgccttgctgtagtggacccaaaaggcctcaggacaaagttgctgtgtccgacatgaaaaaggactttgagagctgccttggagccaagcaaggatttaaaggattccaagttgctcctgaacatcataatgaccataagacctttatctatgataacactgaattcacccttgctcatggttctgtggtcattgctgccattactagctgcacaaacaccagtaatccgtctgtgatgttaggggcaggattgttagcaaagaaagctgtggatgctggcctgaacgtgatgccttacatcaaaactagcctgtctcctgggagtggcgtggtcacctactacctacaagaaagcggagtcatgccttatctgtctcagcttgggtttgacgtggtgggctatggctgcatgacctgcattggcaacagtgggcctttacctgaacctgtggtagaagccatcacacagggagaccttgtagctgttggagtactatctggaaacaggaattttgaaggtcgagttcaccccaacacccgggccaactatttagcctctccccccttagtaatagcatatgcaattgctggaaccatcagaatcgactttgagaaagagccattgggagtaaatgcaaagggacagcaggtatttctgaaagatatctggccgactagagacgagatccaggcagtggagcgtcagtatgtcatcccggggatgtttaaggaagtctatcagaaaatagagactgtgaatgaaagctggaatgccttagcaaccccatcagataagctgtttttctggaattccaaatctacgtatatcaaatcaccaccattctttgaaaacctgactttggatcttcagccccctaaatctatagtggatgcctatgtgctgctaaatttgggagattcggtaacaactgaccacatctccccagctggaaatattgcaagaaacagtcctgctgctcgctacttaactaacagaggcctaactccacgagaattcaactcctatggctcccgccgaggtaatgacgccgtcatggcacggggaacatttgccaacattcgcttgttaaacagatttttgaacaagcaggcaccacagactatccatctgccttctggggaaatccttgatgtgtttgatgctgctgagcggtaccagcaggcaggccttcccctgatcgttctggctggcaaagagtacggtgcaggcagctcccgagactgggcagctaagggccctttcctgctgggaatcaaagccgtcctggccgagagctacgagcgcattcaccgcagtaacctggttgggatgggtgtgatcccacttgaatatctccctggtgagaatgcagatgccctggggctcacagggcaagaacgatacactatcattattccagaaaacctcaaaccacaaatgaaagtccaggtcaagctggatactggcaagaccttccaggctgtcatgaggtttgacactgatgtggagctcacttatttcctcaacgggggcatcctcaactacatgatccgcaagatggccaagtaggagacgtgcacttggtgctgcgcccagggaggaagccgcaccaccagccagcgcaggccctggtggagaggcctccctggctgcctctgggaggggtgctgccttgtagatggagcaagtgagcactgagggtctggtgccaatcctgtaggcacaaaaccagaagtttctacattctctatttttgttaatcatcttctctttttccagaatttggaagctagaatggtgggaatgtcagtagtgccagaaagagagaaccaagcttgtctttaaagttactgatcacaggacgttgctttttcactgtttcctattaatcttcagctgaacacaagcaaaccttctcaggaggtgtctcctaccctcttattgttcctcttacgctctgctcaatgaaaccttcctcttgagggtcattttcctttctgtattaattataccagtgttaagtgacatagataagaactttgcacacttcaaatcagagcagtgattctctcttctctccccttttccttcagagtgaatcatccagactcctcatggataggtcgggtgttaaagttgttttgattatgtaccttttgatagatccacataaaaagaaatgtgaagttttcttttactatcttttcatttatcaagcagagacctttgttgggaggcggtttgggagaacacatttctaatttgaatgaaatgaaatctattttcagtgaaaacttgttgactttgagttttgctgtgtttgtggctagagttttgggatatttagtacagagtgaatctcacaccatatcattgggaagcctgaataaccttcatattctcccatttttacaactctatcagaactgtacgggtataacggaaatgtttaggaaccattatgctcgctcttccctgtttgggagcagacaagaaggaagagtagcctggtggcagtggcaacgatataagtacataaggaaaagcagataaacttcaggacactaaaaaccaattatctgctcatttttacccctgtagtcatttctgggcatgccttagtttgcttgggttgctataatgtaatgccatagactggctgaaagaacagaaatgtattttctcacagttatggaggctggaattctgagatcaaagttgaagccacttcattttctggtgaggacactcttcctggtttacagatggccaccttcttgcttgttctcacatggcatttctttggtatgtgcctggtgggggagagagaaaataggctctcatgtctcttcttacagcaacactaattgtattggatcagggtcccactcttatggagacccaggaaagctggtggtataacaacttggttcaagtccaaatgcctaagaacctggggaggggcatggggaatgctggtataagtcccagagtctgaatgcccaggaacaagcaggagctgtgatgtccaaggacaggagggcaggatctttgtaatgaatttttaatgtcaaccttagcactcaggggatatggcctggtcatcagaacatctggaatctaatcctctttctacttctcaccagatgagggatcaagacaggttatttagcatccctgcacttgcggtcctggggatcttatttatattcatttaaaaaataaattacaaacaaacagccaggcgcagtggctcatgcctataattccatcactttgggaggccgaggtgggtagatcacctgaggtcaggagttctagaccagcctggccaacatggtgaaaccccgtctctactaaaaatacaaaaaattagccaggtgtggtattgtgtgcctgtaatcccagctacacaggaggctgaggcaggagaattgcttaaacccgggatgcagaggctgcagtgagccgagatcgtgccattgcacgcccgcctgggctacaagagcaaagctccgtctcaaaaaaaaaaaaaaattacaaacaaacagaactccattgtacaaaaaaacctgtgatcctcaagttaagatcagtcctagaataaaaacactaagaatggctgagaaaacagacctccaccctctcagctctccattactgagcagctggggagctgtctcgctccccgcattcagtggctcctgtggtctgtatttttgtatcctccccaaaattcaggtggtgaaaccttaaccccccaggtaatggtaatagaagctggggcctttggaaggtgattagatcatgagggtagtgccttttaaaagagactcaagataagatagagaccccctcatttcttctgccatgggagaacacagcaagaagtcaccatccgtgaaccagaaagtgggttctcaccagatactgaatctgccagtgccttgaacctagactttccagccagaactgtgagaaatttctattgtttataagccacccagttgatatttagttacagcagcccaaccaagactgtggttatgaggaaacaaacacattattgtggctagactaatggaattgggtcccttacctccaagtacaccctctgtccttttcggtaaaaatatcttcgccaggcacggtgtctcatgcctatgatcccaacactttgggaggccgaggctggagggttgcttgagcccagaagtttgagaccagcctgggcaacactctacaaaaaaaaaaataaataaataaataaataaaataaatcagccaggtgtgcacctgtggtcccagctgttcaggaggctgaggtgggaggatcacttgagcctgggaggtcgtggctatgattgctccactgcactccagcctgggcaatagagtgagaccctatcaatcaatcaccaccccccccccccccaaaaaaaaaagtatcttggccagtgtctcaaccttgcccactaacaagcctaaataaaccaacttcttttacctggttctttaagggctgctcgtcttactatccaaattaaaaatctgctgttctccctcccatattctttgcgaatgaagattcccctgtttgtttggatagttttccaaattcattactgcattcctggcatccgcagcaagctaagagttagttaatatttttaatatagcaaataaggatgagggatgcccttcatgtgtatttacacaccagatttttatggtacatagggagtaatctagggaaaagatatattaggcatgaatcttagctgtggtagaagcacagctcaaattagcttaaggaaaaaaaaaaaaaagctggctcatagaacttgaggacagtggtggccatgactatgggcttgattggatctagtgactcaagctcccttccatttgcccctccaaccacccccccatccctccaccaatcataccttctgttggcctctgcagtagagtggcctcttctgggcccttccacatgccaggggatatggccaccagcagttctggggaaaccattagtaatttgtgatcgtagagatttgtctcccagtattccctagggcaaaaatattgggagttcctagtcacctaaatgaagaaccttatttttagcagtttccctttcagggctctaacaggactgtggagtaatgtacggggttatgtaggagcaatgcagagccacttttgaaaaacagtagccaaggttctactggctgccttcttaggacattattaaatatcataaacacaagtggaatttaacacccagccagtttgtgttcaaccagacagcgtcattatgaacaaagattatataacgatagctgatattaagtaagttttaaaagttgacatcccaagagtgaagcctacttattcagtacagatttgttgaatgaaattcgtagttttattttacggcataatgaaacagagttccagacatgtacctgccaaatttggttctggttgtcttatcgtatgcaggctggatacctgctactgtgcttctacaggatgttaacagtgtcccctgagtaaaacagttccacggtcagtacatttgggaaccactgagttaaatgggttttatcactgcagaacagacacaagaacaatgtgtgctgtaaatcactgtttgcagggaaggtggcagcaaatggcacagaaacccacctgaccacagactgctttcttctgggcgttcacgcactgtgctccacaggatactcttgagaaacattgagctatggttggtctgttgtttgaaattcaaataataatgaatccattttaaggacaggaattggtttactgaccttgatgttgggatgactcttcatttcagggtgaaaatatcacagcatcagcacaggccaggaccacagagataacaaggtggtagttgtgtaacaggttgtgtctgaaccacaggagcttcaaaacatacacggctggacaccctgccaggatgctctaatggggctgggcatgtgtccatgaaaaagactccccagttgtttctaaaatgtggcctttgttctagaaatgcaatgaccagcatttgggagtcagtcaaaagatccacttcctaaaagcctacctgctcatttctttcattcaatacatattaaccaagtgcctactttgtttgagtccatgcctggcaatgacattattccattaaaagtcaaacaaggaaa

SEQ ID NO: 103844 - DNA, 3601 bp, Homo sapiens
  Payload ID: 414
  Gene Symbol: ACO1
  Gene Name: aconitase 1, soluble
  Uniprot ID: P21399
  ENST ID: ENST00000379923
  CDS Start-End: 207-2876
ggggcgagagggggcggagcgtggaggcggcagctggaaccgcgcagcgcacgggaacgcgtcccgctgcttgggtcaggttcgccggtcgcgggagccccgccgtgcagtcggagagggtgtcactctgagtggtgcttcctcagcccctgtcaaaaagcagtttccaccatcctggagtgtggaacacgtggccatcagtaatcatgagcaacccattcgcacaccttgctgagccattggatcctgtacaaccaggaaagaaattcttcaatttgaataaattggaggattcaagatatgggcgcttaccattttcgatcagagttcttctggaagcagccattcggaattgtgatgagtttttggtgaagaaacaggatattgaaaatattctacattggaatgtcacgcagcacaagaacatagaagtgccatttaagcctgctcgtgtcatcctgcaggactttacgggtgtgcccgctgtggttgactttgctgcaatgcgtgatgctgtgaaaaagttaggaggagatccagagaaaataaaccctgtctgccctgctgatcttgtaatagatcattccatccaggttgatttcaacagaagggcagacagtttacagaagaatcaagacctggaatttgaaagaaatagagagcgatttgaatttttaaagtggggttcccaggcttttcacaacatgcggattattccccctggctcaggaatcatccaccaggtgaatttggaatatttggcaagagtggtatttgatcaggatggatattattacccagacagcctcgtgggcacagactcgcacactaccatgattgatggcttgggcattcttggttggggtgtcggtggtattgaagcagaagctgtcatgctgggtcagccaatcagtatggtgcttcctcaggtgattggctacaggctgatggggaagccccaccctctggtaacatccactgacatcgtgctcaccattaccaagcacctccgccaggttggggtagtgggcaaatttgtcgagttcttcgggcctggagtagcccagttgtccattgctgaccgagctacgattgctaacatgtgtccagagtacggagcaactgctgcctttttcccagttgatgaagttagtatcacgtacctggtgcaaacaggtcgtgatgaagaaaaattaaagtatattaaaaaatatcttcaggctgtaggaatgtttcgagatttcaatgacccttctcaagacccagacttcacccaggttgtggaattagatttgaaaacagtagtgccttgctgtagtggacccaaaaggcctcaggacaaagttgctgtgtccgacatgaaaaaggactttgagagctgccttggagccaagcaaggatttaaaggattccaagttgctcctgaacatcataatgaccataagacctttatctatgataacactgaattcacccttgctcatggttctgtggtcattgctgccattactagctgcacaaacaccagtaatccgtctgtgatgttaggggcaggattgttagcaaagaaagctgtggatgctggcctgaacgtgatgccttacatcaaaactagcctgtctcctgggagtggcgtggtcacctactacctacaagaaagcggagtcatgccttatctgtctcagcttgggtttgacgtggtgggctatggctgcatgacctgcattggcaacagtgggcctttacctgaacctgtggtagaagccatcacacagggagaccttgtagctgttggagtactatctggaaacaggaattttgaaggtcgagttcaccccaacacccgggccaactatttagcctctccccccttagtaatagcatatgcaattgctggaaccatcagaatcgactttgagaaagagccattgggagtaaatgcaaagggacagcaggtatttctgaaagatatctggccgactagagacgagatccaggcagtggagcgtcagtatgtcatcccggggatgtttaaggaagtctatcagaaaatagagactgtgaatgaaagctggaatgccttagcaaccccatcagataagctgtttttctggaattccaaatctacgtatatcaaatcaccaccattctttgaaaacctgactttggatcttcagccccctaaatctatagtggatgcctatgtgctgctaaatttgggagattcggtaacaactgaccacatctccccagctggaaatattgcaagaaacagtcctgctgctcgctacttaactaacagaggcctaactccacgagaattcaactcctatggctcccgccgaggtaatgacgccgtcatggcacggggaacatttgccaacattcgcttgttaaacagatttttgaacaagcaggcaccacagactatccatctgccttctggggaaatccttgatgtgtttgatgctgctgagcggtaccagcaggcaggccttcccctgatcgttctggctggcaaagagtacggtgcaggcagctcccgagactgggcagctaagggccctttcctgctgggaatcaaagccgtcctggccgagagctacgagcgcattcaccgcagtaacctggttgggatgggtgtgatcccacttgaatatctccctggtgagaatgcagatgccctggggctcacagggcaagaacgatacactatcattattccagaaaacctcaaaccacaaatgaaagtccaggtcaagctggatactggcaagaccttccaggctgtcatgaggtttgacactgatgtggagctcacttatttcctcaacgggggcatcctcaactacatgatccgcaagatggccaagtaggagacgtgcacttggtgctgcgcccagggaggaagccgcaccaccagccagcgcaggccctggtggagaggcctccctggctgcctctgggaggggtgctgccttgtagatggagcaagtgagcactgagggtctggtgccaatcctgtaggcacaaaaccagaagtttctacattctctatttttgttaatcatcttctctttttccagaatttggaagctagaatggtgggaatgtcagtagtgccagaaagagagaaccaagcttgtctttaaagttactgatcacaggacgttgctttttcactgtttcctattaatcttcagctgaacacaagcaaaccttctcaggaggtgtctcctaccctcttattgttcctcttacgctctgctcaatgaaaccttcctcttgagggtcattttcctttctgtattaattataccagtgttaagtgacatagataagaactttgcacacttcaaatcagagcagtgattctctcttctctccccttttccttcagagtgaatcatccagactcctcatggataggtcgggtgttaaagttgttttgattatgtaccttttgatagatccacataaaaagaaatgtgaagttttcttttactatcttttcatttatcaagcagagacctttgttgggaggcggtttgggagaacacatttctaatttgaatgaaatgaaatctattttcagtgaaaa

SEQ ID NO: 103845 - DNA, 3618 bp, Homo sapiens
  Payload ID: 414
  Gene Symbol: ACO1
  Gene Name: aconitase 1, soluble
  Uniprot ID: P21399
  ENST ID: ENST00000541043
  CDS Start-End: 228-2897
atcgcgcggcggccccgggggcgagagggggcggagcgtggaggcggcagctggaaccgcgcagcgcacgggaacgcgtcccgctgcttgggtcaggttcgccggtcgcgggagccccgccgtgcagtcggagagggtgtcactctgagtggtgcttcctcagcccctgtcaaaaagcagtttccaccatcctggagtgtggtaggaacacgtggccatcagtaatcatgagcaacccattcgcacaccttgctgagccattggatcctgtacaaccaggaaagaaattcttcaatttgaataaattggaggattcaagatatgggcgcttaccattttcgatcagagttcttctggaagcagccattcggaattgtgatgagtttttggtgaagaaacaggatattgaaaatattctacattggaatgtcacgcagcacaagaacatagaagtgccatttaagcctgctcgtgtcatcctgcaggactttacgggtgtgcccgctgtggttgactttgctgcaatgcgtgatgctgtgaaaaagttaggaggagatccagagaaaataaaccctgtctgccctgctgatcttgtaatagatcattccatccaggttgatttcaacagaagggcagacagtttacagaagaatcaagacctggaatttgaaagaaatagagagcgatttgaatttttaaagtggggttcccaggcttttcacaacatgcggattattccccctggctcaggaatcatccaccaggtgaatttggaatatttggcaagagtggtatttgatcaggatggatattattacccagacagcctcgtgggcacagactcgcacactaccatgattgatggcttgggcattcttggttggggtgtcggtggtattgaagcagaagctgtcatgctgggtcagccaatcagtatggtgcttcctcaggtgattggctacaggctgatggggaagccccaccctctggtaacatccactgacatcgtgctcaccattaccaagcacctccgccaggttggggtagtgggcaaatttgtcgagttcttcgggcctggagtagcccagttgtccattgctgaccgagctacgattgctaacatgtgtccagagtacggagcaactgctgcctttttcccagttgatgaagttagtatcacgtacctggtgcaaacaggtcgtgatgaagaaaaattaaagtatattaaaaaatatcttcaggctgtaggaatgtttcgagatttcaatgacccttctcaagacccagacttcacccaggttgtggaattagatttgaaaacagtagtgccttgctgtagtggacccaaaaggcctcaggacaaagttgctgtgtccgacatgaaaaaggactttgagagctgccttggagccaagcaaggatttaaaggattccaagttgctcctgaacatcataatgaccataagacctttatctatgataacactgaattcacccttgctcatggttctgtggtcattgctgccattactagctgcacaaacaccagtaatccgtctgtgatgttaggggcaggattgttagcaaagaaagctgtggatgctggcctgaacgtgatgccttacatcaaaactagcctgtctcctgggagtggcgtggtcacctactacctacaagaaagcggagtcatgccttatctgtctcagcttgggtttgacgtggtgggctatggctgcatgacctgcattggcaacagtgggcctttacctgaacctgtggtagaagccatcacacagggagaccttgtagctgttggagtactatctggaaacaggaattttgaaggtcgagttcaccccaacacccgggccaactatttagcctctccccccttagtaatagcatatgcaattgctggaaccatcagaatcgactttgagaaagagccattgggagtaaatgcaaagggacagcaggtatttctgaaagatatctggccgactagagacgagatccaggcagtggagcgtcagtatgtcatcccggggatgtttaaggaagtctatcagaaaatagagactgtgaatgaaagctggaatgccttagcaaccccatcagataagctgtttttctggaattccaaatctacgtatatcaaatcaccaccattctttgaaaacctgactttggatcttcagccccctaaatctatagtggatgcctatgtgctgctaaatttgggagattcggtaacaactgaccacatctccccagctggaaatattgcaagaaacagtcctgctgctcgctacttaactaacagaggcctaactccacgagaattcaactcctatggctcccgccgaggtaatgacgccgtcatggcacggggaacatttgccaacattcgcttgttaaacagatttttgaacaagcaggcaccacagactatccatctgccttctggggaaatccttgatgtgtttgatgctgctgagcggtaccagcaggcaggccttcccctgatcgttctggctggcaaagagtacggtgcaggcagctcccgagactgggcagctaagggccctttcctgctgggaatcaaagccgtcctggccgagagctacgagcgcattcaccgcagtaacctggttgggatgggtgtgatcccacttgaatatctccctggtgagaatgcagatgccctggggctcacagggcaagaacgatacactatcattattccagaaaacctcaaaccacaaatgaaagtccaggtcaagctggatactggcaagaccttccaggctgtcatgaggtttgacactgatgtggagctcacttatttcctcaacgggggcatcctcaactacatgatccgcaagatggccaagtaggagacgtgcacttggtgctgcgcccagggaggaagccgcaccaccagccagcgcaggccctggtggagaggcctccctggctgcctctgggaggggtgctgccttgtagatggagcaagtgagcactgagggtctggtgccaatcctgtaggcacaaaaccagaagtttctacattctctatttttgttaatcatcttctctttttccagaatttggaagctagaatggtgggaatgtcagtagtgccagaaagagagaaccaagcttgtctttaaagttactgatcacaggacgttgctttttcactgtttcctattaatcttcagctgaacacaagcaaaccttctcaggaggtgtctcctaccctcttattgttcctcttacgctctgctcaatgaaaccttcctcttgagggtcattttcctttctgtattaattataccagtgttaagtgacatagataagaactttgcacacttcaaatcagagcagtgattctctcttctctccccttttccttcagagtgaatcatccagactcctcatggataggtcgggtgttaaagttgttttgattatgtaccttttgatagatccacataaaaagaaatgtgaagttttcttttactatcttttcatttatcaagcagagacctttgttgggaggcggtttgggagaacacatttctaatttgaatgaaatgaaatctattttcagtg

SEQ ID NO: 103846 - DNA, 2741 bp, Homo sapiens
  Payload ID: 415
  Gene Symbol: ACO2
  Gene Name: aconitase 2, mitochondrial
  Uniprot ID: Q99798
  ENST ID: ENST00000216254
  CDS Start-End: 23-2365
ctcatctttgtcagtgcacaaaatggcgccctacagcctactggtgactcggctgcagaaagctctgggtgtgcggcagtaccatgtggcctcagtcctgtgccaacgggccaaggtggcgatgagccactttgagcccaacgagtacatccattatgacctgctagagaagaacattaacattgttcgcaaacgactgaaccggccgctgacactctcggagaagattgtgtatggacacctggatgaccccgccagccaggaaattgagcgaggcaagtcgtacctgcggctgcggccggaccgtgtggccatgcaggatgcgacggcccagatggccatgctccagttcatcagcagcgggctgtccaaggtggctgtgccatccaccatccactgtgaccatctgattgaagcccaggttgggggcgagaaagacctgcgccgggccaaggacatcaaccaggaagtttataatttcctggcaactgcaggtgccaaatatggcgtgggcttctggaagcctggatctggaatcattcaccagattattctggaaaactatgcgtaccctggtgttcttctgattggcactgactcccacacccccaatggtggcggccttgggggcatctgcattggagttgggggtgccgatgctgtggatgtcatggctgggatcccctgggagctgaagtgccccaaggtgattggcgtgaagctgacgggctctctctccggttggtcctcacccaaagatgtgatcctgaaggtggcaggcatcctcacggtgaaaggtggcacaggtgcaatcgtggaataccacgggcctggtgtagactccatctcctgcactggcatggcgacaatctgcaacatgggtgcagaaattggggccaccacttccgtgttcccttacaaccacaggatgaagaagtacctgagcaagaccggccgggaagacattgccaatctagctgatgaattcaaggatcacttggtgcctgaccctggctgccattatgaccaactaattgaaattaacctcagtgagctgaagccacacatcaatgggcccttcacccctgacctggctcaccctgtggcagaagtgggcaaggtggcagagaaggaaggatggcctctggacatccgagtgggtctaattggtagctgcaccaattcaagctatgaagatatggggcgctcagcagctgtggccaagcaggcactggcccatggcctcaagtgcaagtcccagttcaccatcactccaggttccgagcagatccgcgccaccattgagcgggacggctatgcacagatcttgagggatctgggtggcattgtcctggccaatgcttgtggcccctgcattggccagtgggacaggaaggacatcaagaagggggagaagaacacaatcgtcacctcctacaacaggaacttcacgggccgcaacgacgcaaaccccgagacccatgcctttgtcacgtccccagagattgtcacagccctggccattgcgggaaccctcaagttcaacccagagaccgactacctgacgggcacggatggcaagaagttcaggctggaggctccggatgcagatgagcttcccaaaggggagtttgacccagggcaggacacctaccagcacccacccaaggacagcagcgggcagcatgtggacgtgagccccaccagccagcgcctgcagctcctggagccttttgacaagtgggatggcaaggacctggaggacctgcagatcctcatcaaggtcaaagggaagtgtaccactgaccacatctcagctgctggcccctggctcaagttccgtgggcacttggataacatctccaacaacctgctcattggtgccatcaacattgaaaacggcaaggccaactccgtgcgcaatgccgtcactcaggagtttggccccgtccctgacactgcccgctactacaagaaacatggcatcaggtgggtggtgatcggagacgagaactacggcgagggctcgagccgggagcatgcagctctggagcctcgccaccttgggggccgggccatcatcaccaagagctttgccaggatccacgagaccaacctgaagaaacagggcctgctgcctctgaccttcgctgacccggctgactacaacaagattcaccctgtggacaagctgaccattcagggcctgaaggacttcacccctggcaagcccctgaagtgcatcatcaagcaccccaacgggacccaggagaccatcctcctgaaccacaccttcaacgagacgcagattgagtggttccgcgctggcagtgccctcaacagaatgaaggaactgcaacagtgagggcagtgcctccccgccccgccgctggcgtcaagttcagctccacgtgtgccatcagtggatccgatccgtccagccatggcttcctattccaagatggtgtgaccagacatgcttcctgctccccgcttagcccacggagtgactgtggttgtggtgggggggttcttaaaataactttttagcccccgtcttcctattttgagtttggttcagatcttaagcagctccatgcaactgtatttatttttgatgacaagactcccatctaaagtttttctcctgcctgatcatttcattggtggctgaaggattctagagaaccttttgttcttgcaaggaaaacaagaatccaaaaccagtgactgttctgtga

SEQ ID NO: 103847 - DNA, 2811 bp, Homo sapiens
  Payload ID: 415
  Gene Symbol: ACO2
  Gene Name: aconitase 2, mitochondrial
  ENST ID: ENST00000396512
  CDS Start-End: 18-2435
ctttgtcagtgcacaaaatggcgccctacagcctactggtgactcggctgcagaaagctctgggtgtgcggcagtaccatgtggcctcagtcctgtgccaacgggccaaggtggcgatgagccactttgagcccaacgagtacatccattatgacctgctagagaagaacattaacattgttcgcaaacgactgaaccggccgctgacactctcggagaagattgtgtatggacacctggatgaccccgccagccaggaaattgagcgaggcaagtcgtacctgcggctgcggccggaccgtgtggccatgcaggatgcgacggcccagatggccatgctccagttcatcagcagcgggctgtccaaggtggctgtgccatccaccatccactgtgaccatctgattgaagcccaggttgggggcgagaaagacctgcgccgggccaaggacatcaaccaggaagtttataatttcctggcaactgcaggtgccaaatatggcgtgggcttctggaagcctggatctggaatcattcaccagattattctggaaaactatgcgtaccctggtgttcttctgattggcactgactcccacacccccaatggtggcggccttgggggcatctgcattggagttgggggtgccgatgctgtggatgtcatggctgggatcccctgggagctgaagtgccccaaggtgattggcgtgaagctgacgggctctctctccggttggtcctcacccaaagatgtgatcctgaaggtggcaggcatcctcacggtgaaaggtggcacaggtgcaatcgtggaataccacgggcctggtgtagactccatctcctgcactggtgaggaaggcggccaggcgacgtggcccctaccctgtgctgggcctgatgggtctccagttgggagtagaagcggcatggcgacaatctgcaacatgggtgcagaaattggggccaccacttccgtgttcccttacaaccacaggatgaagaagtacctgagcaagaccggccgggaagacattgccaatctagctgatgaattcaaggatcacttggtgcctgaccctggctgccattatgaccaactaattgaaattaacctcagtgagctgaagccacacatcaatgggcccttcacccctgacctggctcaccctgtggcagaagtgggcaaggtggcagagaaggaaggatggcctctggacatccgagtgggtctaattggtagctgcaccaattcaagctatgaagatatggggcgctcagcagctgtggccaagcaggcactggcccatggcctcaagtgcaagtcccagttcaccatcactccaggttccgagcagatccgcgccaccattgagcgggacggctatgcacagatcttgagggatctgggtggcattgtcctggccaatgcttgtggcccctgcattggccagtgggacaggaaggacatcaagaagggggagaagaacacaatcgtcacctcctacaacaggaacttcacgggccgcaacgacgcaaaccccgagacccatgcctttgtcacgtccccagagattgtcacagccctggccattgcgggaaccctcaagttcaacccagagaccgactacctgacgggcacggatggcaagaagttcaggctggaggctccggatgcagatgagcttcccaaaggggagtttgacccagggcaggacacctaccagcacccacccaaggacagcagcgggcagcatgtggacgtgagccccaccagccagcgcctgcagctcctggagccttttgacaagtgggatggcaaggacctggaggacctgcagatcctcatcaaggtcaaagggaagtgtaccactgaccacatctcagctgctggcccctggctcaagttccgtgggcacttggataacatctccaacaacctgctcattggtgccatcaacattgaaaacggcaaggccaactccgtgcgcaatgccgtcactcaggagtttggccccgtccctgacactgcccgctactacaagaaacatggcatcaggtgggtggtgatcggagacgagaactacggcgagggctcgagccgggagcatgcagctctggagcctcgccaccttgggggccgggccatcatcaccaagagctttgccaggatccacgagaccaacctgaagaaacagggcctgctgcctctgaccttcgctgacccggctgactacaacaagattcaccctgtggacaagctgaccattcagggcctgaaggacttcacccctggcaagcccctgaagtgcatcatcaagcaccccaacgggacccaggagaccatcctcctgaaccacaccttcaacgagacgcagattgagtggttccgcgctggcagtgccctcaacagaatgaaggaactgcaacagtgagggcagtgcctccccgccccgccgctggcgtcaagttcagctccacgtgtgccatcagtggatccgatccgtccagccatggcttcctattccaagatggtgtgaccagacatgcttcctgctccccgcttagcccacggagtgactgtggttgtggtgggggggttcttaaaataactttttagcccccgtcttcctattttgagtttggttcagatcttaagcagctccatgcaactgtatttatttttgatgacaagactcccatctaaagtttttctcctgcctgatcatttcattggtggctgaaggattctagagaaccttttgttcttgcaaggaaaacaagaatccaaaaccagtgactgttctgtga

SEQ ID NO: 103848 - DNA, 1433 bp, Homo sapiens
  Payload ID: 416
  Gene Symbol: ACR
  Gene Name: acrosin
  Uniprot ID: P10323
  ENST ID: ENST00000216139
  CDS Start-End: 41-1306
gtgaggtcactaggcttgcaggccaggcagtgccaggagtatggttgagatgctaccaactgccattctgctggtcttggcagtgtccgtggttgctaaagataacgccacgtgtgatggcccctgtgggttacggttcaggcaaaacccacagggtggtgtccgcatcgtcggcgggaaggctgcacagcatggggcctggccctggatggtcagcctccagatcttcacgtacaacagccacaggtaccacacatgtggaggcagcttgctgaattcacgatgggtgctcactgctgctcactgcttcgtcggcaaaaataatgtgcatgactggagactggttttcggagcaaaggaaattacatatgggaacaataaaccagtaaaggcgcctctgcaagagagatatgtggagaaaatcatcattcatgaaaaatacaactctgcgacagagggaaatgacattgccctcgtggagatcacccctcccatttcgtgtgggcgcttcattgggccgggctgcctgccccactttaaggcaggcctccccagaggctcccagagctgctgggtggccggctggggatatatagaagagaaagcccccaggccatcatctatactgatggaggcacgtgtggatctcatcgacctggacttgtgtaactcgacccagtggtacaatgggcgcgttcagccaaccaatgtgtgcgcggggtatcctgtaggcaagatcgacacctgccagggagacagcggcgggcctctcatgtgcaaagacagcaaggaaagcgcctatgtggtcgtgggaatcacaagctggggggtaggctgtgcccgtgccaagcgccccggaatctacacggccacctggccctatctgaactggatcgcctccaagattggttctaacgctttgcgtatgattcaatcggccacccctccacctcccaccactcgaccgcccccgattcgaccccccttctcccaccctatctctgctcaccttccttggtatttccaaccgccccctcgaccacttccaccccgaccaccggcagcccagccccgacccccaccttcacccccgcccccacccccacctccagcctcacctttacccccacccccacccccacccccacctacaccctcatctaccacaaaacttccccaaggactttcttttgccaagcgcctacagcagctcatagaggtcttgaaggggaagacctattccgacggaaagaaccattatgacatggagaccacagagctcccagaactgacctcgacctcctgatctgacctggttctcaacagacccagtgagcccttcactcctgagaaaaaggaaagatgaaataaataaataaacatatatatatagatatacacacacacatatctgtatgtatacatgcatatac

SEQ ID NO: 103849 - DNA, 708 bp, Homo sapiens
  Payload ID: 416
  Gene Symbol: ACR
  Gene Name: acrosin
  ENST ID: ENST00000529621
  CDS Start-End: 7-645
aggagtatggttgagatgctaccaactgccattctgctggtcttggcagtgtccgtggttgctaaagataacgccacgtgtgatggcccctgtgggttacggttcaggcaaaacccacagggtggtgtccgcatcgtcggcgggaaggctgcacagcatggggcctggccctggatggtcagcctccagatcttcacgtacaacagccacaggtaccacacatgtggaggcagcttgctgaattcacgatgggtgctcactgctgctcactgcttcgtcggcaaaaataatgtgcatgactggagactggttttcggagcaaaggaaattacatatgggaacaataaaccagtaaaggcgcctctgcaagagagatatgtggagaaaatcatcattcatgaaaaatacaactctgcgacagagggaaatgacattgccctcgtggagatcacccctcccatttcgtgtgggcgcttcattgggccgggctgcctgccccactttaaggcaggcctccccagaggctcccagagctgctgggtggccggctggggatatatagaagagaaaggcttcctggagtgtccggcaggtacctctccattcaagacgggtgtagctgtcgctctagagctctgtccataaccaagctgtctctctctcccctggctcccagaagatctcttgcccatccaacactacctgata

SEQ ID NO: 103850 - DNA, 1933 bp, Homo sapiens
  Payload ID: 417
  Gene Symbol: ACRBP
  Gene Name: acrosin binding protein
  Uniprot ID: Q8NEB7
  ENST ID: ENST00000229243
  CDS Start-End: 95-1726
gcgtgcgccccgccccgcgcctgcggctctctctgcggcttggcccgttagaggcggcttgtgtccacgggacgcgggcggatcttctccggccatgaggaagccagccgctggcttccttccctcactcctgaaggtgctgctcctgcctctggcacctgccgcagcccaggattcgactcaggcctccactccaggcagccctctctctcctaccgaatacgaacgcttcttcgcactgctgactccaacctggaaggcagagactacctgccgtctccgtgcaacccacggctgccggaatcccacactcgtccagctggaccaatatgaaaaccacggcttagtgcccgatggtgctgtctgctccaacctcccttatgcctcctggtttgagtctttctgccagttcactcactaccgttgctccaaccacgtctactatgccaagagagtcctgtgttcccagccagtctctattctctcacctaacactctcaaggagatagaagcttcagctgaagtctcacccaccacgatgacctcccccatctcaccccacttcacagtgacagaacgccagaccttccagccctggcctgagaggctcagcaacaacgtggaagagctcctacaatcctccttgtccctgggaggccaggagcaagcgccagagcacaagcaggagcaaggagtggagcacaggcaggagccgacacaagaacacaagcaggaagaggggcagaaacaggaagagcaagaagaggaacaggaagaggagggaaagcaggaagaaggacaggggactaaggagggacgggaggctgtgtctcagctgcagacagactcagagcccaagtttcactctgaatctctatcttctaacccttcctcttttgctccccgggtacgagaagtagagtctactcctatgataatggagaacatccaggagctcattcgatcagcccaggaaatagatgaaatgaatgaaatatatgatgagaactcctactggagaaaccaaaaccctggcagcctcctgcagctgccccacacagaggccttgctggtgctgtgctattcgatcgtggagaatacctgcatcataacccccacagccaaggcctggaagtacatggaggaggagatccttggtttcgggaagtcggtctgtgacagccttgggcggcgacacatgtctacctgtgccctctgtgacttctgctccttgaagctggagcagtgccactcagaggccagcctgcagcggcaacaatgcgacacctcccacaagactccctttgtcagccccttgcttgcctcccagagcctgtccatcggcaaccaggtagggtccccagaatcaggccgcttttacgggctggatttgtacggtgggctccacatggacttctggtgtgcccggcttgccacgaaaggctgtgaagatgtccgagtctctgggtggctccagactgagttccttagcttccaggatggggatttccctaccaagatttgtgacacagactatatccagtacccaaactactgttccttcaaaagccagcagtgtctgatgagaaaccgcaatcggaaggtgtcccgcatgagatgtctgcagaatgagacttacagtgcgctgagccctggcaaaagtgaggacgttgtgcttcgatggagccaggagttcagcaccttgactctaggccagttcggatgagctggcgtctattctgcccacaccccagcccaacctgcccacgttctctattgttttgagaccccattgctttcaggctgccccttctgggtctgttactcggcccctactcacatttccttgggttggagcaacagtcccagagagggccacggtgggagctgcgccctccttaaaagatgactttacataaaatgttgatcttca

SEQ ID NO: 103851 - DNA, 1700 bp, Homo sapiens
  Payload ID: 417
  Gene Symbol: ACRBP
  Gene Name: acrosin binding protein
  ENST ID: ENST00000414226
  CDS Start-End: 46-1578
agaggcggcttgtgtccacgggacgcgggcggatcttctccggccatgaggaagccagccgctggcttccttccctcactcctgaaggtgctgctcctgcctctggcacctgccgcagcccaggattcgactcaggcctccactccaggcagccctctctctcctaccgaatacgaacgcttcttcgcactgctgactccaacctggaaggcagagactacctgccgtctccgtgcaacccacggctgccggaatcccacactcgtccagctggaccaatatgaaaaccacggcttagtgcccgatggtgctgtctgctccaacctcccttatgcctcctggtttgagtctttctgccagttcactcactaccgttgctccaaccacgtctactatgccaagagagtcctgtgttcccagccagtctctattctctcacctaacactctcaaggagatagaagcttcagctgaagtctcacccaccacgatgacctcccccatctcaccccacttcacagcgccagagcacaagcaggagcaaggagtggagcacaggcaggagccgacacaagaacacaagcaggaagaggggcagaaacaggaagagcaagaagaggaacaggaagaggagggaaagcaggaagaaggacaggggactaaggagggacgggaggctgtgtctcagctgcagacagactcagagcccaagtttcactctgaatctctatcttctaacccttcctcttttgctccccgggtacgagaagtagagtctactcctatgataatggagaacatccaggagctcattcgatcagcccaggaaatagatgaaatgaatgaaatatatgatgagaactcctactggagaaaccaaaaccctggcagcctcctgcagctgccccacacagaggccttgctggtgctgtgctattcgatcgtggagaatacctgcatcataacccccacagccaaggcctggaagtacatggaggaggagatccttggtttcgggaagtcggtctgtgacagccttgggcggcgacacatgtctacctgtgccctctgtgacttctgctccttgaagctggagcagtgccactcagaggccagcctgcagcggcaacaatgcgacacctcccacaagactccctttgtcagccccttgcttgcctcccagagcctgtccatcggcaaccaggtagggtccccagaatcaggccgcttttacgggctggatttgtacggtgggctccacatggacttctggtgtgcccggcttgccacgaaaggctgtgaagatgtccgagtctctgggtggctccagactgagttccttagcttccaggatggggatttccctaccaagatttgtgacacagactatatccagtacccaaactactgttccttcaaaagccagcagtgtctgatgagaaaccgcaatcggaaggtgtcccgcatgagatgtctgcagaatgagacttacagtgcgctgagccctggcaaaagtgaggacgttgtgcttcgatggagccaggagttcagcaccttgactctaggccagttcggatgagctggcgtctattctgcccacaccccagcccaacctgcccacgttctctattgttttgagaccccattgctttcaggctgccccttctgggtctgttactcggcccctactcacatttcctt

SEQ ID NO: 103852 - DNA, 588 bp, Homo sapiens
  Payload ID: 417
  Gene Symbol: ACRBP
  Gene Name: acrosin binding protein
  ENST ID: ENST00000546114
  CDS Start-End: 68-588
tctctctgcggcttggcccgttagaggcggcttgtgtccacgggacgcgggcggatcttctccggccatgaggaagccagccgctggcttccttccctcactcctgaaggtgctgctcctgcctctggcacctgccgcagcccaggattcgactcaggcctccactccaggcagccctctctctcctaccgaatacgaacgcttcttcgcactgctgactccaacctggaaggcagagactacctgccgtctccgtgcaacccacggctgccggaatcccacactcgtccagctggaccaatatgaaaaccacggcttagtgcccgatggtgctgtctgctccaacctcccttatgcctcctggtttgagtctttctgccagttcactcactaccgttgctccaaccacgtctactatgccaagagagtcctgtgttcccagccagtctctattctctcacctaacactctcaaggagatagaagcttcagctgaagtctcacccaccacgatgacctcccccatctcaccccacttcacagaacgccagaccttccagccctggcctgagaggctcagcaacaacgt

SEQ ID NO: 103853 - DNA, 1053 bp, Homo sapiens
  Payload ID: 417
  Gene Symbol: ACRBP
  Gene Name: acrosin binding protein
  ENST ID: ENST00000536350
  CDS Start-End: 28-987
cgggacgcgggcggatcttctccggccatgaggaagccagccgctggcttccttccctcactcctgaaggtgctgctcctgcctctggcacctgccgcagcccaggattcgactcaggcctccactccaggcagccctctctctcctaccgaatacgaacgcttcttcgcactgctgactccaacctggaaggcagagactacctgccgtctccgtgcaacccacggctgccggaatcccacactcgtccagctggaccaatatgaaaaccacggcttagtgcccgatggtgctgtctgctccaacctcccttatgcctcctggtttgagtctttctgccagttcactcactaccgttgctccaaccacgtctactatgccaagagagtcctgtgttcccagccagtctctattctctcacctaacactctcaaggagatagaagcttcagctgaagtctcacccaccacgatgacctcccccatctcaccccacttcacagtgacagaacgccagaccttccagccctggcctgagaggctcagcaacaacgtggaagagctcctacaatcctccttgtccctgggaggccaggagcaagcgccagagcacaagcaggagcaaggagtggagcacaggcaggagccgacacaagaacacaagcaggaagaggggcagaaacaggaagagcaagaagaggaacaggaagaggagggaaagcaggaagaaggacaggggactaaggagggacgggaggctgtgtctcagctgcagacagactcagagcccaagtttcactctgaatctctatcttctaacccttcctcttttgctccccgggtacgagaagtagagtctactcctatgataatggagaacatccaggagctcattcgatcagcccaggaaatagatgaaatgaatgaaatatatgatgagaactcctactggagaaaccaaaaccctggcaggtataggaagttttgactctgtcatccaccctgccctcccttctgcctttcttgggagtgagaagcccattttcctagcttc

SEQ ID NO: 103854 - DNA, 791 bp, Homo sapiens
  Payload ID: 417
  Gene Symbol: ACRBP
  Gene Name: acrosin binding protein
  ENST ID: ENST00000535884
  CDS Start-End: 46-348
agaggcggcttgtgtccacgggacgcgggcggatcttctccggccatgaggaagccagccgctggcttccttccctcactcctgaaggtgctgctcctgcctctggcacctgccgcagcccaggattcgactcaggcctccactccaggcagccctctctctcctaccgaatacgaacgcttcttcgcactgctgactccaacctggaaggcagagactacctgccgtctccgtgcaacccacggctgccggaatcccacactcgtccagctggaccaatatgaaaaccacggcttagtgcccgatgagagtcctgtgttcccagccagtctctattctctcacctaacactctcaaggagatagaagcttcagctgaagtctcacccaccacgatgacctcccccatctcaccccacttcacagtgacagaacgccagaccttccagccctggcctgagaggctcagcaacaacgtggaagagctcctacaatcctccttgtccctgggaggccaggagcaagcgccagagcacaagcaggagcaaggagtggagcacaggcaggagccgacacaagaacacaagcaggaagaggggcagaaacaggaagagcaagaagaggaacaggaagaggagggaaagcaggaagaaggacaggggactaaggagggacgggaggctgtgtctcagctgcagacagactcagagcccaagtttcactctgaatctctatcttctaacccttcctcttttgctccccgggtacgagaagtagagtctactcctatga

SEQ ID NO: 103855 - DNA, 1042 bp, Homo sapiens
  Payload ID: 418
  Gene Symbol: ACRV1
  Gene Name: acrosomal vesicle protein 1
  Uniprot ID: P26436
  ENST ID: ENST00000315608
  CDS Start-End: 52-792
ctgtgaagaagctgtggcccacactggggtcccctcttttcctaaatccagatgaacaggtttctcttgctaatgagtctttatctgcttggatctgccagaggaacatcaagtcagcctaatgagctttctggctccatagatcatcaaacttcagttcagcaacttccaggtgagttcttttcacttgaaaacccttctgatgctgaggctttatatgagacttcttcaggcctgaacactttaagtgagcatggttccagtgagcatggttcaagcaagcacactgtggccgagcacacttctggagaacatgctgagagtgagcatgcttcaggtgagcccgctgcgactgaacatgctgaaggtgagcatactgtaggtgagcagccttcaggagaacagccttcaggtgaacacctctccggagaacagcctttgagtgagcttgagtcaggtgaacagccttcagatgaacagccttcaggtgaacatggctccggtgaacagccttctggtgagcaggcctcgggtgaacagccttcaggcacaatattaaattgctacacatgtgcttatatgaatgatcaaggaaaatgtcttcgtggagagggaacctgcatcactcagaattcccagcagtgcatgttaaagaagatctttgaaggtggaaaactccaattcatggttcaagggtgtgagaacatgtgcccatctatgaacctcttctcccatggaacgaggatgcaaattatatgctgtcgaaatcaatctttctgcaataagatctagaagcctgggcccttgcttgttttgactcaggcagtaaaaagcctccatcactctatttggctcattttatatttagttccttccccagtcaacaactgaccacatctgcctctgcctgagcattaggatgctcaaacatcctatctttcttcttctattcatgcttttatccattcttctctgtcctgtcttccctgctccaactctttctctcaatattcctgatttttttttcaataaatttcacatg

SEQ ID NO: 103856 - DNA, 2212 bp, Homo sapiens
  Payload ID: 418
  Gene Symbol: ACRV1
  Gene Name: acrosomal vesicle protein 1
  Uniprot ID: P26436
  ENST ID: ENST00000533904
  CDS Start-End: 344-1141
atcttttaaactttattacaaaaaatatgtgctttttggtaatactttttttttttttttaaagatagggcagatagccccaacacactaccctgcacacagaaaataatcattggtcttcactagtgaaataagcagtgggttgctaagggccaacttgcctgaacaggctacacaagaacctcagagcccaacccattgtgaagaaacatgggttacttctgaggttctagaattcccagaagctctgcttcagcactggaagcttttgctcgcagtttgcttcatagctctgtgaagaagctgtggcccacactggggtcccctcttttcctaaatccagatgaacaggtttctcttgctaatgagtctttatctgcttggatctgccagaggaacatcaagtcagcctaatgagctttctggctccatagatcatcaaacttcagttcagcaacttccaggtgagttcttttcacttgaaaacccttctgatgctgaggctttatatgagacttcttcaggcctgaacactttaagtgagcatggttccagtgagcatggttcaagcaagcacactgtggccgagcacacttctggagaacatgctgagagtgagcatgcttcaggtgagcccgctgcgactgaacatgctgaaggtgagcatactgtaggtgagcagccttcaggagaacagccttcaggtgaacacctctccggagaacagcctttgagtgagcttgagtcaggtgaacagccttcagatgaacagccttcaggtgaacatggctccggtgaacagccttctggtgagcaggcctcgggtgaacagccttcaggtgagcacgcttcaggggaacaggcttcaggtgcaccaatttcaagcacatctacaggcacaatattaaattgctacacatgtgcttatatgaatgatcaaggaaaatgtcttcgtggagagggaacctgcatcactcagaattcccagcagtgcatgttaaagaagatctttgaaggtggaaaactccaattcatggttcaagggtgtgagaacatgtgcccatctatgaacctcttctcccatggaacgaggatgcaaattatatgctgtcgaaatcaatctttctgcaataagatctagaagcctgggcccttgcttgttttgactcaggcagtaaaaagcctccatcactctatttggctcattttatatttagttccttccccagtcaacaactgaccacatctgcctctgcctgagcattaggatgctcaaacatcctatctttcttcttctattcatgcttttatccattcttctctgtcctgtcttccctgctccaactctttctctcaatattcctgatttttttttcaataaatttcacatggttaaagcacacaggctcaagacagacctttttttcccccattaatctagttgcagggtcaacatgagcttccttccacaccgacactaaactgggtgcattgtttaagcattccatatttatgaaagtaaaggagtctccaagggcagagacaacaaagaggaatgcaaagtaggtattaatcttttacagggtgtaaacgtgcaggtacttctgacacccccccttttccatccctacacactcttccatttattatggcatacaaaaactcaactcttctttggctcttgagagtttctagtcttcagtagtccactactaacataatgataatagtataatgattccttatttgctatatattgcagcagttcataatgcttaaatcatttttttcacacacaatgttactgaatcatctatacaggataggagggcaaatggaaatactaaacggtccctcatataagtgttatgttcttcaagatgttttcacatacacggtctcatctgatcctcaggaaagatcccagagtggtagacaggaaagatggcatcatccttttttgcaaataaggaaatgtgacacagagatgttttctttattcatactccatgttgttccaaatttaccaaggttacagagctacagagagctataggcagattccacaaccaaatctgcaagatctaaatctgagctgtttccaccacaatgaaagtagccagaatggttctaagaactcttagaacagtacaacaagaagtcaattttactgtatataaaatttaaaatttcaacatatatacacatcatg

SEQ ID NO: 103857 - DNA, 794 bp, Homo sapiens
  Payload ID: 418
  Gene Symbol: ACRV1
  Gene Name: acrosomal vesicle protein 1
  Uniprot ID: P26436
  ENST ID: ENST00000530048
  CDS Start-End: 52-684
ctgtgaagaagctgtggcccacactggggtcccctcttttcctaaatccagatgaacaggtttctcttgctaatgagtctttatctgcttggatctgccagaggaacatcaagtcagcctaatgagctttctggctccatagatcatcaaacttcagttcagcaacttccaggtgagcccgctgcgactgaacatgctgaaggtgagcatactgtaggtgagcagccttcaggagaacagccttcaggtgaacacctctccggagaacagcctttgagtgagcttgagtcaggtgaacagccttcagatgaacagccttcaggtgaacatggctccggtgaacagccttctggtgagcaggcctcgggtgaacagccttcaggtgagcacgcttcaggggaacaggcttcaggtgcaccaatttcaagcacatctacaggcacaatattaaattgctacacatgtgcttatatgaatgatcaaggaaaatgtcttcgtggagagggaacctgcatcactcagaattcccagcagtgcatgttaaagaagatctttgaaggtggaaaactccaattcatggttcaagggtgtgagaacatgtgcccatctatgaacctcttctcccatggaacgaggatgcaaattatatgctgtcgaaatcaatctttctgcaataagatctagaagcctgggcccttgcttgttttgactcaggcagtaaaaagcctccatcactctatttggctcattttatatttagttccttccccagtcaacaactgaccacatctgcc

SEQ ID NO: 103858 - DNA, 782 bp, Homo sapiens
  Payload ID: 418
  Gene Symbol: ACRV1
  Gene Name: acrosomal vesicle protein 1
  Uniprot ID: P26436
  ENST ID: ENST00000527795
  CDS Start-End: 95-682
gcttcagcactggaagcttttgctcgcagtttgcttcatagctctgtgaagaagctgtggcccacactggggtcccctcttttcctaaatccagatgaacaggtttctcttgctaatgagtctttatctgcttggatctgccagaggaacatcaagtcagcctaatgagctttctggctccatagatcatcaaacttcagttcagcaacttccaggtgagcagccttcaggagaacagccttcaggtgaacacctctccggagaacagcctttgagtgagcttgagtcaggtgaacagccttcagatgaacagccttcaggtgaacatggctccggtgaacagccttctggtgagcaggcctcgggtgaacagccttcaggtgagcacgcttcaggggaacaggcttcaggtgcaccaatttcaagcacatctacaggcacaatattaaattgctacacatgtgcttatatgaatgatcaaggaaaatgtcttcgtggagagggaacctgcatcactcagaattcccagcagtgcatgttaaagaagatctttgaaggtggaaaactccaattcatggttcaagggtgtgagaacatgtgcccatctatgaacctcttctcccatggaacgaggatgcaaattatatgctgtcgaaatcaatctttctgcaataagatctagaagcctgggcccttgcttgttttgactcaggcagtaaaaagcctccatcactctatttggctcattttatatttagttccttccccagtcaacaactgac

SEQ ID NO: 103859 - DNA, 2657 bp, Homo sapiens
  Payload ID: 419
  Gene Symbol: ABLIM1
  Gene Name: actin binding LIM protein 1
  Uniprot ID: O14639
  ENST ID: ENST00000277895
  CDS Start-End: 99-2435
agacagtaaggagccaggggaacagagagaattgtggggcagcaccgctccttgggtccccactccccatttctcattgcttggaaatccatgccaagatgcctgccttccttggtctaaagtgtctggggaaattgtgcagctctgagaaaagcaaagtcacctcatctgagagaaccagtgccaggggctcgaacagaaagagactgattgttgaggaccggagggtctctgggacctccttcaccgctcataggcgtgccactatcactcatttgctgtatctctgtcccaaggactactgcccacgtgggcgtgtatgtaacagcgttgatccttttgtggcccaccctcaggaccctcaccacccatcagagaagcctgtcattcactgccataaatgtggggagccttgcaagggtgaagtgcttcgggtccagaccaaacatttccacatcaagtgtttcacctgcaaagtgtgtggctgtgacctggcacaagggggcttcttcataaagaacggagagtatctctgcaccctggactaccagcggatgtacgggacacgctgccatggctgtggggagttcgtggagggcgaagtggtgactgctctgggcaagacctaccatcccaattgctttgcttgtactatctgcaagcgcccgtttccacccggagaccgagtcacattcaatgggagagactgcctttgtcaactctgtgcacagccgatgtcgtccagtccgaaagaaaccaccttctccagcaattgtgccggctgcggaagagatatcaagaatgggcaggcgctgctggcgctggataagcagtggcacttggggtgctttaaatgcaagtcctgcgggaaggtcctcaccggggagtacatcagcaaggatggtgctccgtactgtgaaaaggactaccagggactctttggggtgaaatgtgaggcgtgtcaccagtttatcacagggaaagtcctggaggcaggtgacaaacattaccaccccagctgtgcacgatgcagcagatgcaaccagatgttcacagaaggagaggaaatgtatcttcaaggctccaccgtttggcatcccgactgtaagcaatctacgaagaccgaggaaaagctgcggcctaccaggacatcctcggaaagtatttattctaggccaggctccagtattcctggctcaccaggtcatactatctatgcaaaagtagacaatgagatcctggattacaaggatttagcagccattccgaaggtcaaggcaatttatgacattgaacgtccagatcttattacctatgagcctttctacacttcgggctatgatgacaaacaggagagacagagccttggagagtctccgaggactttgtctcctactccatcagcagaagggtaccaggatgttcgggatcggatgatccatcggtccacgagccagggctccatcaactcccctgtgtacagccgccacagctacactccaaccacgtcccgctctccccagcatttccacagacctggcaatgagccgtccagcggccggaactcccctctcccttaccggccagacagccgccctctaactccaacttacgctcaggcccctaaacatttccatgttccagatcaaggaatcaacatttaccgaaagccacccatctacaaacagcatgctgccttggcagcccagagcaagtcctcagaagatatcatcaagttttccaagttcccagcagcccaggcaccagaccccagcgagacaccaaagattgagacggaccactggcctggtcccccctcatttgctgtcgtaggacctgacatgaaacgcagatctagtggcagagaggaagatgatgaggaacttctgagacgtcggcagcttcaagaagagcaattaatgaagcttaactcaggcctgggacagttgatcttgaaagaagagatggagaaagagagccgggaaaggtcatctctgttagccagtcgctacgattctcccatcaactcagcttcacatattccatcatctaaaactgcatctctccctggctatggaagaaatgggcttcaccggcctgtttctaccgacttcgctcagtataacagctatggggatgtcagcgggggagtgcgagattaccagacactcccagatggccacatgcctgcaatgagaatggaccgaggagtgtctatgcccaacatgttggaaccaaagatatttccatatgaaatgctcatggtgaccaacagagggcgaaacaaaatcctcagagaggtggacagaaccaggctggagcgccacttagcccctgaagtgtttcgggaaatctttggaatgtccatacaggagtttgacaggttacctctttggagacgcaacgacatgaagaaaaaagcaaaactcttctaagtcccactcgtgaatggcaattagagaaaggactgacagtggcggtgccccataggatgtcatattgaggcccaaacttgattggagaatttgcaaactaccgtcgctcagcaacaccaaaaagagaaagtctggttaaaacaccatgagtcaaatgtcgggccagccaacagtaacacttgccaagaagcatggcgtagaaatttctatgttccgaaacac

SEQ ID NO: 103860 - DNA, 7690 bp, Homo sapiens
  Payload ID: 419
  Gene Symbol: ABLIM1
  Gene Name: actin binding LIM protein 1
  ENST ID: ENST00000369252
  CDS Start-End: 303-2543
gtcattgagctgatgtgcttttgcaaggggtctctttagaagtggtaggggcagggtcgagagaagaaggggatgcagaatctgtacatgaggaaggagccagagtcactcaggaaactcctcattcttcctgcgctggctgtggcacacccaccggtggcacacccctccctcgggtccagttcagcccacagactcctgggaggagagccagggccccagcctctcctttgaggagtgttgcagcctttctgtgtgccagatgcctagtgaagaaaagctgaaaccctggagctttgtgcatgttaatgaccttggaaatgactgagctcacggaccctcatcacaccatgggagactacaaagtggcccaccctcaggaccctcaccacccatcagagaagcctgtcattcactgccataaatgtggggagccttgcaagggtgaagtgcttcgggtccagaccaaacatttccacatcaagtgtttcacctgcaaagtgtgtggctgtgacctggcacaagggggcttcttcataaagaacggagagtatctctgcaccctggactaccagcggatgtacgggacacgctgccatggctgtggggagttcgtggagggcgaagtggtgactgctctgggcaagacctaccatcccaattgctttgcttgtactatctgcaagcgcccgtttccacccggagaccgagtcacattcaatgggagagactgcctttgtcaactctgtgcacagccgatgtcgtccagtccgaaagaaaccaccttctccagcaattgtgccggctgcggaagagatatcaagaatgggcaggcgctgctggcgctggataagcagtggcacttggggtgctttaaatgcaagtcctgcgggaaggtcctcaccggggagtacatcagcaaggatggtgctccgtactgtgaaaaggactaccagggactctttggggtgaaatgtgaggcgtgtcaccagtttatcacagggaaagtcctggaggcaggtgacaaacattaccaccccagctgtgcacgatgcagcagatgcaaccagatgttcacagaaggagaggaaatgtatcttcaaggctccaccgtttggcatcccgactgtaagcaatctacgaagaccgaggaaaagctgcggctgccaaacattcggcgttcttcatccgatttcttttattccaaaagtctgattcgacgcacaggacggtctccgtctctgcagcctaccaggacatcctcggaaagtatttattctaggccaggctccagtattcctggctcaccaggtcatactatctatgcaaaagtagacaatgagatcctggattacaaggatttagcagccattccgaaggtcaaggcaatttatgacattgaacgtccagatcttattacctatgagcctttctacacttcgggctatgatgacaaacaggagagacagagccttggagagtctccgaggactttgtctcctactccatcagcagaagggtaccaggatgttcgggatcggatgatccatcggtccacgagccagggctccatcaactcccctgtgtacagccgccacagctacactccaaccacgtcccgctctccccagcatttccacagacctggcaatgagccgtccagcggccggaactcccctctcccttaccggccagacagccgccctctaactccaacttacgctcaggcccctaaacatttccatgttccagatcaaggaatcaacatttaccgaaagccacccatctacaaacagcatgctgccttggcagcccagagcaagtcctcagaagatatcatcaagttttccaagttcccagcagcccaggcaccagaccccagcgagacaccaaagattgagacggaccactggcctggtcccccctcatttgctgtcgtaggacctgacatgaaacgcagatctagtggcagagaggaagatgatgaggaacttctgagacgtcggcagcttcaagaagagcaattaatgaagcttaactcaggcctgggacagttgatcttgaaagaagagatggagaaagagagccgggaaaggtcatctctgttagccagtcgctacgattctcccatcaactcagcttcacatattccatcatctaaaactgcatctctccctggctatggaagaaatgggcttcaccggcctgtttctaccgacttcgctcagtataacagctatggggatgtcagcgggggagtgcgagatttccagacactcccagatggccacatgcctgcaatgagaatggaccgaggagtgtctatgcccaacatgttggaaccaaagatatttccatatgaaatgctcatggtgaccaacagagggcgaaacaaaatcctcagagaggtggacagaaccaggctggagcgccacttagcccctgaagtgtttcgggaaatctttggaatgtccatacaggagtttgacaggttacctctttggagacgcaacgacatgaagaaaaaagcaaaactcttctaagtcccactcgtgaatggcaattagagaaaggactgacagtggcggtgccccataggatgtcatattgaggcccaaacttgattggagaatttgcaaactaccgtcgctcagcaacaccaaaaagagaaagtctggttaaaacaccatgagtcaaatgtcgggccagccaacagtaacacttgccaagaagcatggcgtagaaatttctatgttccgaaacacagagtagtgtccacatgtgagcttttcacattaccttatgtatacaacaggagctgcgttgttttcttctttttcttttcctttatctgttgtccaacaacagtgctgactgtccggataagagctggcaagtgcccttaggatgccgcatgggaaaaatcggttatcataatttcaaagtataaatatatttattaagtagcgctgcggctaagaaggaagagtgaggggtctgtccatggggtggcagtgatttcacacccgcctttcttgaatggcttcgtgttactcagccgtgccctggcaggaatggaactccatcagggaacagggcagctctgtttgaatggggtgaaaaacagcaaaattaattcttagcaagctccttgttctctactgttcaccgggacctggctggcaaatgacttagctattagtatatttaaaaactgttcaaaagcaaaagagaaggaacaggaatgaaaggaaaccttcccttaactctttctgcttcccatagcaggtctggttcctgctccccgcctaggacaggagctgtctggagctccacctttgcaaagaaaggaaaaacacaaattgcccccagattggcccagtggcatgccattaggtgattttgcataggggccatatcattcatggccaaaaaaaaccaaaaagcaaaaaacaaaaacaagtcccatgtcctactgactctagttcttccagtcgttatcctctgctgtctctctggcatcctatgaatcagatcaagcccatgctgttgttggtttttaaggtttctttcaataataggctaaggaaagacatgtttttctcttttaaatctctgcaactccaaagtagactccttcgaacgtatttaatttggccttttcagctttcttcttgcccagctctgtcgaattcatgggtgtgtgtgcacatgttggtttcactcacccagagtaattttgtgagcatgcatgtgctttttaatttctgcttgaatgtttgtcctgctgtgttgcagcttctaaagacattgtcaccgagtgtgtgtgactcaaagatcaagagtgaggctaaactgcgaccccaacatcacttccttcatggaaaggtgttggcgctgatgtagctcatggaaggatcagactgggaaccacagaggaaggatgaggtgggatgtggaggtcagagcatctcacgagagtccctcaggctctgcaacactagattcgaatatgagcctagggtttccccaacacgtgcgtgcatatgaaaccacatcatgattcccgacgtgagttagatgagggagagtttgtgtaactccacacccaggagggtaagccactttattatcatgctttggggctgtgcttaagaatttaagctctgttttaaagccgaagaagaaaacatttgaatttaccttcatatgccactaagaacaaaagctctgaagttcttcctgctggcaccaaatattaggattacaagctgtctctctgacaccagtggtaaaaaagcaagtagaatagtttctgagtctgtgttgcagcctctgacacgtggctcaccgctgtcatttgggggatggaatgaacagtcactgttctatagcatcctcctgtgctcttacctaaggaatctaaattgtcctagccttccattgctatgcactgaatgaggactactctcgtgtgtgtgtgtgtgtgtgtgtgtgtgtgtgtgtgtgtgtgtgtgtgtgttggatctactaacatgtttagcaaatggctctgacagggtggccatgagcagatgagaccagctcttgcttggttggaagccacactgcagtttgcagtttagcctttggtgtctcagtggcttcttgcttattccatgctttttctatcccatcctctctctgtgccctcctgcaatggcagccttggcacaatgcctgggtgtcctcatccttgctttactctggaaagtgtggggatggagaggatggtgcatttccagtgcttccttacctgtcaataacaatggtggccacctgggtcccagcacttggctggtggagagatttttttcattatggagctaataaagggtccctacgttttacattgattaatgaattatcacccagacatgtgcagatgaaatgtcaatataagaaaaatcaaggtatttgggaaacatgggcataatcaggtagttttgctaaaattcctcttccttggtctacataaagaagacatgggtctgtcatagaatggggacattagactgaaaactgggacaacccccttccttattttatagagactaggagttaaggggcctgcctaagattgcagtgataaagaactgaaccctaaatcagctcccactaatgaaaccctgctttccttgtatcttttaaactcagttctgcatccaacttgagaagaaaaaaagcttctttccatatcaagtaccatatgagttcatttaaactgcaccttgcagaaatgcattgccagaaagcaccagtagcctcctatctgcaagcagagtagtgctctgctctggggaggggtcattggaaaccataatgcagagtgggccccctactccatttcccagcaaaaggctccagctggagggatgggttgtggggcaacctggttcctgctaactgccagattgaatgtgtgggctagaatgcctgcacatttagttaaactgggctcagcatgcttgtcctcaaaatgtccatcctggtcacagcacacaagatggctattggtctgcttttaccctaccctgtactatacatgaaaattccagttattaacacactcaaactggtggagcttgttcaccctaggaaggggattgtatatatggcaggcttccctggtgccgatgtaaagggctacatttgggaacatttgacttccttgggactcttaagtgcataatgatggcatgaagtaaaaggggcctcaatgatgataggaaaatcagttcttttaaaatttcttcaagaaaatccaggctatcacatagtctttctgtgtgacttattaggagataggaagagcattgggaaacttgcacagctagctatgcatctacattttggtttggggttagttatgaaatgttcttaatatgacgtgttcaataacttcacataaacttcctgttctccaaaacctcaaagagatagagttaatgagttgttgtttttttttaaatgggggtagttttctatctgtcatgggctctagcatctactccgctacccaattctgtcatctccaagctgagtttcctcttctgaggcagaggctggagcagttctttttcagttctcatcctctccatcccaatccagtatatcaatcaactctaactcggagacgtctagctggcaatgtttctaaaactttcactggatttctttagacattgaagcaaacatttttttctaagaattgcttctcagatgatgatatcaaatgtatatgcttttgcaagtttgaaaagttcaaattaaccacttttgactaggtaagtctttctaaaaaccatttaaagctaactgggtcttagcatcctcctgtgtatggaagagacaggtgaccgctccaggttgggtgctcacagaacccttttcctgactctcatggaagatggtggaaggaaaatagactgtctcatcaaccctcctgtgtcctctgaagcaatctcagtttttattaaccacctcttctgtgtttctggtagctatttaacctgtatttaatctgtacttcctatgccagcctcaattttatttgatttttacaattattctcttctaaccaatgaagtgtttgtcagtatgccccaaagcttgctcttttgtgctcccttttgaataactttctatccagaaaaagagattatttgggacttgagatttgcagtgataccaacttatagcaatgatgtactttaagggaactacccaactatgttgtgatagaagaaagagaaaccttcactttggcatttttttttaatcactgtttatttttctgtttgcggcccaggaagcagtgggaggtggtggcagatatgctttgcatatggattgttatgtttttatttgggcaagtttaatcatggaaaactcaaaaagaaggggggaaatggtcagtttaagccaaaagaaactttctaaacaatgtataggtacacagcaaaattaaacaaatccaacaatttctgaagcttagtgtaattgagtggtggttgttattcaataaaattattcccaaaagtgtttctcctaagagtgcagttcccatgagtcacttcctgaacccattgaccaaaggtggacagagacaatcctgtagaccttgacattcagaaagatgtgagctgcttactgatcatatatgcatacgtttctttacagcagaggaaaccattgtccacaaaactgatgttcttttggggttttatgtacagacttgtccaatcatgtgtgtggttcctgcgagttgctgatgactccgcattgaagctctctgagttctttgattttaagttgggtttatggaattttttcaaatgttggaaggtgtgtggttcttcctgccctccctccccttttggaaatatgaaagcaaatgtttagaagaattccttttgaaaagctgtgtcgtgttccctgtgaaactgagcaggtgtgtgttggcgcgctaagtgccacatgcttgtgtgtagaggaggaggtggccctgccggctccgcgctgctgtgcctgtgatccctacctgctccccgctcctgttgccagcagcactcactgcactcctttgtcatatactctgcatcactgtcatactcacaacttcgtgaataaagttgtgtgctttattcgt

SEQ ID NO: 103861 - DNA, 2255 bp, Homo sapiens
  Payload ID: 419
  Gene Symbol: ABLIM1
  Gene Name: actin binding LIM protein 1
  Uniprot ID: O14639
  ENST ID: ENST00000369253
  CDS Start-End: 231-1436
cgagcttcggagagaagcctgatatgtaacccaggcaggtgggagcctcagtctgtcgggctgaggtctggcatctacaaagcctcttggccgtgttctgaacttgaagcctggaggagttctctgctcagcacagccaaggaacagaattagaagaaaaggaaccctggcctgaggcaggtgacaaacattaccaccccagctgtgcacgatgcagcagatgcaaccagatgttcacagaaggagaggaaatgtatcttcaaggctccaccgtttggcatcccgactgtaagcaatctacgaagaccgaggaaaagctgcgggcaaaagtagacaatgagatcctggattacaaggatttagcagccattccgaaggtcaaggcaatttatgacattgaacgtccagatcttattacctatgagcctttctacacttcgggctatgatgacaaacaggagagacagagccttggagagtctccgaggactttgtctcctactccatcagcagaagggtaccaggatgttcgggatcggatgatccatcggtccacgagccagggctccatcaactcccctgtgtacagccgccacagctacactccaaccacgtcccgctctccccagcatttccacagacctgatcaaggaatcaacatttaccgaaagccacccatctacaaacagcatgctgccttggcagcccagagcaagtcctcagaagatatcatcaagttttccaagttcccagcagcccaggcaccagaccccagcgagacaccaaagattgagacggaccactggcctggtcccccctcatttgctgtcgtaggacctgacatgaaacgcagatctagtggcagagaggaagatgatgaggaacttctgagacgtcggcagcttcaagaagagcaattaatgaagcttaactcaggcctgggacagttgatcttgaaagaagagatggagaaagagagccgggaaaggtcatctctgttagccagtcgctacgattctcccatcaactcagcttcacatattccatcatctaaaactgcatctctccctggctatggaagaaatgggcttcaccggcctgtttctaccgacttcgctcagtataacagctatggggatgtcagcgggggagtgcgagattaccagacactcccagatggccacatgcctgcaatgagaatggaccgaggagtgtctatgcccaacatgttggaaccaaagatatttccatatgaaatgctcatggtgaccaacagagggcgaaacaaaatcctcagagaggtggacagaaccaggctggagcgccacttagcccctgaagtgtttcgggaaatctttggaatgtccatacaggagtttgacaggttacctctttggagacgcaacgacatgaagaaaaaagcaaaactcttctaagtcccactcgtgaatggcaattagagaaaggactgacagtggcggtgccccataggatgtcatattgaggcccaaacttgattggagaatttgcaaactaccgtcgctcagcaacaccaaaaagagaaagtctggttaaaacaccatgagtcaaatgtcgggccagccaacagtaacacttgccaagaagcatggcgtagaaatttctatgttccgaaacacagagtagtgtccacatgtgagcttttcacattaccttatgtatacaacaggagctgcgttgttttcttctttttcttttcctttatctgttgtccaacaacagtgctgactgtccggataagagctggcaagtgcccttaggatgccgcatgggaaaaatcggttatcataatttcaaagtataaatatatttattaagtagcgctgcggctaagaaggaagagtgaggggtctgtccatggggtggcagtgatttcacacccgcctttcttgaatggcttcgtgttactcagccgtgccctggcaggaatggaactccatcagggaacagggcagctctgtttgaatggggtgaaaaacagcaaaattaattcttagcaagctccttgttctctactgttcaccgggacctggctggcaaatgacttagctattagtatatttaaaaactgttcaaaagcaaaagagaaggaacaggaatgaaaggaaaccttcccttaactctttctgcttcccatagcaggtctggttcctgctccccgcctaggacaggagctgtctggagctccacctttgcaaagaaaggaaaaacacaaa

SEQ ID NO: 103862 - DNA, 3203 bp, Homo sapiens
  Payload ID: 419
  Gene Symbol: ABLIM1
  Gene Name: actin binding LIM protein 1
  Uniprot ID: O14639
  ENST ID: ENST00000369256
  CDS Start-End: 651-2897
ataccaggagtttgtcagggaactgtttccaaagccataatgaataatcaggctgttagtaaaagaagcctctccaagttatagcattttttaaaaattctagtagtgaagaaaataattaaaagcccatctggttgagatagtaattcattaaggaaaaagaggaggcagaaggctggggaataatcgatccttttctttctttatttcatgtgtttcagttattgtgaaatgatagtgatcaaaatctggattctggattgtgcagaatgcaggaaaatcctaggaacattcttggcgtgttctaatagtggcttcccagaaacgagtgttttcagtgggtgtggcgtcattgagctgatgtgcttttgcaaggggtctctttagaagtggtaggggcagggtcgagagaagaaggggatgcagaatctgtacatgaggaaggagccagagtcactcaggaaactcctcattcttcctgcgctggctgtggcacacccaccggtggcacacccctccctcgggtccagttcagcccacagactcctgggaggagagccagggccccagcctctcctttgaggagtgttgcagcctttctgtgtgccagatgcctagtgaagaaaagctgaaaccctggagctttgtgcatgttaatgaccttggaaatgactgagctcacggaccctcatcacaccatgggagactacaaagtggcccaccctcaggaccctcaccacccatcagagaagcctgtcattcactgccataaatgtggggagccttgcaagggtgaagtgcttcgggtccagaccaaacatttccacatcaagtgtttcacctgcaaagtgtgtggctgtgacctggcacaagggggcttcttcataaagaacggagagtatctctgcaccctggactaccagcggatgtacgggacacgctgccatggctgtggggagttcgtggagggcgaagtggtgactgctctgggcaagacctaccatcccaattgctttgcttgtactatctgcaagcgcccgtttccacccggagaccgagtcacattcaatgggagagactgcctttgtcaactctgtgcacagccgatgtcgtccagtccgaaagaaaccaccttctccagcaattgtgccggctgcggaagagatatcaagaatgggcaggcgctgctggcgctggataagcagtggcacttggggtgctttaaatgcaagtcctgcgggaaggtcctcaccggggagtacatcagcaaggatggtgctccgtactgtgaaaaggactaccagggactctttggggtgaaatgtgaggcgtgtcaccagtttatcacagggaaagtcctggaggcaggtgacaaacattaccaccccagctgtgcacgatgcagcagatgcaaccagatgttcacagaaggagaggaaatgtatcttcaaggctccaccgtttggcatcccgactgtaagcaatctacgaagaccgaggaaaagctgcggctgccaaacattcggcgttcttcatccgatttcttttattccaaaagtctgattcgacgcacaggacggtctccgtctctgcagcctaccaggacatcctcggaaagtatttattctaggccaggctccagtattcctggctcaccaggtcatactatctatgcaaaagtagacaatgagatcctggattacaaggatttagcagccattccgaaggtcaaggcaatttatgacattgaacgtccagatcttattacctatgagcctttctacacttcgggctatgatgacaaacaggagagacagagccttggagagtctccgaggactttgtctcctactccatcagcagaagggtaccaggatgttcgggatcggatgatccatcggtccacgagccagggctccatcaactcccctgtgtacagccgccacagctacactccaaccacgtcccgctctccccagcatttccacagacctggcaatgagccgtccagcggccggaactcccctctcccttaccggccagacagccgccctctaactccaacttacgctcaggcccctaaacatttccatgttccagatcaaggaatcaacatttaccgaaagccacccatctacaaacagcatgatgcagctgccttggcagcccagagcaagtcctcagaagatatcatcaagttttccaagttcccagcagcccaggcaccagaccccagcgagacaccaaagattgagacggaccactggcctggtcccccctcatttgctgtcgtaggacctgacatgaaacgcagatctagtggcagagaggaagatgatgaggaacttctgagacgtcggcagcttcaagaagagcaattaatgaagcttaactcaggcctgggacagttgatcttgaaagaagagatggagaaagagagccgggaaaggtcatctctgttagccagtcgctacgattctcccatcaactcagcttcacatattccatcatctaaaactgcatctctccctggctatggaagaaatgggcttcaccggcctgtttctaccgacttcgctcagtataacagctatggggatgtcagcgggggagtgcgagattaccagacactcccagatggccacatgcctgcaatgagaatggaccgaggagtgtctatgcccaacatgttggaaccaaagatatttccatatgaaatgctcatggtgaccaacagagggcgaaacaaaatcctcagagaggtggacagaaccaggctggagcgccacttagcccctgaagtgtttcgggaaatctttggaatgtccatacaggagtttgacaggttacctctttggagacgcaacgacatgaagaaaaaagcaaaactcttctaagtcccactcgtgaatggcaattagagaaaggactgacagtggcggtgccccataggatgtcatattgaggcccaaacttgattggagaatttgcaaactaccgtcgctcagcaacaccaaaaagagaaagtctggttaaaacaccatgagtcaaatgtcgggccagccaacagtaacacttgccaagaagcatggcgtagaaatttctatgttccgaaacacagagtagtgtccacatgtgagcttttcacattaccttatgtatacaacaggagctgcgttgttttcttctttttcttttccttt

SEQ ID NO: 103863 - DNA, 2230 bp, Homo sapiens
  Payload ID: 419
  Gene Symbol: ABLIM1
  Gene Name: actin binding LIM protein 1
  ENST ID: ENST00000369266
  CDS Start-End: 226-1431
ttcggagagaagcctgatatgtaacccaggcaggtgggagcctcagtctgtcgggctgaggtctggcatctacaaagcctcttggccgtgttctgaacttgaagcctggaggagttctctgctcagcacagccaaggaacagaattagaagaaaaggaaccctggcctgaggcaggtgacaaacattaccaccccagctgtgcacgatgcagcagatgcaaccagatgttcacagaaggagaggaaatgtatcttcaaggctccaccgtttggcatcccgactgtaagcaatctacgaagaccgaggaaaagctgcgggcaaaagtagacaatgagatcctggattacaaggatttagcagccattccgaaggtcaaggcaatttatgacattgaacgtccagatcttattacctatgagcctttctacacttcgggctatgatgacaaacaggagagacagagccttggagagtctccgaggactttgtctcctactccatcagcagaagggtaccaggatgttcgggatcggatgatccatcggtccacgagccagggctccatcaactcccctgtgtacagccgccacagctacactccaaccacgtcccgctctccccagcatttccacagacctgatcaaggaatcaacatttaccgaaagccacccatctacaaacagcatgctgccttggcagcccagagcaagtcctcagaagatatcatcaagttttccaagttcccagcagcccaggcaccagaccccagcgagacaccaaagattgagacggaccactggcctggtcccccctcatttgctgtcgtaggacctgacatgaaacgcagatctagtggcagagaggaagatgatgaggaacttctgagacgtcggcagcttcaagaagagcaattaatgaagcttaactcaggcctgggacagttgatcttgaaagaagagatggagaaagagagccgggaaaggtcatctctgttagccagtcgctacgattctcccatcaactcagcttcacatattccatcatctaaaactgcatctctccctggctatggaagaaatgggcttcaccggcctgtttctaccgacttcgctcagtataacagctatggggatgtcagcgggggagtgcgagatttccagacactcccagatggccacatgcctgcaatgagaatggaccgaggagtgtctatgcccaacatgttggaaccaaagatatttccatatgaaatgctcatggtgaccaacagagggcgaaacaaaatcctcagagaggtggacagaaccaggctggagcgccacttagcccctgaagtgtttcgggaaatctttggaatgtccatacaggagtttgacaggttacctctttggagacgcaacgacatgaagaaaaaagcaaaactcttctaagtcccactcgtgaatggcaattagagaaaggactgacagtggcggtgccccataggatgtcatattgaggcccaaacttgattggagaatttgcaaactaccgtcgctcagcaacaccaaaaagagaaagtctggttaaaacaccatgagtcaaatgtcgggccagccaacagtaacacttgccaagaagcatggcgtagaaatttctatgttccgaaacacagagtagtgtccacatgtgagcttttcacattaccttatgtatacaacaggagctgcgttgttttcttctttttcttttcctttatctgttgtccaacaacagtgctgactgtccggataagagctggcaagtgcccttaggatgccgcatgggaaaaatcggttatcataatttcaaagtataaatatatttattaagtagcgctgcggctaagaaggaagagtgaggggtctgtccatggggtggcagtgatttcacacccgcctttcttgaatggcttcgtgttactcagccgtgccctggcaggaatggaactccatcagggaacagggcagctctgtttgaatggggtgaaaaacagcaaaattaattcttagcaagctccttgttctctactgttcaccgggacctggctggcaaatgacttagctattagtatatttaaaaactgttcaaaagcaaaagagaaggaacaggaatgaaaggaaaccttcccttaactctttctgcttcccatagcaggtctggttcctgctccccgcctaggacaggagctgtctggagctccacctttgc

SEQ ID NO: 103864 - DNA, 6841 bp, Homo sapiens
  Payload ID: 419
  Gene Symbol: ABLIM1
  Gene Name: actin binding LIM protein 1
  Uniprot ID: O14639
  ENST ID: ENST00000392952
  CDS Start-End: 327-1694
aaagcgaggagaggaggcgtgagagagcgtgcctgcccgccgcacacggggctggtttccggagtgcgtctctagagggatgcacgttgccttagccgagcttcggagagaagcctgatatgtaacccaggcaggtgggagcctcagtctgtcgggctgaggtctggcatctacaaagcctcttggccgtgttctgaacttgaagcctggaggagttctctgctcagcacagccaaggaacagaattagaagaaaaggaaccctggcctgaggcaggtgacaaacattaccaccccagctgtgcacgatgcagcagatgcaaccagatgttcacagaaggagaggaaatgtatcttcaaggctccaccgtttggcatcccgactgtaagcaatctacgaagaccgaggaaaagctgcggctgccaaacattcggcgttcttcatccgatttcttttattccaaaagtctgattcgacgcacaggacggtctccgtctctgcagcctaccaggacatcctcggaaagtatttattctaggccaggctccagtattcctggctcaccaggtcatactatctatgcaaaagtagacaatgagatcctggattacaaggatttagcagccattccgaaggtcaaggcaatttatgacattgaacgtccagatcttattacctatgagcctttctacacttcgggctatgatgacaaacaggagagacagagccttggagagtctccgaggactttgtctcctactccatcagcagaagggtaccaggatgttcgggatcggatgatccatcggtccacgagccagggctccatcaactcccctgtgtacagccgccacagctacactccaaccacgtcccgctctccccagcatttccacagacctgatcaaggaatcaacatttaccgaaagccacccatctacaaacagcatgctgccttggcagcccagagcaagtcctcagaagatatcatcaagttttccaagttcccagcagcccaggcaccagaccccagcgagacaccaaagattgagacggaccactggcctggtcccccctcatttgctgtcgtaggacctgacatgaaacgcagatctagtggcagagaggaagatgatgaggaacttctgagacgtcggcagcttcaagaagagcaattaatgaagcttaactcaggcctgggacagttgatcttgaaagaagagatggagaaagagagccgggaaaggtcatctctgttagccagtcgctacgattctcccatcaactcagcttcacatattccatcatctaaaactgcatctctccctggctatggaagaaatgggcttcaccggcctgtttctaccgacttcgctcagtataacagctatggggatgtcagcgggggagtgcgagattaccagacactcccagatggccacatgcctgcaatgagaatggaccgaggagtgtctatgcccaacatgttggaaccaaagatatttccatatgaaatgctcatggtgaccaacagagggcgaaacaaaatcctcagagaggtggacagaaccaggctggagcgccacttagcccctgaagtgtttcgggaaatctttggaatgtccatacaggagtttgacaggttacctctttggagacgcaacgacatgaagaaaaaagcaaaactcttctaagtcccactcgtgaatggcaattagagaaaggactgacagtggcggtgccccataggatgtcatattgaggcccaaacttgattggagaatttgcaaactaccgtcgctcagcaacaccaaaaagagaaagtctggttaaaacaccatgagtcaaatgtcgggccagccaacagtaacacttgccaagaagcatggcgtagaaatttctatgttccgaaacacagagtagtgtccacatgtgagcttttcacattaccttatgtatacaacaggagctgcgttgttttcttctttttcttttcctttatctgttgtccaacaacagtgctgactgtccggataagagctggcaagtgcccttaggatgccgcatgggaaaaatcggttatcataatttcaaagtataaatatatttattaagtagcgctgcggctaagaaggaagagtgaggggtctgtccatggggtggcagtgatttcacacccgcctttcttgaatggcttcgtgttactcagccgtgccctggcaggaatggaactccatcagggaacagggcagctctgtttgaatggggtgaaaaacagcaaaattaattcttagcaagctccttgttctctactgttcaccgggacctggctggcaaatgacttagctattagtatatttaaaaactgttcaaaagcaaaagagaaggaacaggaatgaaaggaaaccttcccttaactctttctgcttcccatagcaggtctggttcctgctccccgcctaggacaggagctgtctggagctccacctttgcaaagaaaggaaaaacacaaattgcccccagattggcccagtggcatgccattaggtgattttgcataggggccatatcattcatggccaaaaaaaaccaaaaagcaaaaaacaaaaacaagtcccatgtcctactgactctagttcttccagtcgttatcctctgctgtctctctggcatcctatgaatcagatcaagcccatgctgttgttggtttttaaggtttctttcaataataggctaaggaaagacatgtttttctcttttaaatctctgcaactccaaagtagactccttcgaacgtatttaatttggccttttcagctttcttcttgcccagctctgtcgaattcatgggtgtgtgtgcacatgttggtttcactcacccagagtaattttgtgagcatgcatgtgctttttaatttctgcttgaatgtttgtcctgctgtgttgcagcttctaaagacattgtcaccgagtgtgtgtgactcaaagatcaagagtgaggctaaactgcgaccccaacatcacttccttcatggaaaggtgttggcgctgatgtagctcatggaaggatcagactgggaaccacagaggaaggatgaggtgggatgtggaggtcagagcatctcacgagagtccctcaggctctgcaacactagattcgaatatgagcctagggtttccccaacacgtgcgtgcatatgaaaccacatcatgattcccgacgtgagttagatgagggagagtttgtgtaactccacacccaggagggtaagccactttattatcatgctttggggctgtgcttaagaatttaagctctgttttaaagccgaagaagaaaacatttgaatttaccttcatatgccactaagaacaaaagctctgaagttcttcctgctggcaccaaatattaggattacaagctgtctctctgacaccagtggtaaaaaagcaagtagaatagtttctgagtctgtgttgcagcctctgacacgtggctcaccgctgtcatttgggggatggaatgaacagtcactgttctatagcatcctcctgtgctcttacctaaggaatctaaattgtcctagccttccattgctatgcactgaatgaggactactctcgtgtgtgtgtgtgtgtgtgtgtgtgtgtgtgtgtgtgtgtgtgtgtgtgttggatctactaacatgtttagcaaatggctctgacagggtggccatgagcagatgagaccagctcttgcttggttggaagccacactgcagtttgcagtttagcctttggtgtctcagtggcttcttgcttattccatgctttttctatcccatcctctctctgtgccctcctgcaatggcagccttggcacaatgcctgggtgtcctcatccttgctttactctggaaagtgtggggatggagaggatggtgcatttccagtgcttccttacctgtcaataacaatggtggccacctgggtcccagcacttggctggtggagagatttttttcattatggagctaataaagggtccctacgttttacattgattaatgaattatcacccagacatgtgcagatgaaatgtcaatataagaaaaatcaaggtatttgggaaacatgggcataatcaggtagttttgctaaaattcctcttccttggtctacataaagaagacatgggtctgtcatagaatggggacattagactgaaaactgggacaacccccttccttattttatagagactaggagttaaggggcctgcctaagattgcagtgataaagaactgaaccctaaatcagctcccactaatgaaaccctgctttccttgtatcttttaaactcagttctgcatccaacttgagaagaaaaaaagcttctttccatatcaagtaccatatgagttcatttaaactgcaccttgcagaaatgcattgccagaaagcaccagtagcctcctatctgcaagcagagtagtgctctgctctggggaggggtcattggaaaccataatgcagagtgggccccctactccatttcccagcaaaaggctccagctggagggatgggttgtggggcaacctggttcctgctaactgccagattgaatgtgtgggctagaatgcctgcacatttagttaaactgggctcagcatgcttgtcctcaaaatgtccatcctggtcacagcacacaagatggctattggtctgcttttaccctaccctgtactatacatgaaaattccagttattaacacactcaaactggtggagcttgttcaccctaggaaggggattgtatatatggcaggcttccctggtgccgatgtaaagggctacatttgggaacatttgacttccttgggactcttaagtgcataatgatggcatgaagtaaaaggggcctcaatgatgataggaaaatcagttcttttaaaatttcttcaagaaaatccaggctatcacatagtctttctgtgtgacttattaggagataggaagagcattgggaaacttgcacagctagctatgcatctacattttggtttggggttagttatgaaatgttcttaatatgacgtgttcaataacttcacataaacttcctgttctccaaaacctcaaagagatagagttaatgagttgttgtttttttttaaatgggggtagttttctatctgtcatgggctctagcatctactccgctacccaattctgtcatctccaagctgagtttcctcttctgaggcagaggctggagcagttctttttcagttctcatcctctccatcccaatccagtatatcaatcaactctaactcggagacgtctagctggcaatgtttctaaaactttcactggatttctttagacattgaagcaaacatttttttctaagaattgcttctcagatgatgatatcaaatgtatatgcttttgcaagtttgaaaagttcaaattaaccacttttgactaggtaagtctttctaaaaaccatttaaagctaactgggtcttagcatcctcctgtgtatggaagagacaggtgaccgctccaggttgggtgctcacagaacccttttcctgactctcatggaagatggtggaaggaaaatagactgtctcatcaaccctcctgtgtcctctgaagcaatctcagtttttattaaccacctcttctgtgtttctggtagctatttaacctgtatttaatctgtacttcctatgccagcctcaattttatttgatttttacaattattctcttctaaccaatgaagtgtttgtcagtatgccccaaagcttgctcttttgtgctcccttttgaataactttctatccagaaaaagagattatttgggacttgagatttgcagtgataccaacttatagcaatgatgtactttaagggaactacccaactatgttgtgatagaagaaagagaaaccttcactttggcatttttttttaatcactgtttatttttctgtttgcggcccaggaagcagtgggaggtggtggcagatatgctttgcatatggattgttatgtttttatttgggcaagtttaatcatggaaaactcaaaaagaaggggggaaatggtcagtttaagccaaaagaaactttctaaacaatgtataggtacacagcaaaattaaacaaatccaacaatttctgaagcttagtgtaattgagtggtggttgttattcaataaaattattcccaaaagtgtttctcctaagagtgcagttcccatgagtcacttcctgaacccattgaccaaaggtggacagagacaatcctgtagaccttgacattcagaaagatgtgagctgcttactgatcatatatgcatacgtttctttacagcagaggaaaccattgtccacaaaactgatgttcttttggggttttatgtacagacttgtccaatcatgtgtgtggttcctgcgagttgctgatgactccgcattgaagctctctgagttctttgattttaagttgggtttatggaattttttcaaatgttggaaggtgtgtggttcttcctgccctccctccccttttggaaatatgaaagcaaatgtttagaagaattccttttgaaaagctgtgtcgtgttccctgtgaaactgagcaggtgtgtgttggcgcgctaagtgccacatgcttgtgtgtagaggaggaggtggccctgccggctccgcgctgctgtgcctgtgatccctacctgctccccgctcctgttgccagcagcactcactgcactcctttgtcatatactctgcatcactgtcatactcacaacttcgtgaataaagttgtgtgctttattcgt

SEQ ID NO: 103865 - DNA, 7408 bp, Homo sapiens
  Payload ID: 419
  Gene Symbol: ABLIM1
  Gene Name: actin binding LIM protein 1
  Uniprot ID: O14639
  ENST ID: ENST00000392955
  CDS Start-End: 105-2261
ctgggaggagagccagggccccagcctctcctttgaggagtgttgcagcctttctgtgtgccagatgcctagtgaagaaaagctgaaaccctggagctttgtgcatgttaatgaccttggaaatgactgagctcacggaccctcatcacaccatgggagactacaaagtggcccaccctcaggaccctcaccacccatcagagaagcctgtcattcactgccataaatgtggggagccttgcaagggtgaagtgcttcgggtccagaccaaacatttccacatcaagtgtttcacctgcaaagtgtgtggctgtgacctggcacaagggggcttcttcataaagaacggagagtatctctgcaccctggactaccagcggatgtacgggacacgctgccatggctgtggggagttcgtggagggcgaagtggtgactgctctgggcaagacctaccatcccaattgctttgcttgtactatctgcaagcgcccgtttccacccggagaccgagtcacattcaatgggagagactgcctttgtcaactctgtgcacagccgatgtcgtccagtccgaaagaaaccaccttctccagcaattgtgccggctgcggaagagatatcaagaatgggcaggcgctgctggcgctggataagcagtggcacttggggtgctttaaatgcaagtcctgcgggaaggtcctcaccggggagtacatcagcaaggatggtgctccgtactgtgaaaaggactaccagggactctttggggtgaaatgtgaggcgtgtcaccagtttatcacagggaaagtcctggaggcaggtgacaaacattaccaccccagctgtgcacgatgcagcagatgcaaccagatgttcacagaaggagaggaaatgtatcttcaaggctccaccgtttggcatcccgactgtaagcaatctacgaagaccgaggaaaagctgcggcctaccaggacatcctcggaaagtatttattctaggccaggctccagtattcctggctcaccaggtcatactatctatgcaaaagtagacaatgagatcctggattacaaggatttagcagccattccgaaggtcaaggcaatttatgacattgaacgtccagatcttattacctatgagcctttctacacttcgggctatgatgacaaacaggagagacagagccttggagagtctccgaggactttgtctcctactccatcagcagaagggtaccaggatgttcgggatcggatgatccatcggtccacgagccagggctccatcaactcccctgtgtacagccgccacagctacactccaaccacgtcccgctctccccagcatttccacagacctggcaatgagccgtccagcggccggaactcccctctcccttaccggccagacagccgccctctaactccaacttacgctcaggcccctaaacatttccatgttccagatcaaggaatcaacatttaccgaaagccacccatctacaaacagcatgctgccttggcagcccagagcaagtcctcagaagatatcatcaagttttccaagttcccagcagcccaggcaccagaccccagcgagacaccaaagattgagacggaccactggcctggtcccccctcatttgctgtcgtaggacctgacatgaaacgcagatctagtggcagagaggaagatgatgaggaacttctgagacgtcggcagcttcaagaagagcaattaatgaagcttaactcaggcctgggacagttgatcttgaaagaagagatggagaaagagagccgggaaaggtcatctctgttagccagtcgctacgattctcccatcaactcagcttcacatattccatcatctaaaactgcatctctccctggctatggaagaaatgggcttcaccggcctgtttctaccgacttcgctcagtataacagctatggggatgtcagcgggggagtgcgagattaccagacactcccagatggccacatgcctgcaatgagaatggaccgaggagtgtctatgcccaacatgttggaaccaaagatatttccatatgaaatgctcatggtgaccaacagagggcgaaacaaaatcctcagagaggtggacagaaccaggctggagcgccacttagcccctgaagtgtttcgggaaatctttggaatgtccatacaggagtttgacaggttacctctttggagacgcaacgacatgaagaaaaaagcaaaactcttctaagtcccactcgtgaatggcaattagagaaaggactgacagtggcggtgccccataggatgtcatattgaggcccaaacttgattggagaatttgcaaactaccgtcgctcagcaacaccaaaaagagaaagtctggttaaaacaccatgagtcaaatgtcgggccagccaacagtaacacttgccaagaagcatggcgtagaaatttctatgttccgaaacacagagtagtgtccacatgtgagcttttcacattaccttatgtatacaacaggagctgcgttgttttcttctttttcttttcctttatctgttgtccaacaacagtgctgactgtccggataagagctggcaagtgcccttaggatgccgcatgggaaaaatcggttatcataatttcaaagtataaatatatttattaagtagcgctgcggctaagaaggaagagtgaggggtctgtccatggggtggcagtgatttcacacccgcctttcttgaatggcttcgtgttactcagccgtgccctggcaggaatggaactccatcagggaacagggcagctctgtttgaatggggtgaaaaacagcaaaattaattcttagcaagctccttgttctctactgttcaccgggacctggctggcaaatgacttagctattagtatatttaaaaactgttcaaaagcaaaagagaaggaacaggaatgaaaggaaaccttcccttaactctttctgcttcccatagcaggtctggttcctgctccccgcctaggacaggagctgtctggagctccacctttgcaaagaaaggaaaaacacaaattgcccccagattggcccagtggcatgccattaggtgattttgcataggggccatatcattcatggccaaaaaaaaccaaaaagcaaaaaacaaaaacaagtcccatgtcctactgactctagttcttccagtcgttatcctctgctgtctctctggcatcctatgaatcagatcaagcccatgctgttgttggtttttaaggtttctttcaataataggctaaggaaagacatgtttttctcttttaaatctctgcaactccaaagtagactccttcgaacgtatttaatttggccttttcagctttcttcttgcccagctctgtcgaattcatgggtgtgtgtgcacatgttggtttcactcacccagagtaattttgtgagcatgcatgtgctttttaatttctgcttgaatgtttgtcctgctgtgttgcagcttctaaagacattgtcaccgagtgtgtgtgactcaaagatcaagagtgaggctaaactgcgaccccaacatcacttccttcatggaaaggtgttggcgctgatgtagctcatggaaggatcagactgggaaccacagaggaaggatgaggtgggatgtggaggtcagagcatctcacgagagtccctcaggctctgcaacactagattcgaatatgagcctagggtttccccaacacgtgcgtgcatatgaaaccacatcatgattcccgacgtgagttagatgagggagagtttgtgtaactccacacccaggagggtaagccactttattatcatgctttggggctgtgcttaagaatttaagctctgttttaaagccgaagaagaaaacatttgaatttaccttcatatgccactaagaacaaaagctctgaagttcttcctgctggcaccaaatattaggattacaagctgtctctctgacaccagtggtaaaaaagcaagtagaatagtttctgagtctgtgttgcagcctctgacacgtggctcaccgctgtcatttgggggatggaatgaacagtcactgttctatagcatcctcctgtgctcttacctaaggaatctaaattgtcctagccttccattgctatgcactgaatgaggactactctcgtgtgtgtgtgtgtgtgtgtgtgtgtgtgtgtgtgtgtgtgtgtgtgtgttggatctactaacatgtttagcaaatggctctgacagggtggccatgagcagatgagaccagctcttgcttggttggaagccacactgcagtttgcagtttagcctttggtgtctcagtggcttcttgcttattccatgctttttctatcccatcctctctctgtgccctcctgcaatggcagccttggcacaatgcctgggtgtcctcatccttgctttactctggaaagtgtggggatggagaggatggtgcatttccagtgcttccttacctgtcaataacaatggtggccacctgggtcccagcacttggctggtggagagatttttttcattatggagctaataaagggtccctacgttttacattgattaatgaattatcacccagacatgtgcagatgaaatgtcaatataagaaaaatcaaggtatttgggaaacatgggcataatcaggtagttttgctaaaattcctcttccttggtctacataaagaagacatgggtctgtcatagaatggggacattagactgaaaactgggacaacccccttccttattttatagagactaggagttaaggggcctgcctaagattgcagtgataaagaactgaaccctaaatcagctcccactaatgaaaccctgctttccttgtatcttttaaactcagttctgcatccaacttgagaagaaaaaaagcttctttccatatcaagtaccatatgagttcatttaaactgcaccttgcagaaatgcattgccagaaagcaccagtagcctcctatctgcaagcagagtagtgctctgctctggggaggggtcattggaaaccataatgcagagtgggccccctactccatttcccagcaaaaggctccagctggagggatgggttgtggggcaacctggttcctgctaactgccagattgaatgtgtgggctagaatgcctgcacatttagttaaactgggctcagcatgcttgtcctcaaaatgtccatcctggtcacagcacacaagatggctattggtctgcttttaccctaccctgtactatacatgaaaattccagttattaacacactcaaactggtggagcttgttcaccctaggaaggggattgtatatatggcaggcttccctggtgccgatgtaaagggctacatttgggaacatttgacttccttgggactcttaagtgcataatgatggcatgaagtaaaaggggcctcaatgatgataggaaaatcagttcttttaaaatttcttcaagaaaatccaggctatcacatagtctttctgtgtgacttattaggagataggaagagcattgggaaacttgcacagctagctatgcatctacattttggtttggggttagttatgaaatgttcttaatatgacgtgttcaataacttcacataaacttcctgttctccaaaacctcaaagagatagagttaatgagttgttgtttttttttaaatgggggtagttttctatctgtcatgggctctagcatctactccgctacccaattctgtcatctccaagctgagtttcctcttctgaggcagaggctggagcagttctttttcagttctcatcctctccatcccaatccagtatatcaatcaactctaactcggagacgtctagctggcaatgtttctaaaactttcactggatttctttagacattgaagcaaacatttttttctaagaattgcttctcagatgatgatatcaaatgtatatgcttttgcaagtttgaaaagttcaaattaaccacttttgactaggtaagtctttctaaaaaccatttaaagctaactgggtcttagcatcctcctgtgtatggaagagacaggtgaccgctccaggttgggtgctcacagaacccttttcctgactctcatggaagatggtggaaggaaaatagactgtctcatcaaccctcctgtgtcctctgaagcaatctcagtttttattaaccacctcttctgtgtttctggtagctatttaacctgtatttaatctgtacttcctatgccagcctcaattttatttgatttttacaattattctcttctaaccaatgaagtgtttgtcagtatgccccaaagcttgctcttttgtgctcccttttgaataactttctatccagaaaaagagattatttgggacttgagatttgcagtgataccaacttatagcaatgatgtactttaagggaactacccaactatgttgtgatagaagaaagagaaaccttcactttggcatttttttttaatcactgtttatttttctgtttgcggcccaggaagcagtgggaggtggtggcagatatgctttgcatatggattgttatgtttttatttgggcaagtttaatcatggaaaactcaaaaagaaggggggaaatggtcagtttaagccaaaagaaactttctaaacaatgtataggtacacagcaaaattaaacaaatccaacaatttctgaagcttagtgtaattgagtggtggttgttattcaataaaattattcccaaaagtgtttctcctaagagtgcagttcccatgagtcacttcctgaacccattgaccaaaggtggacagagacaatcctgtagaccttgacattcagaaagatgtgagctgcttactgatcatatatgcatacgtttctttacagcagaggaaaccattgtccacaaaactgatgttcttttggggttttatgtacagacttgtccaatcatgtgtgtggttcctgcgagttgctgatgactccgcattgaagctctctgagttctttgattttaagttgggtttatggaattttttcaaatgttggaaggtgtgtggttcttcctgccctccctccccttttggaaatatgaaagcaaatgtttagaagaattccttttgaaaagctgtgtcgtgttccctgtgaaactgagcaggtgtgtgttggcgcgctaagtgccacatgcttgtgtgtagaggaggaggtggccctgccggctccgcgctgctgtgcctgtgatccctacctgctccccgctcctgttgccagcagcactcactgcactcctttgtcatatactctgcatcactgtcatactcacaacttcgtgaataaagttgtgtgctttattcgt

SEQ ID NO: 103866 - DNA, 854 bp, Homo sapiens
  Payload ID: 419
  Gene Symbol: ABLIM1
  Gene Name: actin binding LIM protein 1
  ENST ID: ENST00000428430
  CDS Start-End: 335-854
gaggcgtgagagagcgtgcctgcccgccgcacacggggctggtttccggagtgcgtctctagagggatgcacgttgccttagccgagcttcggagagaagcctgatatgtaacccaggcaggtgggagcctcagtctgtcgggctgaggtctggcatctacaaagcctcttggccgtgttctgaacttgaagcctggaggagttctctgctcagcacagccaaggaacagaattagaagaaaaggaaccctggcctgaggtaaagcggacattgcacaaggcaggtgacaaacattaccaccccagctgtgcacgatgcagcagatgcaaccagatgttcacagaaggagaggaaatgtatcttcaaggctccaccgtttggcatcccgactgtaagcaatctacgaagaccgaggaaaagctgcggcctaccaggacatcctcggaaagtatttattctaggccaggctccagtattcctggctcaccaggtcatactatctatgcaaaagtagacaatgagatcctggattacaaggatttagcagccattccgaaggtcaaggcaatttatgacattgaacgtccagatcttattacctatgagcctttctacacttcgggctatgatgacaaacaggagagacagagccttggagagtctccgaggactttgtctcctactccatcagcagaagggtaccaggatgttcgggatcggatgatccatcggtccacgagccagggctccatcaactcccctgtgtacagccgccacagctacactccaaccacgtcccgctctccccagcatttccacagacctgatcaaggaatcaacatttaccgaaagc

SEQ ID NO: 103867 - DNA, 541 bp, Homo sapiens
  Payload ID: 419
  Gene Symbol: ABLIM1
  Gene Name: actin binding LIM protein 1
  ENST ID: ENST00000440467
  CDS Start-End: 1-519
tgtaagcaatctacgaagaccgaggaaaagctgcggcctaccaggacatcctcggaaagtatttattctaggccaggctccagtattcctggctcaccaggtcatactatctatgcaaaagtagacaatgagatcctggattacaaggatttagcagccattccgaaggtcaaggcaatttatgacattgaacgtccagatcttattacctatgagcctttctacacttcgggctatgatgacaaacaggagagacagagccttggagagtctccgaggactttgtctcctactccatcagcagaagggtaccaggatgttcgggatcggatgatccatcggtccacgagccagggctccatcaactcccctgtgtacagccgccacagctacactccaaccacgtcccgctctccccagcatttccacagacctgatcaaggaatcaacatttaccgaaagccacccatctacaaacagcatgtactgtttgaagtcatccttttgttgttaatttaagaataaaattctcagcatttga

SEQ ID NO: 103868 - DNA, 7606 bp, Homo sapiens
  Payload ID: 419
  Gene Symbol: ABLIM1
  Gene Name: actin binding LIM protein 1
  ENST ID: ENST00000533213
  CDS Start-End: 303-2459
gtcattgagctgatgtgcttttgcaaggggtctctttagaagtggtaggggcagggtcgagagaagaaggggatgcagaatctgtacatgaggaaggagccagagtcactcaggaaactcctcattcttcctgcgctggctgtggcacacccaccggtggcacacccctccctcgggtccagttcagcccacagactcctgggaggagagccagggccccagcctctcctttgaggagtgttgcagcctttctgtgtgccagatgcctagtgaagaaaagctgaaaccctggagctttgtgcatgttaatgaccttggaaatgactgagctcacggaccctcatcacaccatgggagactacaaagtggcccaccctcaggaccctcaccacccatcagagaagcctgtcattcactgccataaatgtggggagccttgcaagggtgaagtgcttcgggtccagaccaaacatttccacatcaagtgtttcacctgcaaagtgtgtggctgtgacctggcacaagggggcttcttcataaagaacggagagtatctctgcaccctggactaccagcggatgtacgggacacgctgccatggctgtggggagttcgtggagggcgaagtggtgactgctctgggcaagacctaccatcccaattgctttgcttgtactatctgcaagcgcccgtttccacccggagaccgagtcacattcaatgggagagactgcctttgtcaactctgtgcacagccgatgtcgtccagtccgaaagaaaccaccttctccagcaattgtgccggctgcggaagagatatcaagaatgggcaggcgctgctggcgctggataagcagtggcacttggggtgctttaaatgcaagtcctgcgggaaggtcctcaccggggagtacatcagcaaggatggtgctccgtactgtgaaaaggactaccagggactctttggggtgaaatgtgaggcgtgtcaccagtttatcacagggaaagtcctggaggcaggtgacaaacattaccaccccagctgtgcacgatgcagcagatgcaaccagatgttcacagaaggagaggaaatgtatcttcaaggctccaccgtttggcatcccgactgtaagcaatctacgaagaccgaggaaaagctgcggcctaccaggacatcctcggaaagtatttattctaggccaggctccagtattcctggctcaccaggtcatactatctatgcaaaagtagacaatgagatcctggattacaaggatttagcagccattccgaaggtcaaggcaatttatgacattgaacgtccagatcttattacctatgagcctttctacacttcgggctatgatgacaaacaggagagacagagccttggagagtctccgaggactttgtctcctactccatcagcagaagggtaccaggatgttcgggatcggatgatccatcggtccacgagccagggctccatcaactcccctgtgtacagccgccacagctacactccaaccacgtcccgctctccccagcatttccacagacctggcaatgagccgtccagcggccggaactcccctctcccttaccggccagacagccgccctctaactccaacttacgctcaggcccctaaacatttccatgttccagatcaaggaatcaacatttaccgaaagccacccatctacaaacagcatgctgccttggcagcccagagcaagtcctcagaagatatcatcaagttttccaagttcccagcagcccaggcaccagaccccagcgagacaccaaagattgagacggaccactggcctggtcccccctcatttgctgtcgtaggacctgacatgaaacgcagatctagtggcagagaggaagatgatgaggaacttctgagacgtcggcagcttcaagaagagcaattaatgaagcttaactcaggcctgggacagttgatcttgaaagaagagatggagaaagagagccgggaaaggtcatctctgttagccagtcgctacgattctcccatcaactcagcttcacatattccatcatctaaaactgcatctctccctggctatggaagaaatgggcttcaccggcctgtttctaccgacttcgctcagtataacagctatggggatgtcagcgggggagtgcgagatttccagacactcccagatggccacatgcctgcaatgagaatggaccgaggagtgtctatgcccaacatgttggaaccaaagatatttccatatgaaatgctcatggtgaccaacagagggcgaaacaaaatcctcagagaggtggacagaaccaggctggagcgccacttagcccctgaagtgtttcgggaaatctttggaatgtccatacaggagtttgacaggttacctctttggagacgcaacgacatgaagaaaaaagcaaaactcttctaagtcccactcgtgaatggcaattagagaaaggactgacagtggcggtgccccataggatgtcatattgaggcccaaacttgattggagaatttgcaaactaccgtcgctcagcaacaccaaaaagagaaagtctggttaaaacaccatgagtcaaatgtcgggccagccaacagtaacacttgccaagaagcatggcgtagaaatttctatgttccgaaacacagagtagtgtccacatgtgagcttttcacattaccttatgtatacaacaggagctgcgttgttttcttctttttcttttcctttatctgttgtccaacaacagtgctgactgtccggataagagctggcaagtgcccttaggatgccgcatgggaaaaatcggttatcataatttcaaagtataaatatatttattaagtagcgctgcggctaagaaggaagagtgaggggtctgtccatggggtggcagtgatttcacacccgcctttcttgaatggcttcgtgttactcagccgtgccctggcaggaatggaactccatcagggaacagggcagctctgtttgaatggggtgaaaaacagcaaaattaattcttagcaagctccttgttctctactgttcaccgggacctggctggcaaatgacttagctattagtatatttaaaaactgttcaaaagcaaaagagaaggaacaggaatgaaaggaaaccttcccttaactctttctgcttcccatagcaggtctggttcctgctccccgcctaggacaggagctgtctggagctccacctttgcaaagaaaggaaaaacacaaattgcccccagattggcccagtggcatgccattaggtgattttgcataggggccatatcattcatggccaaaaaaaaccaaaaagcaaaaaacaaaaacaagtcccatgtcctactgactctagttcttccagtcgttatcctctgctgtctctctggcatcctatgaatcagatcaagcccatgctgttgttggtttttaaggtttctttcaataataggctaaggaaagacatgtttttctcttttaaatctctgcaactccaaagtagactccttcgaacgtatttaatttggccttttcagctttcttcttgcccagctctgtcgaattcatgggtgtgtgtgcacatgttggtttcactcacccagagtaattttgtgagcatgcatgtgctttttaatttctgcttgaatgtttgtcctgctgtgttgcagcttctaaagacattgtcaccgagtgtgtgtgactcaaagatcaagagtgaggctaaactgcgaccccaacatcacttccttcatggaaaggtgttggcgctgatgtagctcatggaaggatcagactgggaaccacagaggaaggatgaggtgggatgtggaggtcagagcatctcacgagagtccctcaggctctgcaacactagattcgaatatgagcctagggtttccccaacacgtgcgtgcatatgaaaccacatcatgattcccgacgtgagttagatgagggagagtttgtgtaactccacacccaggagggtaagccactttattatcatgctttggggctgtgcttaagaatttaagctctgttttaaagccgaagaagaaaacatttgaatttaccttcatatgccactaagaacaaaagctctgaagttcttcctgctggcaccaaatattaggattacaagctgtctctctgacaccagtggtaaaaaagcaagtagaatagtttctgagtctgtgttgcagcctctgacacgtggctcaccgctgtcatttgggggatggaatgaacagtcactgttctatagcatcctcctgtgctcttacctaaggaatctaaattgtcctagccttccattgctatgcactgaatgaggactactctcgtgtgtgtgtgtgtgtgtgtgtgtgtgtgtgtgtgtgtgtgtgtgtgtgttggatctactaacatgtttagcaaatggctctgacagggtggccatgagcagatgagaccagctcttgcttggttggaagccacactgcagtttgcagtttagcctttggtgtctcagtggcttcttgcttattccatgctttttctatcccatcctctctctgtgccctcctgcaatggcagccttggcacaatgcctgggtgtcctcatccttgctttactctggaaagtgtggggatggagaggatggtgcatttccagtgcttccttacctgtcaataacaatggtggccacctgggtcccagcacttggctggtggagagatttttttcattatggagctaataaagggtccctacgttttacattgattaatgaattatcacccagacatgtgcagatgaaatgtcaatataagaaaaatcaaggtatttgggaaacatgggcataatcaggtagttttgctaaaattcctcttccttggtctacataaagaagacatgggtctgtcatagaatggggacattagactgaaaactgggacaacccccttccttattttatagagactaggagttaaggggcctgcctaagattgcagtgataaagaactgaaccctaaatcagctcccactaatgaaaccctgctttccttgtatcttttaaactcagttctgcatccaacttgagaagaaaaaaagcttctttccatatcaagtaccatatgagttcatttaaactgcaccttgcagaaatgcattgccagaaagcaccagtagcctcctatctgcaagcagagtagtgctctgctctggggaggggtcattggaaaccataatgcagagtgggccccctactccatttcccagcaaaaggctccagctggagggatgggttgtggggcaacctggttcctgctaactgccagattgaatgtgtgggctagaatgcctgcacatttagttaaactgggctcagcatgcttgtcctcaaaatgtccatcctggtcacagcacacaagatggctattggtctgcttttaccctaccctgtactatacatgaaaattccagttattaacacactcaaactggtggagcttgttcaccctaggaaggggattgtatatatggcaggcttccctggtgccgatgtaaagggctacatttgggaacatttgacttccttgggactcttaagtgcataatgatggcatgaagtaaaaggggcctcaatgatgataggaaaatcagttcttttaaaatttcttcaagaaaatccaggctatcacatagtctttctgtgtgacttattaggagataggaagagcattgggaaacttgcacagctagctatgcatctacattttggtttggggttagttatgaaatgttcttaatatgacgtgttcaataacttcacataaacttcctgttctccaaaacctcaaagagatagagttaatgagttgttgtttttttttaaatgggggtagttttctatctgtcatgggctctagcatctactccgctacccaattctgtcatctccaagctgagtttcctcttctgaggcagaggctggagcagttctttttcagttctcatcctctccatcccaatccagtatatcaatcaactctaactcggagacgtctagctggcaatgtttctaaaactttcactggatttctttagacattgaagcaaacatttttttctaagaattgcttctcagatgatgatatcaaatgtatatgcttttgcaagtttgaaaagttcaaattaaccacttttgactaggtaagtctttctaaaaaccatttaaagctaactgggtcttagcatcctcctgtgtatggaagagacaggtgaccgctccaggttgggtgctcacagaacccttttcctgactctcatggaagatggtggaaggaaaatagactgtctcatcaaccctcctgtgtcctctgaagcaatctcagtttttattaaccacctcttctgtgtttctggtagctatttaacctgtatttaatctgtacttcctatgccagcctcaattttatttgatttttacaattattctcttctaaccaatgaagtgtttgtcagtatgccccaaagcttgctcttttgtgctcccttttgaataactttctatccagaaaaagagattatttgggacttgagatttgcagtgataccaacttatagcaatgatgtactttaagggaactacccaactatgttgtgatagaagaaagagaaaccttcactttggcatttttttttaatcactgtttatttttctgtttgcggcccaggaagcagtgggaggtggtggcagatatgctttgcatatggattgttatgtttttatttgggcaagtttaatcatggaaaactcaaaaagaaggggggaaatggtcagtttaagccaaaagaaactttctaaacaatgtataggtacacagcaaaattaaacaaatccaacaatttctgaagcttagtgtaattgagtggtggttgttattcaataaaattattcccaaaagtgtttctcctaagagtgcagttcccatgagtcacttcctgaacccattgaccaaaggtggacagagacaatcctgtagaccttgacattcagaaagatgtgagctgcttactgatcatatatgcatacgtttctttacagcagaggaaaccattgtccacaaaactgatgttcttttggggttttatgtacagacttgtccaatcatgtgtgtggttcctgcgagttgctgatgactccgcattgaagctctctgagttctttgattttaagttgggtttatggaattttttcaaatgttggaaggtgtgtggttcttcctgccctccctccccttttggaaatatgaaagcaaatgtttagaagaattccttttgaaaagctgtgtcgtgttccctgtgaaactgagcaggtgtgtgttggcgcgctaagtgccacatgcttgtgtgtagaggaggaggtggccctgccggctccgcgctgctgtgcctgtgatccctacctgctccccgctcctgttgccagcagcactcactgcactcctttgtcatatactctgcatcactgtcatactcacaacttcgtgaataaagttgtgtgctttattcgt

SEQ ID NO: 103869 - DNA, 3754 bp, Homo sapiens
  Payload ID: 420
  Gene Symbol: ABLIM2
  Gene Name: actin binding LIM protein family, member 2
  ENST ID: ENST00000318888
  CDS Start-End: 144-2078
tgcggcggcgctgcctggcgtgtgcgcaaggagcgggcgcggagccggcgggcgggcggaggatagcgcgggcgcggcacctgcgggcccgagggtctggctgtcgcagcgccgggccgccccgactccgagcggctgctgagatgagtgcagtgtcgcagccccaggctgctcccagcccgctggagaagtcgcccagcacggcgatcctgtgcaacacgtgtgggaatgtgtgcaagggcgaggtgctgcgggtgcaggacaagtacttccacatcaagtgcttcgtctgtaaagcatgtggctgcgacctggccgagggcggcttcttcgtgcggcagggcgagtacatctgcacgctggactaccagaggctctacggcacccgctgcttcagctgcgaccagttcattgagggtgaggtggtgtcggcgctgggcaagacctaccaccccgactgcttcgtgtgtgccgtctgccggctgcccttcccccccggggaccgagtgaccttcaacgggaaggaatgcatgtgccagaagtgttccctgcccgtatcggtgggcagcagcgcgcacctgtcccagggcctccgaagttgtgggggctgcggcacagaaatcaagaatggccaggccctggtagccttggacaagcactggcacttgggctgttttaagtgcaagagctgtgggaagctcctgaatgccgagtacatcagcaaggatgggctgccctactgcgaagctgactatcacgccaagttcggcatccgctgtgacagctgtgagaaatacatcacggggcgcgtgctggaggccggagagaagcactaccacccttcctgcgcgctatgtgtcaggtgcggccagatgtttgcagaaggcgaagagatgtatcttcaaggttcctccatctggcatccggcgtgtcgacaagcagccagaactgaagacagaaacaaggaaaccagaacttcctcagagagcatcatttctgtccctgcttccagcacctcagggtctccgagccgtgtgatttatgccaagcttggtggtgagatcctggactacagggacttggcagcccttcctaaaagtaaggccatctatgacatcgaccgccccgacatgatctcctactcaccctacatcagccactctgcaggggacaggcagagctacggcgagggggatcaggatgaccggtcctacaagcagtgtcggacctccagcccaagctccactgggtcggttagcctcgggcgctacactccgacctcacggtcaccacagcactacagccgtccagctggtactgtgagtgtgggtaccagtagctgcctctccctgtcccaacacccaagccctacatccgtgttcagacatcattacatcccctacttccgaggcagtgaaagtggccggagcacccccagcctctccgtgctctctgacagcaagccgccccccccacctaccagcaggcacctcgccactcacgtcccagacactggcgtaaaagataacatctataggaaaccccctatctacagacagcatgctgccaggcgatcggatggggaggatggaagcttggaccaggataacaggaagcagaagagcagctggctgatgctcaagggggatgcagacacaaggaccaattctccagacctggacacccagtccttgtcccacagcagcgggaccgacagagaccctctccaaaggatggcaggggacagctttcactcacgattcccctattccaaatctgaccctctcccaggacatggaaagaatggcttggaccagcggaatgccaatctggccccctgtggagcagacccggatgccagctggggcatgcgagaatacaagatctatccgtatgactccctcatcgtcacaaaccgaattcgcgtgaaactgcccaaagacgtggaccggacgagactggagagacacttgtcgcccgaggagttccaggaagtgtttgggatgagcatcgaggagtttgaccgcctggccctctggaagaggaatgaccttaagaagaaagcccttttgttctgacggctgccagcctgccccactggtgtgtgccgggcgccgaggccaggggcccctggcgagaaccgcacacacccctcccacacaccttgctctggcttctctgtgtccatggggtgggcgggagggggtcccccagcaggtgcggcccctgcacctgccggcgacactcctgccggtagtttagggccgagacggctagcttcacgccacccttccccgctgtggcttggtgtcagggagaggctgtagagtggctgtgtcgggcatcagatggagcacacaggtggctgcagcccagcccaccttcccagcgttctcgaggtgccctggccccggtgctgggcacgtgggggacagaggtggccgggacgtgagctgtgaggcttgttgatgatggttgctgacaccatcatcgggggtgggcacacggcccttcggagcctgggcagcctggcctcacaggcagactcgcagacggggcagtgagcgtctgggacagtgccaagagtggggtgtgtgatttttgcaggcgtctgtgatgggtctctttagggacaaatgtcaacaagggacaagacagggcaccttccgccagcgcccctccatgcgctgcgttcctcctccagatcgacccctagatgcctacacaatatctttaaagtaacacagaagtttttattttattaaaaagtatagcctacttaaacgcgagatgacatatatagagtttaattttacggtccctccgcaggggagcggcctccagccttattctccaccgctcggatctgtgtggtttcagtctgttcttggtgtggtcctcatacacagagctccctgtctagtttcttttctttttcttttttctttttctcgtcacacaggtaaccttaaagacagacccctctaaagaacgctttgtaaatacatgtgaggtatagccaccactgttttccttgctgttatttttccaagtcttggggagaaaacatcctcctctgatggccaaagccctggaatcaagggtttccacgtaccctgcctaatacccgacgtagctcttgatgcaccgtccttgtgctgtggctggcggtgtctcagcctgaaacataaaccccacatgccccaggagcgatgtgctccctgaaacagacaaccacacgctgttggggagagaaggatggagataggatggagataggatggagatgtggctcttctcatctttgaagccagcagggcatcccggagcaggaggctggccgggctccccaagcgaaggcgttggtgtctgtcattaggtgtgtgttagggtgcagcaccggccgtcacaggatgctgataagcgcgctgagaggtggatgaaacaccaaagtctgtttccccgtccgcagtgggtgttgcctctttgtgtgtgtcccgatgttcctgcctgtgagtcggccttactccgtttccttagcgcccatgacacgccaagtcccgtttcgcactcggcttctcacccgcccagctcggctagggagggggagtttttagcacctaatatgcttcctgccattgcgcaatctgagcctgagcaactggaaacccccatttctcattagtgcaatgtcatatctgatcccaggaagcctggaaaataaaagacgatgcattataacttgcggaagtac

SEQ ID NO: 103870 - DNA, 2589 bp, Homo sapiens
  Payload ID: 420
  Gene Symbol: ABLIM2
  Gene Name: actin binding LIM protein family, member 2
  Uniprot ID: Q6H8Q1
  ENST ID: ENST00000341937
  CDS Start-End: 66-1901
acctgcgggcccgagggtctggctgtcgcagcgccgggccgccccgactccgagcggctgctgagatgagtgcagtgtcgcagccccaggctgctcccagcccgctggagaagtcgcccagcacggcgatcctgtgcaacacgtgtgggaatgtgtgcaagggcgaggtgctgcgggtgcaggacaagtacttccacatcaagtgcttcgtctgtaaagcatgtggctgcgacctggccgagggcggcttcttcgtgcggcagggcgagtacatctgcacgctggactaccagaggctctacggcacccgctgcttcagctgcgaccagttcattgagggtgaggtggtgtcggcgctgggcaagacctaccaccccgactgcttcgtgtgtgccgtctgccggctgcccttcccccccggggaccgagtgaccttcaacgggaaggaatgcatgtgccagaagtgttccctgcccgtatcggtgggcagcagcgcgcacctgtcccagggcctccgaagttgtgggggctgcggcacagaaatcaagaatggccaggccctggtagccttggacaagcactggcacttgggctgttttaagtgcaagagctgtgggaagctcctgaatgccgagtacatcagcaaggatgggctgccctactgcgaagctgactatcacgccaagttcggcatccgctgtgacagctgtgagaaatacatcacggggcgcgtgctggaggccggagagaagcactaccacccttcctgcgcgctatgtgtcaggtgcggccagatgtttgcagaaggcgaagagatgtatcttcaaggttcctccatctggcatccggcgtgtcgacaagcagccagaactgaagacagaaacaaggaaaccagaacttcctcagagagcatcatttctgtccctgcttccagcacctcagggtctccgagccgtgtgatttatgccaagcttggtggtgagatcctggactacagggacttggcagcccttcctaaaagtaaggccatctatgacatcgaccgccccgacatgatctcctactcaccctacatcagccactctgcaggggacaggcagagctacggcgagggggatcaggatgaccggtcctacaagcagtgtcggacctccagcccaagctccactgggtcggttagcctcgggcgctacactccgacctcacggtcaccacagcactacagccgtccaggcagtgaaagtggccggagcacccccagcctctccgtgctctctgacagcaagccgcccccctccacctaccagcaggcacctcgccacttccacgtcccagacactggcgtaaaagataacatctataggaaaccccctatctacagacagcatgctgccaggcgatcggatggggaggatggaagcttggaccaggataacaggaagaagagcagctggctgatgctcaagggggatgcagacacaaggaccaattctccagacctggacacccagtccttgtcccacagcagcgggaccgacagagaccctctccaaaggatggcaggggacagctttcactcacgattcccctattccaaatctgaccctctcccaggacatggaaagaatggcttggaccagcggaatgccaatctggccccctgtggagcagacccggatgccagctggggcatgcgagaatacaagatctatccgtatgactccctcatcgtcacaaaccgaattcgcgtgaaactgcccaaagacgtggaccggacgagactggagagacacttgtcgcccgaggagttccaggaagtgtttgggatgagcatcgaggagtttgaccgcctggccctctggaagaggaatgaccttaagaagaaagcccttttgttctgacggctgccagcctgccccactggtgtgtgccgggcgccgaggccaggggcccctggcgagaaccgcacacacccctcccacacaccttgctctggcttctctgtgtccatggggtgggcgggagggggtcccccagcaggtgcggcccctgcacctgccggcgacactcctgccggtagtttagggccgagacggctagcttcacgccacccttccccgctgtggcttggtgtcagggagaggctgtagagtggctgtgtcgggcatcagatggagcacacaggtggctgcagcccagcccaccttcccagcgttctcgaggtgccctggccccggtgctgggcacgtgggggacagaggtggccgggacgtgagctgtgaggcttgttgatgatggttgctgacaccatcatcgggggtgggcacacggcccttcggagcctgggcagcctggcctcacaggcagactcgcagacggggcagtgagcgtctgggacagtgccaagagtggggtgtgtgatttttgcaggcgtctgtgatgggtctctttagggacaaatgtcaacaagggacaagacagggcaccttccgccagcgcccctccatgcgctgcgttcctcctccagatcgacccctagatgcctacacaatatctttaaagtaacacagaagtttttattttattaaa

SEQ ID NO: 103871 - DNA, 3396 bp, Homo sapiens
  Payload ID: 420
  Gene Symbol: ABLIM2
  Gene Name: actin binding LIM protein family, member 2
  Uniprot ID: Q6H8Q1
  ENST ID: ENST00000361737
  CDS Start-End: 123-1718
gtgcgcaaggagcgggcgcggagccggcgggcgggcggaggatagcgcgggcgcggcacctgcgggcccgagggtctggctgtcgcagcgccgggccgccccgactccgagcggctgctgagatgagtgcagtgtcgcagccccaggctgctcccagcccgctggagaagtcgcccagcacggcgatcctgtgcaacacgtgtgggaatgtgtgcaagggcgaggtgctgcgggtgcaggacaagtacttccacatcaagtgcttcgtctgtaaagcatgtggctgcgacctggccgagggcggcttcttcgtgcggcagggcgagtacatctgcacgctggactaccagaggctctacggcacccgctgcttcagctgcgaccagttcattgagggtgaggtggtgtcggcgctgggcaagacctaccaccccgactgcttcgtgtgtgccgtctgccggctgcccttcccccccggggaccgagtgaccttcaacgggaaggaatgcatgtgccagaagtgttccctgcccgtatcggtgggcagcagcgcgcacctgtcccagggcctccgaagttgtgggggctgcggcacagaaatcaagaatggccaggccctggtagccttggacaagcactggcacttgggctgttttaagtgcaagagctgtgggaagctcctgaatgccgagtacatcagcaaggatgggctgccctactgcgaagctgactatcacgccaagttcggcatccgctgtgacagctgtgagaaatacatcacggggcgcgtgctggaggccggagagaagcactaccacccttcctgcgcgctatgtgtcaggtgcggccagatgtttgcagaaggcgaagagatgtatcttcaaggttcctccatctggcatccggcgtgtcgacaagcagccagaactgaagacagaaacaaggaaaccagaacttcctcagagagcatcatttctgtccctgcttccagcacctcagggtctccgagccgtgtgatttatgccaagcttggtggtgagatcctggactacagggacttggcagcccttcctaaaagtaaggccatctatgacatcgaccgccccgacatgatctcctactcaccctacatcagccactctgcaggggacaggcagagctacggcgagtcccctcagttgctctcgccaacgccgaccgagggggatcaggatgaccggtcctacaagcagtgtcggacctccagcccaagctccactgggtcggttagcctcgggcgctacactccgacctcacggtcaccacagcactacagccgtccagctgccaggcgatcggatggggaggatggaagcttggaccaggataacaggaagaagagcagctggctgatgctcaagggggatgcagacacaaggaccaattctccagacctggacacccagtccttgtcccacagcagcgggaccgacagagaccctctccaaaggatggcaggggacagctttcactcacaatacaagatctatccgtatgactccctcatcgtcacaaaccgaattcgcgtgaaactgcccaaagacgtggaccggacgagactggagagacacttgtcgcccgaggagttccaggaagtgtttgggatgagcatcgaggagtttgaccgcctggccctctggaagaggaatgaccttaagaagaaagcccttttgttctgacggctgccagcctgccccactggtgtgtgccgggcgccgaggccaggggcccctggcgagaaccgcacacacccctcccacacaccttgctctggcttctctgtgtccatggggtgggcgggagggggtcccccagcaggtgcggcccctgcacctgccggcgacactcctgccggtagtttagggccgagacggctagcttcacgccacccttccccgctgtggcttggtgtcagggagaggctgtagagtggctgtgtcgggcatcagatggagcacacaggtggctgcagcccagcccaccttcccagcgttctcgaggtgccctggccccggtgctgggcacgtgggggacagaggtggccgggacgtgagctgtgaggcttgttgatgatggttgctgacaccatcatcgggggtgggcacacggcccttcggagcctgggcagcctggcctcacaggcagactcgcagacggggcagtgagcgtctgggacagtgccaagagtggggtgtgtgatttttgcaggcgtctgtgatgggtctctttagggacaaatgtcaacaagggacaagacagggcaccttccgccagcgcccctccatgcgctgcgttcctcctccagatcgacccctagatgcctacacaatatctttaaagtaacacagaagtttttattttattaaaaagtatagcctacttaaacgcgagatgacatatatagagtttaattttacggtccctccgcaggggagcggcctccagccttattctccaccgctcggatctgtgtggtttcagtctgttcttggtgtggtcctcatacacagagctccctgtctagtttcttttctttttcttttttctttttctcgtcacacaggtaaccttaaagacagacccctctaaagaacgctttgtaaatacatgtgaggtatagccaccactgttttccttgctgttatttttccaagtcttggggagaaaacatcctcctctgatggccaaagccctggaatcaagggtttccacgtaccctgcctaatacccgacgtagctcttgatgcaccgtccttgtgctgtggctggcggtgtctcagcctgaaacataaaccccacatgccccaggagcgatgtgctccctgaaacagacaaccacacgctgttggggagagaaggatggagataggatggagataggatggagatgtggctcttctcatctttgaagccagcagggcatcccggagcaggaggctggccgggctccccaagcgaaggcgttggtgtctgtcattaggtgtgtgttagggtgcagcaccggccgtcacaggatgctgataagcgcgctgagaggtggatgaaacaccaaagtctgtttccccgtccgcagtgggtgttgcctctttgtgtgtgtcccgatgttcctgcctgtgagtcggccttactccgtttccttagcgcccatgacacgccaagtcccgtttcgcactcggcttctcacccgcccagctcggctagggagggggagtttttagcacctaatatgcttcctgccattgcgcaatctgagcctgagcaactggaaacccccatttctcattagtgcaatgtcatatctgatcccaggaagcctggaaaataaaagacgatgcattataacttgcggaagtacaa

SEQ ID NO: 103872 - DNA, 2472 bp, Homo sapiens
  Payload ID: 420
  Gene Symbol: ABLIM2
  Gene Name: actin binding LIM protein family, member 2
  Uniprot ID: Q6H8Q1
  ENST ID: ENST00000361581
  CDS Start-End: 66-1784
acctgcgggcccgagggtctggctgtcgcagcgccgggccgccccgactccgagcggctgctgagatgagtgcagtgtcgcagccccaggctgctcccagcccgctggagaagtcgcccagcacggcgatcctgtgcaacacgtgtgggaatgtgtgcaagggcgaggtgctgcgggtgcaggacaagtacttccacatcaagtgcttcgtctgtaaagcatgtggctgcgacctggccgagggcggcttcttcgtgcggcagggcgagtacatctgcacgctggactaccagaggctctacggcacccgctgcttcagctgcgaccagttcattgagggtgaggtggtgtcggcgctgggcaagacctaccaccccgactgcttcgtgtgtgccgtctgccggctgcccttcccccccggggaccgagtgaccttcaacgggaaggaatgcatgtgccagaagtgttccctgcccgtatcggtgggcagcagcgcgcacctgtcccagggcctccgaagttgtgggggctgcggcacagaaatcaagaatggccaggccctggtagccttggacaagcactggcacttgggctgttttaagtgcaagagctgtgggaagctcctgaatgccgagtacatcagcaaggatgggctgccctactgcgaagctgactatcacgccaagttcggcatccgctgtgacagctgtgagaaatacatcacggggcgcgtgctggaggccggagagaagcactaccacccttcctgcgcgctatgtgtcaggtgcggccagatgtttgcagaaggcgaagagatgtatcttcaaggttcctccatctggcatccggcgtgtcgacaagcagccagaactgaagacagaaacaaggaaaccagaacttcctcagagagcatcatttctgtccctgcttccagcacctcagggtctccgagccgtgtgatttatgccaagcttggtggtgagatcctggactacagggacttggcagcccttcctaaaagtaaggccatctatgacatcgaccgccccgacatgatctcctactcaccctacatcagccactctgcaggggacaggcagagctacggcgagggggatcaggatgaccggtcctacaagcagtgtcggacctccagcccaagctccactgggtcggttagcctcgggcgctacactccgacctcacggtcaccacagcactacagccgtccaggcagtgaaagtggccggagcacccccagcctctccgtgctctctgacagcaagccgcccccctccacctaccagcaggcacctcgccacttccacgtcccagacactggcgtaaaagataacatctataggaaaccccctatctacagacagcatgctgccaggcgatcggatggggaggatggaagcttggaccaggataacaggaagaagagcagctggctgatgctcaagggggatgcagacacaaggaccaattctccagacctggacacccagtccttgtcccacagcagcgggaccgacagagaccctctccaaaggatggcaggggacagctttcactcacaatacaagatctatccgtatgactccctcatcgtcacaaaccgaattcgcgtgaaactgcccaaagacgtggaccggacgagactggagagacacttgtcgcccgaggagttccaggaagtgtttgggatgagcatcgaggagtttgaccgcctggccctctggaagaggaatgaccttaagaagaaagcccttttgttctgacggctgccagcctgccccactggtgtgtgccgggcgccgaggccaggggcccctggcgagaaccgcacacacccctcccacacaccttgctctggcttctctgtgtccatggggtgggcgggagggggtcccccagcaggtgcggcccctgcacctgccggcgacactcctgccggtagtttagggccgagacggctagcttcacgccacccttccccgctgtggcttggtgtcagggagaggctgtagagtggctgtgtcgggcatcagatggagcacacaggtggctgcagcccagcccaccttcccagcgttctcgaggtgccctggccccggtgctgggcacgtgggggacagaggtggccgggacgtgagctgtgaggcttgttgatgatggttgctgacaccatcatcgggggtgggcacacggcccttcggagcctgggcagcctggcctcacaggcagactcgcagacggggcagtgagcgtctgggacagtgccaagagtggggtgtgtgatttttgcaggcgtctgtgatgggtctctttagggacaaatgtcaacaagggacaagacagggcaccttccgccagcgcccctccatgcgctgcgttcctcctccagatcgacccctagatgcctacacaatatctttaaagtaacacagaagtttttattttattaaa

SEQ ID NO: 103873 - DNA, 2291 bp, Homo sapiens
  Payload ID: 420
  Gene Symbol: ABLIM2
  Gene Name: actin binding LIM protein family, member 2
  Uniprot ID: Q6H8Q1
  ENST ID: ENST00000407564
  CDS Start-End: 95-1660
gggcgggcggaggatagcgcgggcgcggcacctgcgggcccgagggtctggctgtcgcagcgccgggccgccccgactccgagcggctgctgagatgagtgcagtgtcgcagccccaggctgctcccagcccgctggagaagtcgcccagcacggcgatcctgtgcaacacgtgtgggaatgtgtgcaagggcgaggtgctgcgggtgcaggacaagtacttccacatcaagtgcttcgtctgtaaagcatgtggctgcgacctggccgagggcggcttcttcgtgcggcagggcgagtacatctgcacgctggactaccagaggctctacggcacccgctgcttcagctgcgaccagttcattgagggtgaggtggtgtcggcgctgggcaagacctaccaccccgactgcttcgtgtgtgccgtctgccggctgcccttcccccccggggaccgagtgaccttcaacgggaaggaatgcatgtgccagaagtgttccctgcccgtatcggtgggcagcagcgcgcacctgtcccagggcctccgaagttgtgggggctgcggcacagaaatcaagaatggccaggccctggtagccttggacaagcactggcacttgggctgttttaagtgcaagagctgtgggaagctcctgaatgccgagtacatcagcaaggatgggctgccctactgcgaagctgactatcacgccaagttcggcatccgctgtgacagctgtgagaaatacatcacggggcgcgtgctggaggccggagagaagcactaccacccttcctgcgcgctatgtgtcaggtgcggccagatgtttgcagaaggcgaagagatgtatcttcaaggttcctccatctggcatccggcgtgtcgacaagcagccagaactgaagacagaaacaaggaaaccagaacttcctcagagagcatcatttctgtccctgcttccagcacctcagggtctccgagccgtgtgatttatgccaagcttggtggtgagatcctggactacagggacttggcagcccttcctaaaagtaaggccatctatgacatcgaccgccccgacatgatctcctactcaccctacatcagccactctgcaggggacaggcagagctacggcgagggggatcaggatgaccggtcctacaagcagtgtcggacctccagcccaagctccactgggtcggttagcctcgggcgctacactccgacctcacggtcaccacagcactacagccgtccagctgccaggcgatcggatggggaggatggaagcttggaccaggataacaggaagcagaagagcagctggctgatgctcaagggggatgcagacacaaggaccaattctccagacctggacacccagtccttgtcccacagcagcgggaccgacagagaccctctccaaaggatggcaggggacagctttcactcacaatacaagatctatccgtatgactccctcatcgtcacaaaccgaattcgcgtgaaactgcccaaagacgtggaccggacgagactggagagacacttgtcgcccgaggagttccaggaagtgtttgggatgagcatcgaggagtttgaccgcctggccctctggaagaggaatgaccttaagaagaaagcccttttgttctgacggctgccagcctgccccactggtgtgtgccgggcgccgaggccaggggcccctggcgagaaccgcacacacccctcccacacaccttgctctggcttctctgtgtccatggggtgggcgggagggggtcccccagcaggtgcggcccctgcacctgccggcgacactcctgccggtagtttagggccgagacggctagcttcacgccacccttccccgctgtggcttggtgtcagggagaggctgtagagtggctgtgtcgggcatcagatggagcacacaggtggctgcagcccagcccaccttcccagcgttctcgaggtgccctggccccggtgctgggcacgtgggggacagaggtggccgggacgtgagctgtgaggcttgttgatgatggttgctgacaccatcatcgggggtgggcacacggcccttcggagcctgggcagcctggcctcacaggcagactcgcagacggggcagtgagcgtctgggacagtgccaagagtggggtgtgtgatttttgcaggcgtctgtgatgggtctctttagggacaaatgtcaacaagggacaagacagggcaccttccgccagcgcccctccatgcgctgcgttcctcctccagatcga

SEQ ID NO: 103874 - DNA, 2573 bp, Homo sapiens
  Payload ID: 420
  Gene Symbol: ABLIM2
  Gene Name: actin binding LIM protein family, member 2
  Uniprot ID: Q6H8Q1
  ENST ID: ENST00000428004
  CDS Start-End: 144-1556
tgcggcggcgctgcctggcgtgtgcgcaaggagcgggcgcggagccggcgggcgggcggaggatagcgcgggcgcggcacctgcgggcccgagggtctggctgtcgcagcgccgggccgccccgactccgagcggctgctgagatgagtgcagtgtcgcagccccaggctgctcccagcccgctggagaagtcgcccagcacggcgatcctgtgcaacacgtgtgggaatgtgtgcaagggcgaggtgctgcgggtgcaggacaagtacttccacatcaagtgcttcgtctgtaaagcatgtggctgcgacctggccgagggcggcttcttcgtgcggcagggcgagtacatctgcacgctggactaccagaggctctacggcacccgctgcttcagctgcgaccagttcattgagggtgaggtggtgtcggcgctgggcaagacctaccaccccgactgcttcgtgtgtgccgtctgccggctgcccttcccccccggggaccgagtgaccttcaacgggaaggaatgcatgtgccagaagtgttccctgcccgtatcggtgggcagcagcgcgcacctgtcccagggcctccgaagttgtgggggctgcggcacagaaatcaagaatggccaggccctggtagccttggacaagcactggcacttgggctgttttaagtgcaagagctgtgggaagctcctgaatgccgagtacatcagcaaggatgggctgccctactgcgaagctgactatcacgccaagttcggcatccgctgtgacagctgtgagaaatacatcacggggcgcgtgctggaggccggagagaagcactaccacccttcctgcgcgctatgtgtcaggtgcggccagatgtttgcagaaggcgaagagatgtatcttcaaggttcctccatctggcatccggcgtgtcgacaagcagccagaactgaagacagaaacaaggaaaccagaacttcctcagagagcatcatttctgtccctgcttccagcacctcagggtctccgagccgtgtgatttatgccaagcttggtggtgagatcctggactacagggacttggcagcccttcctaaaagtaaggccatctatgacatcgaccgccccgacatgatctcctactcaccctacatcagccactctgcaggggacaggcagagctacggcgagtcccctcagttgctctcgccaacgccgaccgagggggatcaggatgaccggtcctacaagcagtgtcggacctccagcccaagctccactgggtcggttagcctcgggcgctacactccgacctcacggtcaccacagcactacagccgtccagctgccaggcgatcggatggggaggatggaagcttggaccaggataacaggaagcagaagagcagctggctgatgctcaagggggatgcagacacaaggaccaattctccagacctggacacccagtccttgtcccacagcagcgggaccgacagagaccctctccaaaggatggcaggggacagctttcactcacgtgagtggttcttttgaagaaggagccgtgatgtgcacaaaatgcctcgcggcaaagaggccccagaactcagagctatccccctacatctaagccttgcctgttaaaaagcatgaaagcaaagcccacaaatctaaggaccgaccggaaggaaatatggggcttttgcagtttgccggcttcccaagaactgtccccgagccagtgtgctaacgagggccacgcctgcatgtcccctcacagatttccaaggtgtgcaagaatgcagaaacccagacctgctcctgggctgtttaggagaaaggcgtccgggctgccgggtggaagtcagggcctgttccctccagagcagacatgggcatggtccggctgatgagtgcagacttggagttggtgatgggcaccatccctgtcccctgtgactcatcctgaacgaggcacagcctcaggcttcatagagagacagtgatggtgtctgcctgaccctaggggtgttttgaagactgaatcaggagtgattttcaaatgtagagaaaactccagataatgctgtttgcttccggccgctgtaaatcataggtgaaaaccagtagcaagtgctcactcagtgcctcccagaagcggtctgcgggtctcagctgggctgggggcagttttcattgggcaaggcttgggcttagcttcgaagcaggggctgggagaggatggatgggggtgtgagagcagaagaaagacctggctttgcagtgaggcagtcccaagttcaaatctgagctcaccactgacccgtcgtgtgatgggcgccaggtgttaggagactggaactgggtatgtgtgtggcattcggccggccatagtagctgctcagtaaacagaaactgtttctcatcctcatcctcatcctcatgcctgcaaactgtaaaccgtcctacttaacaatgaaagtagaaaagtgtttcaatgtgacaggaaagagtgaagacacagaagcttggaaatgatgatgtgttaaagaatcactttaaacaaagaaa

SEQ ID NO: 103875 - DNA, 2902 bp, Homo sapiens
  Payload ID: 420
  Gene Symbol: ABLIM2
  Gene Name: actin binding LIM protein family, member 2
  Uniprot ID: Q6H8Q1
  ENST ID: ENST00000447017
  CDS Start-End: 21-1958
gactccgagcggctgctgagatgagtgcagtgtcgcagccccaggctgctcccagcccgctggagaagtcgcccagcacggcgatcctgtgcaacacgtgtgggaatgtgtgcaagggcgaggtgctgcgggtgcaggacaagtacttccacatcaagtgcttcgtctgtaaagcatgtggctgcgacctggccgagggcggcttcttcgtgcggcagggcgagtacatctgcacgctggactaccagaggctctacggcacccgctgcttcagctgcgaccagttcattgagggtgaggtggtgtcggcgctgggcaagacctaccaccccgactgcttcgtgtgtgccgtctgccggctgcccttcccccccggggaccgagtgaccttcaacgggaaggaatgcatgtgccagaagtgttccctgcccgtatcggtgggcagcagcgcgcacctgtcccagggcctccgaagttgtgggggctgcggcacagaaatcaagaatggccaggccctggtagccttggacaagcactggcacttgggctgttttaagtgcaagagctgtgggaagctcctgaatgccgagtacatcagcaaggatgggctgccctactgcgaagctgactatcacgccaagttcggcatccgctgtgacagctgtgagaaatacatcacggggcgcgtgctggaggccggagagaagcactaccacccttcctgcgcgctatgtgtcaggtgcggccagatgtttgcagaaggcgaagagatgtatcttcaaggttcctccatctggcatccggcgtgtcgacaagcagccagaactgaagacagaaacaaggaaaccagaacttcctcagagagcatcatttctgtccctgcttccagcacctcagggtctccgagccgtgtgatttatgccaagcttggtggtgagatcctggactacagggacttggcagcccttcctaaaagtaaggccatctatgacatcgaccgccccgacatgatctcctactcaccctacatcagccactctgcaggggacaggcagagctacggcgagggggatcaggatgaccggtcctacaagcagtgtcggacctccagcccaagctccactgggtcggttagcctcgggcgctacactccgacctcacggtcaccacagcactacagccgtccagctggtactgtgagtgtgggtaccagtagctgcctctccctgtcccaacacccaagccctacatccgtgttcagacatcattacatcccctacttccgaggcagtgaaagtggccggagcacccccagcctctccgtgctctctgacagcaagccgcccccctccacctaccagcaggcacctcgccacttccacgtcccagacactggcgtaaaagataacatctataggaaaccccctatctacagacagcatgctgccaggcgatcggatggggaggatggaagcttggaccaggataacaggaagcagaagagcagctggctgatgctcaagggggatgcagacacaaggaccaattctccagacctggacacccagtccttgtcccacagcagcgggaccgacagagaccctctccaaaggatggcaggggacagctttcactcacgattcccctattccaaatctgaccctctcccaggacatggaaagaatggcttggaccagcggaatgccaatctggccccctgtggagcagacccggatgccagctggggcatgcgagaatacaagatctatccgtatgactccctcatcgtcacaaaccgaattcgcgtgaaactgcccaaagacgtggaccggacgagactggagagacacttgtcgcccgaggagttccaggaagtgtttgggatgagcatcgaggagtttgaccgcctggccctctggaagaggaatgaccttaagaagaaagcccttttgttctgacggctgccagcctgccccactggtgtgtgccgggcgccgaggccaggggcccctggcgagaaccgcacacacccctcccacacaccttgctctggcttctctgtgtccatggggtgggcgggagggggtcccccagcaggtgcggcccctgcacctgccggcgacactcctgccggtagtttagggccgagacggctagcttcacgccacccttccccgctgtggcttggtgtcagggagaggctgtagagtggctgtgtcgggcatcagatggagcacacaggtggctgcagcccagcccaccttcccagcgttctcgaggtgccctggccccggtgctgggcacgtgggggacagaggtggccgggacgtgagctgtgaggcttgttgatgatggttgctgacaccatcatcgggggtgggcacacggcccttcggagcctgggcagcctggcctcacaggcagactcgcagacggggcagtgagcgtctgggacagtgccaagagtggggtgtgtgatttttgcaggcgtctgtgatgggtctctttagggacaaatgtcaacaagggacaagacagggcaccttccgccagcgcccctccatgcgctgcgttcctcctccagatcgacccctagatgcctacacaatatctttaaagtaacacagaagtttttattttattaaaaagtatagcctacttaaacgcgagatgacatatatagagtttaattttacggtccctccgcaggggagcggcctccagccttattctccaccgctcggatctgtgtggtttcagtctgttcttggtgtggtcctcatacacagagctccctgtctagtttcttttctttttcttttttctttttctcgtcacacaggtaaccttaaagacagacccctctaaagaacgctttgtaaatacatgtgaggtatagcca

SEQ ID NO: 103876 - DNA, 1680 bp, Homo sapiens
  Payload ID: 420
  Gene Symbol: ABLIM2
  Gene Name: actin binding LIM protein family, member 2
  Uniprot ID: Q6H8Q1
  ENST ID: ENST00000505872
  CDS Start-End: 1-1680
atgagtgcagtgtcgcagccccaggctgctcccagcccgctggagaagtcgcccagcacggcgatcctgtgcaacacgtgtgggaatgtgtgcaagggcgaggtgctgcgggtgcaggacaagtacttccacatcaagtgcttcgtctgtaaagcatgtggctgcgacctggccgagggcggcttcttcgtgcggcagggcgagtacatctgcacgctggactaccagaggctctacggcacccgctgcttcagctgcgaccagttcattgagggtgaggtggtgtcggcgctgggcaagacctaccaccccgactgcttcgtgtgtgccgtctgccggctgcccttcccccccggggaccgagtgaccttcaacgggaaggaatgcatgtgccagaagtgttccctgcccgtatcggtgggcagcagcgcgcacctgtcccagggcctccgaagttgtgggggctgcggcacagaaatcaagaatggccaggccctggtagccttggacaagcactggcacttgggctgttttaagtgcaagagctgtgggaagctcctgaatgccgagtacatcagcaaggatgggctgccctactgcgaagctgactatcacgccaagttcggcatccgctgtgacagctgtgagaaatacatcacggggcgcgtgctggaggccggagagaagcactaccacccttcctgcgcgctatgtgtcaggtgcggccagatgtttgcagaaggcgaagagatgtatcttcaaggttcctccatctggcatccggcgtgtcgacaagcagccagaactgaagacagaaacaaggaaaccagaacttcctcagagagcatcatttctgtccctgcttccagcacctcagggtctccgagccgtgtgatttatgccaagcttggtggtgagatcctggactacagggacttggcagcccttcctaaaagtaaggccatctatgacatcgaccgccccgacatgatctcctactcaccctacatcagccactctgcaggggacaggcagagctacggcgagggggatcaggatgaccggtcctacaagcagtgtcggacctccagcccaagctccactgggtcggttagcctcgggcgctacactccgacctcacggtcaccacagcactacagccgtccagctgccaggcgatcggatggggaggatggaagcttggaccaggataacaggaagaagagcagctggctgatgctcaagggggatgcagacacaaggaccaattctccagacctggacacccagtccttgtcccacagcagcgggaccgacagagaccctctccaaaggatggcaggggacagctttcactcacgattcccctattccaaatctgaccctctcccaggacatggaaagaatggcttggaccagcggaatgccaatctggccccctgtggagcagacccggatgccagctggggcatgcgagaatacaagatctatccgtatgactccctcatcgtcacaaaccgaattcgcgtgaaactgcccaaagacgtggaccggacgagactggagagacacttgtcgcccgaggagttccaggaagtgtttgggatgagcatcgaggagtttgaccgcctggccctctggaagaggaatgaccttaagaagaaagcccttttgttctga

SEQ ID NO: 103877 - DNA, 1028 bp, Homo sapiens
  Payload ID: 420
  Gene Symbol: ABLIM2
  Gene Name: actin binding LIM protein family, member 2
  ENST ID: ENST00000510277
  CDS Start-End: 114-1028
ggagcacggcactcaagcagggccgtcagactgggctctggtgcccagaagctgtgcaggccggagagaagcactaccacccttcctgcgcgctatgtgtcaggtgcggccagatgtttgcagaaggcgaagagatgtatcttcaaggttcctccatctggcatccggcgtgtcgacaagcagccagaactgaagacagaaacaaggaaaccagaacttcctcagagagcatcatttctgtccctgcttccagcacctcagggtctccgagccgtgtgatttatgccaagcttggtggtgagatcctggactacagggacttggcagcccttcctaaaagtaaggccatctatgacatcgaccgccccgacatgatctcctactcaccctacatcagccactctgcaggggacaggcagagctacggcgagtcccctcagttgctctcgccaacgccgaccgagggggatcaggatgaccggtcctacaagcagtgtcggacctccagcccaagctccactgggtcggttagcctcgggcgctacactccgacctcacggtcaccacagcactacagccgtccagctggtactgtgagtgtgggtaccagtagctgcctctccctgtcccaacacccaagccctacatccgtgttcagacatcattacatcccctacttccgaggcagtgaaagtggccggagcacccccagcctctccgtgctctctgacagcaagccgcccccctccacctaccagcaggcacctcgccacttccacgtcccagacactggcgtaaaagataacatctataggaaaccccctatctacagacagcatgctgccaggcgatcggatggggaggatggaagcttggaccaggataacaggaagaagagcagctggctgatgctcaagggggatgcagacacaaggaccaattctccagacctggacacccagtccttgtcccacagcagcgggaccgacagagaccctctccaaaggatggcaggggacagctttcac

SEQ ID NO: 103878 - DNA, 2974 bp, Homo sapiens
  Payload ID: 420
  Gene Symbol: ABLIM2
  Gene Name: actin binding LIM protein family, member 2
  Uniprot ID: Q6H8Q1
  ENST ID: ENST00000514025
  CDS Start-End: 273-1313
agaaggggagctgccgccgccgcggtggcactgcctgatgctcggcccagtgtgccggtgccccgctgggtgacagtggactcccagggcgcagcaggagcaggtgacagactgttggctgaaggtgagggtgtccaccctcgcaggcacacgttccagggagcacggcactcaagcagggccgtcagactgggctctggtgcccagaagctgtgcaggccggagagaagcactaccacccttcctgcgcgctatgtgtcaggtgcggccagatgtttgcagaaggcgaagagatgtatcttcaaggttcctccatctggcatccggcgtgtcgacaagcagccagaactgaagacagaaacaaggaaaccagaacttcctcagagagcatcatttctgtccctgcttccagcacctcagggtctccgagccgtgtgatttatgccaagcttggtggtgagatcctggactacagggacttggcagcccttcctaaaagtaaggccatctatgacatcgaccgccccgacatgatctcctactcaccctacatcagccactctgcaggggacaggcagagctacggcgagtcccctcagttgctctcgccaacgccgaccgagggggatcaggatgaccggtcctacaagcagtgtcggacctccagcccaagctccactgggtcggttagcctcgggcgctacactccgacctcacggtcaccacagcactacagccgtccagacactggcgtaaaagataacatctataggaaaccccctatctacagacagcatgctgccaggcgatcggatggggaggatggaagcttggaccaggataacaggaagcagaagagcagctggctgatgctcaagggggatgcagacacaaggaccaattctccagacctggacacccagtccttgtcccacagcagcgggaccgacagagaccctctccaaaggatggcaggggacagctttcactcacgattcccctattccaaatctgaccctctcccaggacatggaaagaatggcttggaccagcggaatgccaatctggccccctgtggagcagacccggatgccagctggggcatgcgagaatacaagatctatccgtatgactccctcatcgtcacaaaccgaattcgcgtgaaactgcccaaagacgtggaccggacgagactggagagacacttgtcgcccgaggagttccaggaagtgtttgggatgagcatcgaggagtttgaccgcctggccctctggaagaggaatgaccttaagaagaaagcccttttgttctgacggctgccagcctgccccactggtgtgtgccgggcgccgaggccaggggcccctggcgagaaccgcacacacccctcccacacaccttgctctggcttctctgtgtccatggggtgggcgggagggggtcccccagcaggtgcggcccctgcacctgccggcgacactcctgccggtagtttagggccgagacggctagcttcacgccacccttccccgctgtggcttggtgtcagggagaggctgtagagtggctgtgtcgggcatcagatggagcacacaggtggctgcagcccagcccaccttcccagcgttctcgaggtgccctggccccggtgctgggcacgtgggggacagaggtggccgggacgtgagctgtgaggcttgttgatgatggttgctgacaccatcatcgggggtgggcacacggcccttcggagcctgggcagcctggcctcacaggcagactcgcagacggggcagtgagcgtctgggacagtgccaagagtggggtgtgtgatttttgcaggcgtctgtgatgggtctctttagggacaaatgtcaacaagggacaagacagggcaccttccgccagcgcccctccatgcgctgcgttcctcctccagatcgacccctagatgcctacacaatatctttaaagtaacacagaagtttttattttattaaaaagtatagcctacttaaacgcgagatgacatatatagagtttaattttacggtccctccgcaggggagcggcctccagccttattctccaccgctcggatctgtgtggtttcagtctgttcttggtgtggtcctcatacacagagctccctgtctagtttcttttctttttcttttttctttttctcgtcacacaggtaaccttaaagacagacccctctaaagaacgctttgtaaatacatgtgaggtatagccaccactgttttccttgctgttatttttccaagtcttggggagaaaacatcctcctctgatggccaaagccctggaatcaagggtttccacgtaccctgcctaatacccgacgtagctcttgatgcaccgtccttgtgctgtggctggcggtgtctcagcctgaaacataaaccccacatgccccaggagcgatgtgctccctgaaacagacaaccacacgctgttggggagagaaggatggagataggatggagataggatggagatgtggctcttctcatctttgaagccagcagggcatcccggagcaggaggctggccgggctccccaagcgaaggcgttggtgtctgtcattaggtgtgtgttagggtgcagcaccggccgtcacaggatgctgataagcgcgctgagaggtggatgaaacaccaaagtctgtttccccgtccgcagtgggtgttgcctctttgtgtgtgtcccgatgttcctgcctgtgagtcggccttactccgtttccttagcgcccatgacacgccaagtcccgtttcgcactcggcttctcacccgcccagctcggctagggagggggagtttttagcacctaatatgcttcctgccattgcgcaatctgagcctgagcaactggaaacccccatttctcattagtgcaatgtcatatctgatcccaggaagcctggaaaataaaagacgatgcattat

SEQ ID NO: 103879 - DNA, 1972 bp, Homo sapiens
  Payload ID: 420
  Gene Symbol: ABLIM2
  Gene Name: actin binding LIM protein family, member 2
  ENST ID: ENST00000545242
  CDS Start-End: 21-1961
gactccgagcggctgctgagatgagtgcagtgtcgcagccccaggctgctcccagcccgctggagaagtcgcccagcacggcgatcctgtgcaacacgtgtgggaatgtgtgcaagggcgaggtgctgcgggtgcaggacaagtacttccacatcaagtgcttcgtctgtaaagcatgtggctgcgacctggccgagggcggcttcttcgtgcggcagggcgagtacatctgcacgctggactaccagaggctctacggcacccgctgcttcagctgcgaccagttcattgagggtgaggtggtgtcggcgctgggcaagacctaccaccccgactgcttcgtgtgtgccgtctgccggctgcccttcccccccggggaccgagtgaccttcaacgggaaggaatgcatgtgccagaagtgttccctgcccgtatcggtgggcagcagcgcgcacctgtcccagggcctccgaagttgtgggggctgcggcacagaaatcaagaatggccaggccctggtagccttggacaagcactggcacttgggctgttttaagtgcaagagctgtgggaagctcctgaatgccgagtacatcagcaaggatgggctgccctactgcgaagctgactatcacgccaagttcggcatccgctgtgacagctgtgagaaatacatcacggggcgcgtgctggaggccggagagaagcactaccacccttcctgcgcgctatgtgtcaggtgcggccagatgtttgcagaaggcgaagagatgtatcttcaaggttcctccatctggcatccggcgtgtcgacaagcagccagaactgaagacagaaacaaggaaaccagaacttcctcagagagcatcatttctgtccctgcttccagcacctcagggtctccgagccgtgtgatttatgccaagcttggtggtgagatcctggactacagggacttggcagcccttcctaaaagtaaggccatctatgacatcgaccgccccgacatgatctcctactcaccctacatcagccactctgcaggggacaggcagagctacggcgagggggatcaggatgaccggtcctacaagcagtgtcggacctccagcccaagctccactgggtcggttagcctcgggcgctacactccgacctcacggtcaccacagcactacagccgtccagctggtactgtgagtgtgggtaccagtagctgcctctccctgtcccaacacccaagccctacatccgtgttcagacatcattacatcccctacttccgaggcagtgaaagtggccggagcacccccagcctctccgtgctctctgacagcaagccgccccccccacctaccagcaggcacctcgccacttccacgtcccaggccccagacactggcgtaaaagataacatctataggaaaccccctatctacagacagcatgctgccaggcgatcggatggggaggatggaagcttggaccaggataacaggaagcagaagagcagctggctgatgctcaagggggatgcagacacaaggaccaattctccagacctggacacccagtccttgtcccacagcagcgggaccgacagagaccctctccaaaggatggcaggggacagctttcactcacgattcccctattccaaatctgaccctctcccaggacatggaaagaatggcttggaccagcggaatgccaatctggccccctgtggagcagacccggatgccagctggggcatgcgagaacagatctatccgtatgactccctcatcgtcacaaaccgaattcgcgtgaaactgcccaaagacgtggaccggacgagactggagagacacttgtcgcccgaggagttccaggaagtgtttgggatgagcatcgaggagtttgaccgcctggccctctggaagaggaatgaccttaagaagaaagcccttttgttctgacggctgccagc

SEQ ID NO: 103880 - DNA, 4326 bp, Homo sapiens
  Payload ID: 421
  Gene Symbol: ABLIM3
  Gene Name: actin binding LIM protein family, member 3
  Uniprot ID: O94929
  ENST ID: ENST00000309868
  CDS Start-End: 240-2291
ctgccaacccgcgagcccgcatcatggatgtcgagctcccctatttcgcattgctagccctggaattcgagaccccagacgaggaccaggattcatgaaatcagtcgcaggggccggggcaggggcctctggctcccgacactggccgagaggtgatgagtgaggttcgaagaacggaagatttaaaaagcagccggggcctccgtattgaatgaaagacccagtgcaaagacatcaccatgaacactagcattccttatcagcagaatccttacaatccacggggcagctccaatgtcatccagtgctaccgctgtggagacacctgcaaaggggaagtggtccgcgtgcacaacaaccacttccacatcagatgcttcacctgtcaagtatgtggctgtggcctggcccagtcaggcttcttcttcaagaaccaggagtacatctgcacccaggactaccagcaactctatggcacccgctgtgacagctgccgggacttcatcacaggcgaagtcatctcggccctgggccgcacttaccaccccaagtgcttcgtgtgcagcttgtgcaggaagcctttccccattggagacaaggtgaccttcagcggtaaagaatgtgtgtgccaaacgtgctcccagtccatggccagcagtaagcccatcaagattcgtggaccaagccactgtgccgggtgcaaggaggagatcaagcacggccagtcactcctggctctggacaagcagtggcacgtcagctgcttcaagtgccagacctgcagcgtcatcctcaccggggagtatatcagcaaggatggtgttccatactgtgagtccgactaccatgcccagtttggcattaaatgtgagacttgtgaccgatacatcagtggcagagtcttggaggcaggagggaagcactaccacccaacctgtgccaggtgtgtacgctgccaccagatgttcaccgaaggagaggaaatgtacctcacaggttccgaggtttggcaccccatctgcaaacaggcagcccgggcagagaagaagttaaagcatagacggacatctgaaacctccatctcaccccctggatccagcattgggtcacccaaccgagtcatctgcgctaaagtggataatgagatccttaattacaaagacctggcggctctccccaaggttaagtctatctacgaggtacaacgccccgacctcatttcctatgagcctcattccagatacatgtccgacgagatgctggagagatgtggctatggagagtcgctgggaacattatctccctactcccaggacatctacgagaacctggacctccggcagagacgggcctccagcccggggtacatagactcccccacctacagccggcagggcatgtcccccaccttctcccgctcacctcaccactactaccgctctgggcccgagagtggccggagctctccataccatagccagttagatgtgaggtcctccactccaacctcttaccaggctcccaagcactttcacatcccagctggagacagtaacatctaccggaaacccccgatctacaaacggcatggtgatttgtctacagcaaccaagagcaaaacaagtgaagacatcagccagacctccaagtacagtcccatctactcgccagacccctactatgcttcggagtctgagtactggacctaccatgggtcccccaaagtgccccgagccagaaggttctcgtctggaggagaggaggatgattttgaccgcagcatgcacaagctccaaagtggaattggccggctgattctgaaggaagaaatgaaggcccggtcgagctcctatgcagatccctggacccctccccggagctccaccagcagccgggaagccctgcacacagctggctatgagatgtccctcaatggctcccctcggtcgcactacctggctgacagtgatcctctcatctccaaatctgcctccctgcctgcctaccgaagaaatgggctgcacaggacacccagcgcagacctcttccactacgacagcatgaacgcagtcaactggggcatgcgagagtacaagatctacccttatgaactgctgctggtgactacaagaggaagaaaccgactgcccaaggatgtagacaggacccgtttagagcgccacctgtcccaggaagagttctaccaagtctttggcatgaccatctctgagtttgaccggctggccctctggaagaggaatgaactgaagaagcaagcccggctgttctaggcagaggctctataaatatatatgcatttatataaagatatatgtaaaatctctctactgaagctcggtataatcctctcttgtgtaatgggacacactgcctgccatgagacttgcttttctgtactgtcaggcaagcccacgtcatcgagatatttttatgctccttactttctcttttctaagtgctgtgggatctgggaagggatttgaggggactctgtccttttattggggatcctttttatactgaaacatctgtcctaacttgagtgccccaaggtccaactctctttcctaaagaaggtgcctgaagaagtctctcttctctctgcttcgtggcccctttcttaaatttctagggctgatgctgaccatgtggtttccacaccttattggccccagaggggccctcccatgggaagatctgcagcagtctccccaaatcagtgagcacctttgagcgcccacgaagaactttctcaacacccccaattaggagctcagtgctctcttggggcaatgcagttaaaagggtgagcctcaaatctagtcattacaccagtcaacagaagtggacagggcctaggcctctcctcagctccttaaccctcctccttctgccctggattgtaacctctcccttgtccaaatctaggattcctggtaggaaaaggaaaaggcccttcccttccctccaccacttccaactggcccctttgcctgacctggacttggagaaccagaggaaaagagagggagcggaagtgggagatggagcagggcacctgttagaatcagagctgcaggatttcttgggaccctcctctctccctcactgctcccagcacctcctgacccttccctctttcaaggagaagcccatgattgcagcttgtattctttagccttattacaatctatgtgcctgacaactcaacacaccgcagggctaatgttcccaccagagctccaactgaacaaccagacagacaactctcatcatcctccagagagaaaataggccgtgtctcaaagaaaggttcttggtctatgcctctggtctgtgggctggcagggcaaccataccatacccccgccagtcctcggctcctgctgcaaagttggccatgtttcacagggaaacttttggaagagtggctgcttatgagattccaaaatgaagtgttggccaacaccgctcatggccatcctggattttcccagtggcttcccttcctgctcgcctccctgaacaggggagaaagcttaacctctcttctcctctccaaacctttcaccttgaatgggtaatgtttggtgggggctgttccttcttggagaagccttgagtcggaccattttgagatcatggaggaaggatgaagaagtgaaaatgacaataatgactctcaagaggctggcgatgtgacatggcaaatgtagaactgacttaaattgaacaaaccctcactgagcacctctgatgttgagcacctgctgaatactgagcactgaatgggggagggggaggggagcacggggtgagtcaacctgggactcggtctcagggatatgcctaccaatagcgggtatcgtaaggcatgtacccaaacataacggatgtaaggcagaaagtgatcggagaaggaatgagaaagtgtgcgtgatgttaatgaaaagtcatatgcagctagagcagacccaggaaagctttctggaagagattgcatctgaggaaattcaggaaggatctttgtagattggggggagattctaaattgaaggggtgatggggtgaggggccagagggaagtctgctgtgttctcatgtaggatgtcagccctccctgcaacttctctttttggccaatgtcttttcactttcctgaccctttagaatcatccccagccagacgcaatcatggaagttgccttattgtcactggttaagaacttggcgagattgaagggcttttgttattgttgttggatatttttgtttcccataaaagcacatcatttcaaccctaaa

SEQ ID NO: 103881 - DNA, 4164 bp, Homo sapiens
  Payload ID: 421
  Gene Symbol: ABLIM3
  Gene Name: actin binding LIM protein family, member 3
  Uniprot ID: O94929
  ENST ID: ENST00000326685
  CDS Start-End: 260-2026
gagcggccgcgccccctgcgctgccaacccgcgagcccgcatcatggatgtcgagctcccctatttcgcattgctagccctggaattcgagaccccagacgaggaccaggattcatgaaatcagtcgcaggggccggggcaggggcctctggctcccgacactggccgagaggtgatgagtgaggttcgaagaacggaagatttaaaaagcagccggggcctccgtattgaatgaaagacccagtgcaaagacatcaccatgaacactagcattccttatcagcagaatccttacaatccacggggcagctccaatgtcatccagtgctaccgctgtggagacacctgcaaaggggaagtggtccgcgtgcacaacaaccacttccacatcagatgcttcacctgtcaagtatgtggctgtggcctggcccagtcaggcttcttcttcaagaaccaggagtacatctgcacccaggactaccagcaactctatggcacccgctgtgacagctgccgggacttcatcacaggcgaagtcatctcggccctgggccgcacttaccaccccaagtgcttcgtgtgcagcttgtgcaggaagcctttccccattggagacaaggtgaccttcagcggtaaagaatgtgtgtgccaaacgtgctcccagtccatggccagcagtaagcccatcaagattcgtggaccaagccactgtgccgggtgcaaggaggagatcaagcacggccagtcactcctggctctggacaagcagtggcacgtcagctgcttcaagtgccagacctgcagcgtcatcctcaccggggagtatatcagcaaggatggtgttccatactgtgagtccgactaccatgcccagtttggcattaaatgtgagacttgtgaccgatacatcagtggcagagtcttggaggcaggagggaagcactaccacccaacctgtgccaggtgtgtacgctgccaccagatgttcaccgaaggagaggaaatgtacctcacaggttccgaggtttggcaccccatctgcaaacaggcagcccgggcagagaagaagttaaagcatagacggacatctgaaacctccatctcaccccctggatccagcattgggtcacccaaccgagtcatctgcgacatctacgagaacctggacctccggcagagacgggcctccagcccggggtacatagactcccccacctacagccggcagggcatgtcccccaccttctcccgctcacctcaccactactaccgctctgctggagacagtaacatctaccggaaacccccgatctacaaacggcatggtgatttgtctacagcaaccaagagcaaaacaagtgaagacatcagccagacctccaagtacagtcccatctactcgccagacccctactatgcttcggagtctgagtactggacctaccatgggtcccccaaagtgccccgagccagaaggttctcgtctggaggagaggaggatgattttgaccgcagcatgcacaagctccaaagtggaattggccggctgattctgaaggaagaaatgaaggcccggtcgagctcctatgcagatccctggacccctccccggagctccaccagcagccgggaagccctgcacacagctggctatgagatgtccctcaatggctcccctcggtcgcactacctggctgacagtgatcctctcatctccaaatctgcctccctgcctgcctaccgaagaaatgggctgcacaggacacccagcgcagacctcttccactacgacagcatgaacgcagtcaactggggcatgcgagagtacaagatctacccttatgaactgctgctggtgactacaagaggaagaaaccgactgcccaaggatgtagacaggacccgtttagagcgccacctgtcccaggaagagttctaccaagtctttggcatgaccatctctgagtttgaccggctggccctctggaagaggaatgaactgaagaagcaagcccggctgttctaggcagaggctctataaatatatatgcatttatataaagatatatgtaaaatctctctactgaagctcggtataatcctctcttgtgtaatgggacacactgcctgccatgagacttgcttttctgtactgtcaggcaagcccacgtcatcgagatatttttatgctccttactttctcttttctaagtgctgtgggatctgggaagggatttgaggggactctgtccttttattggggatcctttttatactgaaacatctgtcctaacttgagtgccccaaggtccaactctctttcctaaagaaggtgcctgaagaagtctctcttctctctgcttcgtggcccctttcttaaatttctagggctgatgctgaccatgtggtttccacaccttattggccccagaggggccctcccatgggaagatctgcagcagtctccccaaatcagtgagcacctttgagcgcccacgaagaactttctcaacacccccaattaggagctcagtgctctcttggggcaatgcagttaaaagggtgagcctcaaatctagtcattacaccagtcaacagaagtggacagggcctaggcctctcctcagctccttaaccctcctccttctgccctggattgtaacctctcccttgtccaaatctaggattcctggtaggaaaaggaaaaggcccttcccttccctccaccacttccaactggcccctttgcctgacctggacttggagaaccagaggaaaagagagggagcggaagtgggagatggagcagggcacctgttagaatcagagctgcaggatttcttgggaccctcctctctccctcactgctcccagcacctcctgacccttccctctttcaaggagaagcccatgattgcagcttgtattctttagccttattacaatctatgtgcctgacaactcaacacaccgcagggctaatgttcccaccagagctccaactgaacaaccagacagacaactctcatcatcctccagagagaaaataggccgtgtctcaaagaaaggttcttggtctatgcctctggtctgtgggctggcagggcaaccataccatacccccgccagtcctcggctcctgctgcaaagttggccatgtttcacagggaaacttttggaagagtggctgcttatgagattccaaaatgaagtgttggccaacaccgctcatggccatcctggattttcccagtggcttcccttcctgctcgcctccctgaacaggggagaaagcttaacctctcttctcctctccaaacctttcaccttgaatgggtaatgtttggtgggggctgttccttcttggagaagccttgagtcggaccattttgagatcatggaggaaggatgaagaagtgaaaatgacaataatgactctcaagaggctggcgatgtgacatggcaaatgtagaactgacttaaattgaacaaaccctcactgagcacctctgatgttgagcacctgctgaatactgagcactgaatgggggagggggaggggagcacggggtgagtcaacctgggactcggtctcagggatatgcctaccaatagcgggtatcgtaaggcatgtacccaaacataacggatgtaaggcagaaagtgatcggagaaggaatgagaaagtgtgcgtgatgttaatgaaaagtcatatgcagctagagcagacccaggaaagctttctggaagagattgcatctgaggaaattcaggaaggatctttgtagattggggggagattctaaattgaaggggtgatggggtgaggggccagagggaagtctgctgtgttctcatgtaggatgtcagccctccctgcaacttctctttttggccaatgtcttttcactttcctgaccctttagaatcatccccagccagacgcaatcatggaagttgccttattgtcactggttaagaacttggcgagattgaagggcttttgttattgttgttggatatttttgtttcccataaaagcacatcatttcaaccctaaacctgtgtgcttctgttgtttcttgtgtgggagtggaaatgactgacatgggaagaggctgaaccctgcacatttttcaaaatgaaagcaccaaaacagcagcc

SEQ ID NO: 103882 - DNA, 2290 bp, Homo sapiens
  Payload ID: 421
  Gene Symbol: ABLIM3
  Gene Name: actin binding LIM protein family, member 3
  ENST ID: ENST00000356541
  CDS Start-End: 1725-2237
ctaagcctcgattgaaggagcacatcccttccattgaagctgcagaggagcagctgccaccctgtgcacccacacttgcttaagggtctagctggataacaaaaggaggcccagaatcggtggagcttggagatgagcgaagcagtcctgcaccaggttctgaactaattagctggtggaggggacaatacgagtttaaacagcggctctgggtgcctaagattctacattttatacagacatccttggttccagagggggctgagcaggggggtccgaggtgagtctgtgagcatgtgcaagtctgtaccagcttgtgaaggacatgccatgtcccctgagtactcatagaaagacaccaacatgacaaaggtagtttggctttatacctagaaaaggcccccaggtcacaagcttctcaggactttgtgggattttccaggtgggccctgaggggtggcactaaagcagactcaagaggagtctggggtggaggtgggttgcttggaaaagagggcggaggaaaaagctaaatgcagtcagccaggaggggctgcccaggacccaagtcaaagagaagaatttgaaagctttggaagcaagtgctgttgtgggggctgcatagcccagggctggctgaagctgatccaccacgctctgccactctggctccacagagcacagagcttgtccctaaagcttcctgtagctgaccatgagaaatggtcatgcagccacacacacttccccagcccctctctctgctctaccagcctgtcacccacgtttgggccacgagaagtcactgctctgtaagtagttgtgactgcagtgggtctttttggtcacccctgtcctgggcttacttcaggtggaagcttgaagctggatggcagctgagccagcagaccgattctgacacttacagatgaggaaactaaggcagagatggtaggacctgcccagtgttacagctgagtaaagtggcagagctgggaccagaacccaggtttgctgactccctgtctagcactccttccttcaggctatgtagtccctgagcagaatgtggcatctcaggttgtgagaaatgatggagttcaaatttataacaaggaaggcttctaaagggctaggaaggcttctaaagggctggggctcacctgggacctgtccagtcttatttgaggagccacacccttagaggtcattctggaacagacctgggaatccatggaatgtgctggaaagagccctgggctgggatctggtccagttctggtgctcacatgctatgtggtcttaagcaagccccttcccctctctggtgctccaattactaaatgcaaaatgagggtttggccccagtgcttttccagctccgatgctccatggcccagttctaacagagagccctgatcttgaagtggactcactcccctgggctggagcctggtaaagataggaaaagggtacacagtcccatcccggtcactctgccttcctgaagtgctctccttgggtcctctgcaggtgatttgtctacagcaaccaagagcaaaacaagtgaagacatcagccagacctccaagtacagtcccatctactcgccagacccctactatgcttcggagtctgagtactggacctaccatgggtcccccaaagtgccccgagccagaaggttctcgtctggaggagaggaggatgattttgaccgcagcatgcacaagctccaaagtggaattggccggctgattctgaaggaagaaatgaaggcccggtcgagctcctatgcagatccctggacccctccccggagctccaccagcagccgggaagccctgcacacagctggctatgagatgtccctcaatggctcccctcggtcgcactacctggctgacagtgatcctctcatctccaaatctgcctccctgcctgcctaccgaagaaatgggctgcacaggacacccagcgcagacctcttccactacgacagcatgaacgcagtcaactggggcatgcgaggtgagtgcaagatctacccttatgaactgctgctggtgactacaagaggaagaaaccgactgcccaaggatgtagacaggacccgtttagagcgccacctgtcccaggaagagttctaccaagtctttggcatgaccatctctgagtttgaccggctggccctctggaagaggaatgaactgaagaagcaagcccggctgttctaggcagaggctctataaatatatatgcatttatataaagatatatgtaaaatctc

SEQ ID NO: 103883 - DNA, 2011 bp, Homo sapiens
  Payload ID: 421
  Gene Symbol: ABLIM3
  Gene Name: actin binding LIM protein family, member 3
  ENST ID: ENST00000508983
  CDS Start-End: 50-2002
cagccggggcctccgtattgaatgaaagacccagtgcaaagacatcaccatgaacactagcattccttatcagcagaatccttacaatccacggggcagctccaatgtcatccagtgctaccgctgtggagacacctgcaaaggggaagtggtccgcgtgcacaacaaccacttccacatcagatgcttcacctgtcaagtatgtggctgtggcctggcccagtcaggcttcttcttcaagaaccaggagtacatctgcacccaggactaccagcaactctatggcacccgctgtgacagctgccgggacttcatcacaggcgaagtcatctcggccctgggccgcacttaccaccccaagtgcttcgtgtgcagcttgtgcaggaagcctttccccattggagacaaggtgaccttcagcggtaaagaatgtgtgtgccaaacgtgctcccagtccatggccagcagtaagcccatcaagattcgtggaccaagccactgtgccgggtgcaaggaggagatcaagcacggccagtcactcctggctctggacaagcagtggcacgtcagctgcttcaagtgccagacctgcagcgtcatcctcaccggggagtatatcagcaaggatggtgttccatactgtgagtccgactaccatgcccagtttggcattaaatgtgagacttgtgaccgatacatcagtggcagagtcttggaggcaggagggaagcactaccacccaacctgtgccaggtgtgtacgctgccaccagatgttcaccgaaggagaggaaatgtacctcacaggttccgaggtttggcaccccatctgcaaacaggcagcccgggcagagaagaagttaaagcatagacggacatctgaaacctccatctcaccccctggatccagcattgggtcacccaaccgagtcatctgcgctaaagtggataatgagatccttaattacaaagacctggcggctctccccaaggttaagtctatctacgaggtacaacgccccgacctcatttcctatgagcctcattccagatacatgtccgacgagatgctggagagatgtggctatggagagtcgctgggaacattatctccctactcccaggacatctacgagaacctggacctccggcagagacgggcctccagcccggggtacatagactcccccacctacagccggcagggcatgtcccccaccttctcccgctcacctcaccactactaccgctctgctggagacagtaacatctaccggaaacccccgatctacaaacggcatggtgatttgtctacagcaaccaagagcaaaacaagtgaagacatcagccagacctccaagtacagtcccatctactcgccagacccctactatgcttcggagtctgagtactggacctaccatgggtcccccaaagtgccccgagccagaaggttctcgtctggaggagaggaggatgattttgaccgcagcatgcacaagctccaaagtggaattggccggctgattctgaaggaagaaatgaaggcccggtcgagctcctatgcagatccctggacccctccccggagctccaccagcagccgggaagccctgcacacagctggctatgagatgtccctcaatggctcccctcggtcgcactacctggctgacagtgatcctctcatctccaaatctgcctccctgcctgcctaccgaagaaatgggctgcacaggacacccagcgcagacctcttccactacgacagcatgaacgcagtcaactggggcatgcgagagtacaagatctacccttatgaactgctgctggtgactacaagaggaagaaaccgactgcccaaggatgtagacaggacccgtttagagcgccacctgtcccaggaagagttctaccaagtctttggcatgaccatctctgagtttgaccggctggccctctggaagaggaatgaactgaagaagcaagcccggctgttctaggcagaggct

SEQ ID NO: 103884 - DNA, 4178 bp, Homo sapiens
  Payload ID: 421
  Gene Symbol: ABLIM3
  Gene Name: actin binding LIM protein family, member 3
  ENST ID: ENST00000515171
  CDS Start-End: 346-801
agccgctgggcaggaatagtccggggtgcgcgcgagcaggcgctgccaaccccacttctgcccgggattccaatctgaggagcaggaggaccggggcgccggtgtcctgccgcctccttctccttgctctcacctgcgcctattagtccacgcgccttcaaggccaggggctacagcccagacagagaggggacagcagagggagagagagcacctgaggatacagagctggcactggactgccttttcaccccccaggtgatgagtgaggttcgaagaacggaagatttaaaaagcagccggggcctccgtattgaatgaaagacccagtgcaaagacatcaccatgaacactagcattccttatcagcagaatccttacaatccacggggcagctccaatgtcatccagtgctaccgctgtggagacacctgcaaaggggaagtggtccgcgtgcacaacaaccacttccacatcagatgcttcacctgtcaagtatgtggctgtggcctggcccagtcaggcttcttcttcaagaaccaggagtacatctgcacccaggactaccagcaactctatggcacccgctgtgacagctgccgggacttcatcacaggcgaagtcatctcggccctgggccgcacttaccaccccaagtgcttcgtgtgcagcttgtgcaggacatctccagggatggagagctcatccctgcctcctgctttaccttccgcatcaccatcacttgttaattcagcaagtgaagcctttccccattggagacaaggtgaccttcagcggtaaagaatgtgtgtgccaaacgtgctcccagtccatggccagcagtaagcccatcaagattcgtggaccaagccactgtgccgggtgcaaggaggagatcaagcacggccagtcactcctggctctggacaagcagtggcacgtcagctgcttcaagtgccagacctgcagcgtcatcctcaccggggagtatatcagcaaggatggtgttccatactgtgagtccgactaccatgcccagtttggcattaaatgtgagacttgtgaccgatacatcagtggcagagtcttggaggcaggagggaagcactaccacccaacctgtgccaggtgtgtacgctgccaccagatgttcaccgaaggagaggaaatgtacctcacaggttccgaggtttggcaccccatctgcaaacaggcagcccgggcagagaagaagttaaagcatagacggacatctgaaacctccatctcaccccctggatccagcattgggtcacccaaccgagtcatctgcgacatctacgagaacctggacctccggcagagacgggcctccagcccggggtacatagactcccccacctacagccggcagggcatgtcccccaccttctcccgctcacctcaccactactaccgctctggtgatttgtctacagcaaccaagagcaaaacaagtgaagacatcagccagacctccaagtacagtcccatctactcgccagacccctactatgcttcggagtctgagtactggacctaccatgggtcccccaaagtgccccgagccagaaggttctcgtctggaggagaggaggatgattttgaccgcagcatgcacaagctccaaagtggaattggccggctgattctgaaggaagaaatgaaggcccggtcgagctcctatgcagatccctggacccctccccggagctccaccagcagccgggaagccctgcacacagctggctatgagatgtccctcaatggctcccctcggtcgcactacctggctgacagtgatcctctcatctccaaatctgcctccctgcctgcctaccgaagaaatgggctgcacaggacacccagcgcagacctcttccactacgacagcatgaacgcagtcaactggggcatgcgagagtacaagatctacccttatgaactgctgctggtgactacaagaggaagaaaccgactgcccaaggatgtagacaggacccgtttagagcgccacctgtcccaggaagagttctaccaagtctttggcatgaccatctctgagtttgaccggctggccctctggaagaggaatgaactgaagaagcaagcccggctgttctaggcagaggctctataaatatatatgcatttatataaagatatatgtaaaatctctctactgaagctcggtataatcctctcttgtgtaatgggacacactgcctgccatgagacttgcttttctgtactgtcaggcaagcccacgtcatcgagatatttttatgctccttactttctcttttctaagtgctgtgggatctgggaagggatttgaggggactctgtccttttattggggatcctttttatactgaaacatctgtcctaacttgagtgccccaaggtccaactctctttcctaaagaaggtgcctgaagaagtctctcttctctctgcttcgtggcccctttcttaaatttctagggctgatgctgaccatgtggtttccacaccttattggccccagaggggccctcccatgggaagatctgcagcagtctccccaaatcagtgagcacctttgagcgcccacgaagaactttctcaacacccccaattaggagctcagtgctctcttggggcaatgcagttaaaagggtgagcctcaaatctagtcattacaccagtcaacagaagtggacagggcctaggcctctcctcagctccttaaccctcctccttctgccctggattgtaacctctcccttgtccaaatctaggattcctggtaggaaaaggaaaaggcccttcccttccctccaccacttccaactggcccctttgcctgacctggacttggagaaccagaggaaaagagagggagcggaagtgggagatggagcagggcacctgttagaatcagagctgcaggatttcttgggaccctcctctctccctcactgctcccagcacctcctgacccttccctctttcaaggagaagcccatgattgcagcttgtattctttagccttattacaatctatgtgcctgacaactcaacacaccgcagggctaatgttcccaccagagctccaactgaacaaccagacagacaactctcatcatcctccagagagaaaataggccgtgtctcaaagaaaggttcttggtctatgcctctggtctgtgggctggcagggcaaccataccatacccccgccagtcctcggctcctgctgcaaagttggccatgtttcacagggaaacttttggaagagtggctgcttatgagattccaaaatgaagtgttggccaacaccgctcatggccatcctggattttcccagtggcttcccttcctgctcgcctccctgaacaggggagaaagcttaacctctcttctcctctccaaacctttcaccttgaatgggtaatgtttggtgggggctgttccttcttggagaagccttgagtcggaccattttgagatcatggaggaaggatgaagaagtgaaaatgacaataatgactctcaagaggctggcgatgtgacatggcaaatgtagaactgacttaaattgaacaaaccctcactgagcacctctgatgttgagcacctgctgaatactgagcactgaatgggggagggggaggggagcacggggtgagtcaacctgggactcggtctcagggatatgcctaccaatagcgggtatcgtaaggcatgtacccaaacataacggatgtaaggcagaaagtgatcggagaaggaatgagaaagtgtgcgtgatgttaatgaaaagtcatatgcagctagagcagacccaggaaagctttctggaagagattgcatctgaggaaattcaggaaggatctttgtagattggggggagattctaaattgaaggggtgatggggtgaggggccagagggaagtctgctgtgttctcatgtaggatgtcagccctccctgcaacttctctttttggccaatgtcttttcactttcctgaccctttagaatcatccccagccagacgcaatcatggaagttgccttattgtcactggttaagaacttggcgagattgaagggcttttgttattgttgttggatatttttgtttcccataaaagcacatcatttcaaccctaaa

SEQ ID NO: 103885 - DNA, 2774 bp, Homo sapiens
  Payload ID: 421
  Gene Symbol: ABLIM3
  Gene Name: actin binding LIM protein family, member 3
  Uniprot ID: O94929
  ENST ID: ENST00000504238
  CDS Start-End: 276-1910
caatctgaggagcaggaggaccggggcgccggtgtcctgccgcctccttctccttgctctcacctgcgcctattagtccacgcgccttcaaggccaggggctacagcccagacagagaggggacagcagagggagagagagcacctgaggatacagagctggcactggactgccttttcaccccccaggtgatgagtgaggttcgaagaacggaagatttaaaaagcagccggggcctccgtattgaatgaaagacccagtgcaaagacatcaccatgaacactagcattccttatcagcagaatccttacaatccacggggcagctccaatgtcatccagtgctaccgctgtggagacacctgcaaaggggaagtggtccgcgtgcacaacaaccacttccacatcagatgcttcacctgtcaagtatgtggctgtggcctggcccagtcaggcttcttcttcaagaaccaggagtacatctgcacccaggactaccagcaactctatggcacccgctgtgacagctgccgggacttcatcacaggcgaagtcatctcggccctgggccgcacttaccaccccaagtgcttcgtgtgcagcttgtgcaggaagcctttccccattggagacaaggtgaccttcagcggtaaagaatgtgtgtgccaaacgtgctcccagtccatggccagcagtaagcccatcaagattcgtggaccaagccactgtgccgggtgcaaggaggagatcaagcacggccagtcactcctggctctggacaagcagtggcacgtcagctgcttcaagtgccagacctgcagcgtcatcctcaccggggagtatatcagcaaggatggtgttccatactgtgagtccgactaccatgcccagtttggcattaaatgtgagacttgtgaccgatacatcagtggcagagtcttggaggcaggagggaagcactaccacccaacctgtgccaggtgtgtacgctgccaccagatgttcaccgaaggagaggaaatgtacctcacaggttccgaggtttggcaccccatctgcaaacaggcagcccgggcagagaagaagttaaagcatagacggacatctgaaacctccatctcaccccctggatccagcattgggtcacccaaccgagtcatctgcgacatctacgagaacctggacctccggcagagacgggcctccagcccggggtacatagactcccccacctacagccggcagggcatgtcccccaccttctcccgctcacctcaccactactaccgctctggtgatttgtctacagcaaccaagagcaaaacaagtgaagacatcagccagacctccaagtacagtcccatctactcgccagacccctactatgcttcggagtctgagtactggacctaccatgggtcccccaaagtgccccgagccagaaggttctcgtctggaggagaggaggatgattttgaccgcagcatgcacaagctccaaagtggaattggccggctgattctgaaggaagaaatgaaggcccggtcgagctcctatgcagatccctggacccctccccggagctccaccagcagccgggaagccctgcacacagctggctatgagatgtccctcaatggctcccctcggtcgcactacctggctgacagtgatcctctcatctccaaatctgcctccctgcctgcctaccgaagaaatgggctgcacaggacacccagcgcagacctcttccactacgacagcatgaacgcagtcaactggggcatgcgagagtacaagatctacccttatgaactgctgctggtgactacaagaggaagaaaccgactgcccaaggatgtagacaggacccgtttagagggaaacttttggaagagtggctgcttatgagattccaaaatgaagtgttggccaacaccgctcatggccatcctggattttcccagtggcttcccttcctgctcgcctccctgaacaggggagaaagcttaacctctcttctcctctccaaacctttcaccttgaatgggtaatgtttggtgggggctgttccttcttggagaagccttgagtcggaccattttgagatcatggaggaaggatgaagaagtgaaaatgacaataatgactctcaagaggctggcgatgtgacatggcaaatgtagaactgacttaaattgaacaaaccctcactgagcacctctgatgttgagcacctgctgaatactgagcactgaatgggggagggggaggggagcacggggtgagtcaacctgggactcggtctcagggatatgcctaccaatagcgggtatcgtaaggcatgtacccaaacataacggatgtaaggcagaaagtgatcggagaaggaatgagaaagtgtgcgtgatgttaatgaaaagtcatatgcagctagagcagacccaggaaagctttctggaagagattgcatctgaggaaattcaggaaggatctttgtagattggggggagattctaaattgaaggggtgatggggtgaggggccagagggaagtctgctgtgttctcatgtaggatgtcagccctccctgcaacttctctttttggccaatgtcttttcactttcctgaccctttagaatcatccccagccagacgcaatcatggaagttgccttattgtcactggttaagaacttggcgagattgaagggcttttgttattgttgttggatatttttgtttcccataaaagcacatcatttcaaccctaaa

SEQ ID NO: 103886 - DNA, 4569 bp, Homo sapiens
  Payload ID: 421
  Gene Symbol: ABLIM3
  Gene Name: actin binding LIM protein family, member 3
  Uniprot ID: O94929
  ENST ID: ENST00000506113
  CDS Start-End: 483-2534
ggccggggcaggggcctctggctcccgacactggccgagaggtgggttccggggcgggtcgctgctccttgaagccgggcggggacgcgctgcccccgccctgcctccctgtggtccacaccccctttgggctccggagccgctgggcaggaatagtccggggtgcgcgcgagcaggcgctgccaaccccacttctgcccgggattccaatctgaggagcaggaggaccggggcgccggtgtcctgccgcctccttctccttgctctcacctgcgcctattagtccacgcgccttcaaggccaggggctacagcccagacagagaggggacagcagagggagagagagcacctgaggatacagagctggcactggactgccttttcaccccccaggtgatgagtgaggttcgaagaacggaagatttaaaaagcagccggggcctccgtattgaatgaaagacccagtgcaaagacatcaccatgaacactagcattccttatcagcagaatccttacaatccacggggcagctccaatgtcatccagtgctaccgctgtggagacacctgcaaaggggaagtggtccgcgtgcacaacaaccacttccacatcagatgcttcacctgtcaagtatgtggctgtggcctggcccagtcaggcttcttcttcaagaaccaggagtacatctgcacccaggactaccagcaactctatggcacccgctgtgacagctgccgggacttcatcacaggcgaagtcatctcggccctgggccgcacttaccaccccaagtgcttcgtgtgcagcttgtgcaggaagcctttccccattggagacaaggtgaccttcagcggtaaagaatgtgtgtgccaaacgtgctcccagtccatggccagcagtaagcccatcaagattcgtggaccaagccactgtgccgggtgcaaggaggagatcaagcacggccagtcactcctggctctggacaagcagtggcacgtcagctgcttcaagtgccagacctgcagcgtcatcctcaccggggagtatatcagcaaggatggtgttccatactgtgagtccgactaccatgcccagtttggcattaaatgtgagacttgtgaccgatacatcagtggcagagtcttggaggcaggagggaagcactaccacccaacctgtgccaggtgtgtacgctgccaccagatgttcaccgaaggagaggaaatgtacctcacaggttccgaggtttggcaccccatctgcaaacaggcagcccgggcagagaagaagttaaagcatagacggacatctgaaacctccatctcaccccctggatccagcattgggtcacccaaccgagtcatctgcgctaaagtggataatgagatccttaattacaaagacctggcggctctccccaaggttaagtctatctacgaggtacaacgccccgacctcatttcctatgagcctcattccagatacatgtccgacgagatgctggagagatgtggctatggagagtcgctgggaacattatctccctactcccaggacatctacgagaacctggacctccggcagagacgggcctccagcccggggtacatagactcccccacctacagccggcagggcatgtcccccaccttctcccgctcacctcaccactactaccgctctgggcccgagagtggccggagctctccataccatagccagttagatgtgaggtcctccactccaacctcttaccaggctcccaagcactttcacatcccagctggagacagtaacatctaccggaaacccccgatctacaaacggcatggtgatttgtctacagcaaccaagagcaaaacaagtgaagacatcagccagacctccaagtacagtcccatctactcgccagacccctactatgcttcggagtctgagtactggacctaccatgggtcccccaaagtgccccgagccagaaggttctcgtctggaggagaggaggatgattttgaccgcagcatgcacaagctccaaagtggaattggccggctgattctgaaggaagaaatgaaggcccggtcgagctcctatgcagatccctggacccctccccggagctccaccagcagccgggaagccctgcacacagctggctatgagatgtccctcaatggctcccctcggtcgcactacctggctgacagtgatcctctcatctccaaatctgcctccctgcctgcctaccgaagaaatgggctgcacaggacacccagcgcagacctcttccactacgacagcatgaacgcagtcaactggggcatgcgagagtacaagatctacccttatgaactgctgctggtgactacaagaggaagaaaccgactgcccaaggatgtagacaggacccgtttagagcgccacctgtcccaggaagagttctaccaagtctttggcatgaccatctctgagtttgaccggctggccctctggaagaggaatgaactgaagaagcaagcccggctgttctaggcagaggctctataaatatatatgcatttatataaagatatatgtaaaatctctctactgaagctcggtataatcctctcttgtgtaatgggacacactgcctgccatgagacttgcttttctgtactgtcaggcaagcccacgtcatcgagatatttttatgctccttactttctcttttctaagtgctgtgggatctgggaagggatttgaggggactctgtccttttattggggatcctttttatactgaaacatctgtcctaacttgagtgccccaaggtccaactctctttcctaaagaaggtgcctgaagaagtctctcttctctctgcttcgtggcccctttcttaaatttctagggctgatgctgaccatgtggtttccacaccttattggccccagaggggccctcccatgggaagatctgcagcagtctccccaaatcagtgagcacctttgagcgcccacgaagaactttctcaacacccccaattaggagctcagtgctctcttggggcaatgcagttaaaagggtgagcctcaaatctagtcattacaccagtcaacagaagtggacagggcctaggcctctcctcagctccttaaccctcctccttctgccctggattgtaacctctcccttgtccaaatctaggattcctggtaggaaaaggaaaaggcccttcccttccctccaccacttccaactggcccctttgcctgacctggacttggagaaccagaggaaaagagagggagcggaagtgggagatggagcagggcacctgttagaatcagagctgcaggatttcttgggaccctcctctctccctcactgctcccagcacctcctgacccttccctctttcaaggagaagcccatgattgcagcttgtattctttagccttattacaatctatgtgcctgacaactcaacacaccgcagggctaatgttcccaccagagctccaactgaacaaccagacagacaactctcatcatcctccagagagaaaataggccgtgtctcaaagaaaggttcttggtctatgcctctggtctgtgggctggcagggcaaccataccatacccccgccagtcctcggctcctgctgcaaagttggccatgtttcacagggaaacttttggaagagtggctgcttatgagattccaaaatgaagtgttggccaacaccgctcatggccatcctggattttcccagtggcttcccttcctgctcgcctccctgaacaggggagaaagcttaacctctcttctcctctccaaacctttcaccttgaatgggtaatgtttggtgggggctgttccttcttggagaagccttgagtcggaccattttgagatcatggaggaaggatgaagaagtgaaaatgacaataatgactctcaagaggctggcgatgtgacatggcaaatgtagaactgacttaaattgaacaaaccctcactgagcacctctgatgttgagcacctgctgaatactgagcactgaatgggggagggggaggggagcacggggtgagtcaacctgggactcggtctcagggatatgcctaccaatagcgggtatcgtaaggcatgtacccaaacataacggatgtaaggcagaaagtgatcggagaaggaatgagaaagtgtgcgtgatgttaatgaaaagtcatatgcagctagagcagacccaggaaagctttctggaagagattgcatctgaggaaattcaggaaggatctttgtagattggggggagattctaaattgaaggggtgatggggtgaggggccagagggaagtctgctgtgttctcatgtaggatgtcagccctccctgcaacttctctttttggccaatgtcttttcactttcctgaccctttagaatcatccccagccagacgcaatcatggaagttgccttattgtcactggttaagaacttggcgagattgaagggcttttgttattgttgttggatatttttgtttcccataaaagcacatcatttcaaccctaaa

SEQ ID NO: 103887 - DNA, 2287 bp, Homo sapiens
  Payload ID: 421
  Gene Symbol: ABLIM3
  Gene Name: actin binding LIM protein family, member 3
  Uniprot ID: O94929
  ENST ID: ENST00000517451
  CDS Start-End: 1725-2234
ctaagcctcgattgaaggagcacatcccttccattgaagctgcagaggagcagctgccaccctgtgcacccacacttgcttaagggtctagctggataacaaaaggaggcccagaatcggtggagcttggagatgagcgaagcagtcctgcaccaggttctgaactaattagctggtggaggggacaatacgagtttaaacagcggctctgggtgcctaagattctacattttatacagacatccttggttccagagggggctgagcaggggggtccgaggtgagtctgtgagcatgtgcaagtctgtaccagcttgtgaaggacatgccatgtcccctgagtactcatagaaagacaccaacatgacaaaggtagtttggctttatacctagaaaaggcccccaggtcacaagcttctcaggactttgtgggattttccaggtgggccctgaggggtggcactaaagcagactcaagaggagtctggggtggaggtgggttgcttggaaaagagggcggaggaaaaagctaaatgcagtcagccaggaggggctgcccaggacccaagtcaaagagaagaatttgaaagctttggaagcaagtgctgttgtgggggctgcatagcccagggctggctgaagctgatccaccacgctctgccactctggctccacagagcacagagcttgtccctaaagcttcctgtagctgaccatgagaaatggtcatgcagccacacacacttccccagcccctctctctgctctaccagcctgtcacccacgtttgggccacgagaagtcactgctctgtaagtagttgtgactgcagtgggtctttttggtcacccctgtcctgggcttacttcaggtggaagcttgaagctggatggcagctgagccagcagaccgattctgacacttacagatgaggaaactaaggcagagatggtaggacctgcccagtgttacagctgagtaaagtggcagagctgggaccagaacccaggtttgctgactccctgtctagcactccttccttcaggctatgtagtccctgagcagaatgtggcatctcaggttgtgagaaatgatggagttcaaatttataacaaggaaggcttctaaagggctaggaaggcttctaaagggctggggctcacctgggacctgtccagtcttatttgaggagccacacccttagaggtcattctggaacagacctgggaatccatggaatgtgctggaaagagccctgggctgggatctggtccagttctggtgctcacatgctatgtggtcttaagcaagccccttcccctctctggtgctccaattactaaatgcaaaatgagggtttggccccagtgcttttccagctccgatgctccatggcccagttctaacagagagccctgatcttgaagtggactcactcccctgggctggagcctggtaaagataggaaaagggtacacagtcccatcccggtcactctgccttcctgaagtgctctccttgggtcctctgcaggtgatttgtctacagcaaccaagagcaaaacaagtgaagacatcagccagacctccaagtacagtcccatctactcgccagacccctactatgcttcggagtctgagtactggacctaccatgggtcccccaaagtgccccgagccagaaggttctcgtctggaggagaggaggatgattttgaccgcagcatgcacaagctccaaagtggaattggccggctgattctgaaggaagaaatgaaggcccggtcgagctcctatgcagatccctggacccctccccggagctccaccagcagccgggaagccctgcacacagctggctatgagatgtccctcaatggctcccctcggtcgcactacctggctgacagtgatcctctcatctccaaatctgcctccctgcctgcctaccgaagaaatgggctgcacaggacacccagcgcagacctcttccactacgacagcatgaacgcagtcaactggggcatgcgagagtacaagatctacccttatgaactgctgctggtgactacaagaggaagaaaccgactgcccaaggatgtagacaggacccgtttagagcgccacctgtcccaggaagagttctaccaagtctttggcatgaccatctctgagtttgaccggctggccctctggaagaggaatgaactgaagaagcaagcccggctgttctaggcagaggctctataaatatatatgcatttatataaagatatatgtaaaatctc

SEQ ID NO: 103888 - DNA, 2755 bp, Homo sapiens
  Payload ID: 422
  Gene Symbol: ABRA
  Gene Name: actin binding Rho activating protein
  Uniprot ID: Q8N0Z2
  ENST ID: ENST00000311955
  CDS Start-End: 56-1201
cacactcattttagccagtgtccaggctatcagcagagaaagacaggtgggcagcatggctccgggcgaaaaggaaagcggggagggcccagccaagagcgccctccggaagatacgcacagccaccctggtcatcagcttggcccgaggttggcagcagtgggcgaatgagaacagcatcaggcaggcccaggagcctacaggctggctgccgggagggacccaggactcacctcaagctcctaaaccaatcacaccccctacttcacaccagaaagctcagagtgccccaaagtcgccaccccgcctgccagaaggacatggagatggacaaagctcagagaaagcccctgaggtttctcacatcaaaaagaaagaggtgtccaaaacggtggtcagcaagacttatgagagaggaggggacgtgagccacctcagccacaggtacgagagggatgctggtgtgcttgaacctgggcagccagagaatgacattgacagaatcctccacagccacggctccccaacgcggaggagaaaatgtgccaacctggtgtctgagctaaccaagggctggagagtgatggagcaggaggagcccacatggaggagtgacagcgtagacacagaggacagcggctatggaggagaggctgaggagaggcccgagcaggatggagtgcaggtggctgtggtcaggatcaagcgccccttgccctcccaggtaaacagatttacagagaaactcaactgcaaagcccaacagaaatatagcccagtgggcaacttgaaagggagatggcagcagtgggctgatgaacacatacaatcccagaagctcaatcctttcagtgaagagtttgattacgagctggccatgtccacccgcctacacaaaggagatgagggctatggccgccccaaagaaggaaccaaaactgctgaaagggccaagcgtgctgaggagcacatctacagggaaatgatggacatgtgcttcattatctgcacaatggctcgccacagacgagatggcaagatccaggttacttttggagatctctttgacagatacgttcgtatttcagataaagtagtgggcattctcatgcgtgccaggaaacatggactggtagactttgaaggagagatgctatggcaaggccgagatgaccatgttgtgattacgctactcaagtgaaccttcaaaaacaaaagccaaatttggcccactatggtcttaatgctaaatgctcatgtaggtaaaatgaaaatgcaaactctctgtaataagttagtaaatattaaacaatttttacataaacgactttctggcattctatttctatctagaatgaggaattttggagattttgagaaggcacaaagcatttcagaaagcacatagaatgttaatgtataataatagtattaatagttgaaattccacagggtgtttttgtttttgttttgagacagattctctttatgtcaccaaagctggtcttttaactcctggcctcaagtgatcctctcacctcagcctcccaagtagctgggattataggcatgagcaacagcacccagccacttgtatattttaggcaaaatatttagctagtcattgtagaaactactatagatttttaattaaacattacatctaagaagaatgctgacttgagataaatatcagtagaacatataataatgtgtctttatttggaaaaaagaaaataccattaagtttggtaaaactaaacttaaaattttttcagaagcttgactttgtattattgtttatatcatagcatcacttacaaaacaagcacatatataaaaagttgtcaagatgttgctgaaattgttgaagttcctctgtgggcttggattctaacaggtttccagtaagagttcaccttcctcttgtttgatttcagcaaatcacataaaaacagacacttcctgtcttagtaccaacaaaggaaggcacaccctcactaaaagtagagcagaggtgagagattcagatttacttgcctttgtaggacttcttggagaagtttattgtttcattacatgtcagcatataacgagtcaagctgcttgcattaacatcaatgcaatgatatgtatttctccaacaatggagaaatacagaaaatctatgaagtggaatgttcagtattagaaaaatcccatagaatcattggtgaattaaaaacagatttgagacagtttaatgttcctcatactgtaacaaagaaaactttatgaaatgtttaagtcataaaactgcaatattagttctgccaaagtaaaaaatatacaatgatgatggcaaggagaaaatcattggacattaatgtgcctatgtgatcttaaaaacaaatggaatggaatgtgagattgcaattcttactggattcaatgaaattactaaaatgcattgatagtatagcactttggtgttaaatgtaaaaattaatgtctaaatatgatacctcaaaataataggtattagactgctataagaattatatttgttttcatgtatgagtctctttcaaactgaaggttctggtatcttaagaaagtatgcgtattttgtttccataccgtatttataaagctataagttaatgaccaatatttctaagtaggatttcatgtaagatgcacacttctattacaagtgaaacctacgccaaatgttaaagacaaatagcataagaataaaagatgttttcttgta

SEQ ID NO: 103889 - DNA, 7516 bp, Homo sapiens
  Payload ID: 423
  Gene Symbol: AFAP1
  Gene Name: actin filament associated protein 1
  Uniprot ID: Q8N556
  ENST ID: ENST00000358461
  CDS Start-End: 274-2466
gggcgcccggctccgctgggggcgggacggcgggcggcgggcggggccgtgtgcgcctgcgtggtgtctgtcccggccgcagccccacgccggctgcagctccgcgagccgagccggatctcgagcggggtacacgggctgaggcggcggcggcggccccgccccggggctccattgttaaggcggctgcggctctgtcggctgttcagctgcgctccagtcggcccaggcgccgcggcgaggagcgagcgctgcgaggtggcggcctgagcaatggaagagttaatagttgaacttcgtctctttcttgaactcctggaccatgaatatctaacctcaactgtcagggagaaaaaggcagtgataaccaacattctgctaagaatacagtcatccaaaggttttgatgtgaaggaccatgctcagaagcaggagaccgctaacagcctgccagcccctcctcagatgcccctgccggagatccctcagccctggctgcctcctgacagtgggcctccaccattgccaacatcctccctcccagaaggttattatgaggaagctgtgccgctgagccccggaaaagctccggaatacatcacatcaaattatgattccgatgcgatgagcagctcttatgagtcgtatgatgaagaggaggaggatgggaaggggaagaaaacccggcaccagtggccctccgaggaggcctccatggacctggtcaaggacgccaaaatctgcgccttcctgctgcggaagaagcggttcggccagtggaccaagttgctctgcgtcatcaaagacaccaaactgctgtgctataaaagttccaaggaccagcagcctcagatggaactgccactccaaggctgtaacattacgtacatcccgaaagacagcaaaaagaagaagcacgagctgaagattactcagcagggcacggacccgcttgttctcgccgtccagagcaaggaacaggccgagcagtggctgaaggtgatcaaagaagcctacagtggttgtagtggccccgtggattcagagtgtcctcctccaccaagctccccggtgcacaaggcagaactggagaagaaactgtcttcagagagacccagctcagatggggagggtgttgtggaaaatggaattaccacatgtaatggaaaggagcaagtgaagaggaagaaaagttccaaatcagaggccaagggcactgtgtcgaaagtcactgggaaaaaaatcaccaagatcatcagtctgggaaagaaaaagccgtccacagacgagcagacctcctcagctgaggaagatgttcccacctgcggctatctgaacgtgctctccaacagccgctggcgagagcgctggtgccgagtgaaagataacaagctcattttccacaaggacaggaccgacctgaagacccatattgtgtctattccgctccgtggctgcgaggtgatcccgggtttggattctaaacatcctctgacgttccggctgctgcgcaacggccaggaggttgcagtattggaggcatcttcttctgaagacatgggcaggtggattgggattttactcgcagagacgggatcgtccacagacccggaggctctgcactatgactacattgatgtggagatgtctgcaagtgtcattcagacagccaaacagaccttctgtttcatgaacaggcgtgttatatctgctaacccatatctagggggcacctccaacggctatgcccaccccagcgggacggcacttcattatgacgatgtcccgtgcatcaacggctcgctcaagggtaaaaagccccccgtggcgtctaatggggtcacaggaaaagggaagactctgagcagtcagccaaagaaagcggatcccgcggctgttgtgaaaaggacgggttcgaatgctgcccagtacaagtatggcaagaaccgggtagaagcagatgccaagcggctacagaccaaagaggaggagctgctgaagaggaaagaggccctgcggaataggctggcccagctccgcaaggaaagaaaagaccttcgagcggctattgaagtgaacgccggcaggaagccgcaggcgatcctggaggagaagctgaagcagctggaggaggagtgccggcagaaggaggcggagcgtgtcagcctggagctggagctgacggaggtcaaggagagcctgaagaaagcgctggcgggcggagtcaccctggggctggccatcgagcccaagtcagggacatcgagtccacagtctccagtgttccggcaccggaccctggaaaactcgcccatctccagctgtgacaccagtgacaccgagggccccgtgccggtgaacagcgcggccgtcttgaagaagagccaggctgccccgggcagctccccctgccgagggcatgtgctgcggaaggccaaggaatgggaattgaagaacgggacctaggggacagcagcaccactccagcctcagagactgcacacccccttgcctgtatcctcatctgtgtgacggcaggaagctctgcccagagtggcctcagctgcacgactccagaggctccacgactgagctctgaggccagtgcctgtcccccaggcccacttgtattctttctactgtaaaatggcgcctttaaaaaagatgtaagactttggttcccaactttgttaaaaaacaaaaaaagtgatggaaaggtgtttgaaaggatgctatcaggcgaagtgacatctttctaaccagataggccattgctttcaccgattccaacccagccctggactgaggatggatggttccatgagcccccagatgaaaacctggattcgacagggaagagcttggatccccggctgccccgggcatgagtgtggctggccatgggcactgggctcgccttgcacgcccaccaggagggccaggggcatacgcagtcctgacgtggactttgtgtcttggcgtaccctctccacgtgcccgtccccctcgtcatcagaggtaaaggcatgagaaaatcgcgctgtgaaacgttttttaccttttattattattttttggacagatgcttttgtcaccaagacatgaaaagctgccattcttcttaacctgttttttaggaatgtctttttactgtgtgtcacacttagatcaaggagttttcagaggttccttattttattaattaattatttgtgctgcttttgacaggtagcagagggttttaatacttcactaacagtacaccctcctcccccttgggctagcatccccagcccttaatccacgtcggagccggcaggtgcttctcacaccaggagcctctgggggcaggggctggctcctcgccgctgtacaggacgtttactgctgcttggggccagggcagtcctttgaaagggaagcaagttccggaatttgttcgctcatggaactataacaccttagagcaagaggcaggaattccagggcctcctgcccctccccttcctccagcttgtcaagttaaaccactaatgtgttggtgggcctggccgtgctgcctctcctgagtagggtgggtgcaagtagggcctctttcccagctttcttgcttgccttctgtgcaatatttcttggagaatttggatgcctaaggcataaaggaaaaaaacagagttcatagtttgagctggtatttaccccctgggtttaaaaatcagattaacttcttggtctcccggaggctgctgtcaggaattctccagtacgggaagatgcagtcacttatgacgaaataagtcacccctgaacgcctccgcaggcagattcatggagaccagtcccagtagcaaccgccccttccccaagcatagaatacagaggtgccatacttggtgtaagccttccttctgtccactgtccagaatgtcctttttcacacagaggaagagatggcgggaaaacactgactgactccttgggtttcccccagacatactttcagagcgctagctgtgtggtgcacgggactttacagttaggattcatgtttaaggtggtggcgcttgaggcctgcaagggccacgttggattactgaagcggaaagcggtctcccatgtataagaaaaagttttacaacacgaattggaagctgcttgagtccacctgaacttgaattgattgcaaagccatctgctgggaacggttttgggttcctgagccatcagccagcctttctttcccctctgatgcacgttcctcccggcctagtccgtggaggcccatcacaccagcatccgtgacgccagcttcccactaggacatccaggcaggtcgggcggggacgccacacacctcagggccgtccgctgcattgccatagaggagccctccctccagtggtcacttcccaccattgcaggcagacttcccaccattgcaggcagctgggcccacttcatatcacacaaaatgaattttctataaagggaaaaaagtttgctcctccatagatttttgctgccttcgggtcaaatagtttccctggttgacactcttgggccactctgattggcagcctgctttgccaaagagaactgtgtgaggttttggtggttagtaagagaagggggagatggccagcctgaagtcacggtcctggcccagcacaggtgggcagcagcgagctggcaggtgaagtgtgagcagcacgcaaagtgtcacgtgggccttagccgtcacccaccagcttcctcaccaggcaaggaggccccggagccttagcagggacttgcccaacggcacagctgattggtgctcgactcccagcatgcatattttgttgtaaaaacccaggtttgtaattcacatccacaaccctaagccttttaaagcggaggcaaacgttaacaaaccccatcgtggtccatggagcctttcaaaatgggtgccctggaggggcctgacagtgggttccttccatggcggatactcccttgaaatttcacattccatcaaagtttaaagcatttacttcagaataagttatttatgtgtatatgttcaataaatatagtttttaatttatatctgtacatattagacacacgcgagccatcttgccagaattctgacagtgatgtcattttattcccctcccaaaacatgccccaggaacaagcaccccttgcctctgtggcagctgcgagtgtgtctgatttcataacgaagccaggctgagggcaagaggcccgacaggcaggccagggtccccggagaagccggatttcttcgcaatgtcactggtacttagcagatggtcgtgttcacaggggctagccacctgtactacggtgccgaccgcaatgcgaggaatgtggtggccacgcgatggagctggccggaggacaggtcaggtgagggggccgacccctgcggggctcagggctccttccattctaaccttgagccacagtgtcactcttcagggctctgctcctggctctattttgttaaggtgtcatcagccttcaacctccatttatatatttttataatgttaagccactgaccaactttttcatagaaacaactatcagattcgagggctccctttgtccccctgacctgggcacaggcatgggcgatggctccctcttcccagaatctgcggggaactggggcaaggcccatctgtctgcaaggctggtagctctctccctcggcttccagagtccacggcagttgcaaggtaaccagtgtggatctgctgagtcaccccaggcaccagacttaccccaggagcatgggccactgtccatggggccttccttgagaccttcccttggggctggcgggcggcggcttaccagctgggtcagtcccatctcgcccctctgtgcctatgccctggcgttgccaggcttaaccttcccctgtatcttactcatcccagaattattactggccatttctaaatagacaaaaactaccctaaaatgtggagatttactccttttgaaaagtctgtttcaaaaagtgtggcctcagctctggaggccacccccaggaaggagtttgaggttcattgtcattatggccacagtttggtgcttgtgcacgggactcaaagggcagcgtcgaagctggggttaggtgtagggttgtgagcaaagctcccctgtttgtggccacaccttccctttccaaaaaggctattaattctactcacccactatttggggggatgtaaattttgcccacagactttgccacccaggtgaggtgctgtgttcatgcacggaactgatgtcattagacaccatccaaggatgggcagcctgcagtgtggccggcgactgccatccagagaaaaggcaccttgtgccacagggcggggccgacaccctgagctcacaggtggcccctgcattcaggtggatgtccatccttgaaacagcctcttctgggaacacagcactggaggtctccaggcatcagggttggccggcagggtgccctgcagcttacataaaggtcgtggcaatgtttcaatgttaaactaaactattgccttcctcttacttttcctaaaatgattttctaatgggaacagtcacttcaagttcatgacatagtttgaaggaggataattcattttttcctggttgtcactgtcttcttatccccttggtgggctgggttcatactgtgaaataaactaaaatgaaaccaaaacgttcctgccgtaaatacgtggcacagcactgcagaaaaagcagtcacctctattcgtgagtccccaagccatagcagggcgtctgtaaaagaagggaaactgcacccaggaagtggtgggcgtcagacgcatcctttcgcccgtagttcatgaaatagttccggctttggtcttccagaaaatctcaacttcaccgtgcacaagtgttaccgggtctttttagtgtagccatggaagatactttcaaaaggacatcttcagatcataagtcttaggaccaaaggtgtttttaatgagataatctttttgattttctaacaagaaaggaaatattcactttacattttaacatcaacttttaagtgatattcagaattaattgaccatggtgatacgttgtaaaatgttttcatattaagaatgtaattatttccttattgtattttttaaaagctaaagtcatatttaaaattctctttgaaagaaacaggcaaagaaacagcaaagatttttttaaattaaatatgttagtagtgcccacttcaaatgactgtaaatatattttcactgtttctcaatgtatttaattcataaagtaaaaattttatgaaaagaaacttgcaaggaaaatcctagttttcagtccactcgccccactttgtagtagcttcactgaatttcctgctttcctggttgaattttctactgtttcacgtggtgtaaccctagactggcgcccttggcgtgcccctttgtgtatgaataaacttctctccccc

SEQ ID NO: 103890 - DNA, 7479 bp, Homo sapiens
  Payload ID: 423
  Gene Symbol: AFAP1
  Gene Name: actin filament associated protein 1
  Uniprot ID: Q8N556
  ENST ID: ENST00000360265
  CDS Start-End: 236-2428
ctcccagttgaattttgctgccttaaagcagaagcaaaggagtagtgcatttgttaagaagaagacgcctgaatcttttagtggacctgctttcagcaaacttgttttttaggtcagaatactatatccaatgatcaagctaaacatgaaatgcttcgagtaagactcagtattcatactttgacatttgcaaatcactgggtctaataatactcttcctcttttgttgtcagcaatggaagagttaatagttgaacttcgtctctttcttgaactcctggaccatgaatatctaacctcaactgtcagggagaaaaaggcagtgataaccaacattctgctaagaatacagtcatccaaaggttttgatgtgaaggaccatgctcagaagcaggagaccgctaacagcctgccagcccctcctcagatgcccctgccggagatccctcagccctggctgcctcctgacagtgggcctccaccattgccaacatcctccctcccagaaggttattatgaggaagctgtgccgctgagccccggaaaagctccggaatacatcacatcaaattatgattccgatgcgatgagcagctcttatgagtcgtatgatgaagaggaggaggatgggaaggggaagaaaacccggcaccagtggccctccgaggaggcctccatggacctggtcaaggacgccaaaatctgcgccttcctgctgcggaagaagcggttcggccagtggaccaagttgctctgcgtcatcaaagacaccaaactgctgtgctataaaagttccaaggaccagcagcctcagatggaactgccactccaaggctgtaacattacgtacatcccgaaagacagcaaaaagaagaagcacgagctgaagattactcagcagggcacggacccgcttgttctcgccgtccagagcaaggaacaggccgagcagtggctgaaggtgatcaaagaagcctacagtggttgtagtggccccgtggattcagagtgtcctcctccaccaagctccccggtgcacaaggcagaactggagaagaaactgtcttcagagagacccagctcagatggggagggtgttgtggaaaatggaattaccacatgtaatggaaaggagcaagtgaagaggaagaaaagttccaaatcagaggccaagggcactgtgtcgaaagtcactgggaaaaaaatcaccaagatcatcagtctgggaaagaaaaagccgtccacagacgagcagacctcctcagctgaggaagatgttcccacctgcggctatctgaacgtgctctccaacagccgctggcgagagcgctggtgccgagtgaaagataacaagctcattttccacaaggacaggaccgacctgaagacccatattgtgtctattccgctccgtggctgcgaggtgatcccgggtttggattctaaacatcctctgacgttccggctgctgcgcaacggccaggaggttgcagtattggaggcatcttcttctgaagacatgggcaggtggattgggattttactcgcagagacgggatcgtccacagacccggaggctctgcactatgactacattgatgtggagatgtctgcaagtgtcattcagacagccaaacagaccttctgtttcatgaacaggcgtgttatatctgctaacccatatctagggggcacctccaacggctatgcccaccccagcgggacggcacttcattatgacgatgtcccgtgcatcaacggctcgctcaagggtaaaaagccccccgtggcgtctaatggggtcacaggaaaagggaagactctgagcagtcagccaaagaaagcggatcccgcggctgttgtgaaaaggacgggttcgaatgctgcccagtacaagtatggcaagaaccgggtagaagcagatgccaagcggctacagaccaaagaggaggagctgctgaagaggaaagaggccctgcggaataggctggcccagctccgcaaggaaagaaaagaccttcgagcggctattgaagtgaacgccggcaggaagccgcaggcgatcctggaggagaagctgaagcagctggaggaggagtgccggcagaaggaggcggagcgtgtcagcctggagctggagctgacggaggtcaaggagagcctgaagaaagcgctggcgggcggagtcaccctggggctggccatcgagcccaagtcagggacatcgagtccacagtctccagtgttccggcaccggaccctggaaaactcgcccatctccagctgtgacaccagtgacaccgagggccccgtgccggtgaacagcgcggccgtcttgaagaagagccaggctgccccgggcagctccccctgccgagggcatgtgctgcggaaggccaaggaatgggaattgaagaacgggacctaggggacagcagcaccactccagcctcagagactgcacacccccttgcctgtatcctcatctgtgtgacggcaggaagctctgcccagagtggcctcagctgcacgactccagaggctccacgactgagctctgaggccagtgcctgtcccccaggcccacttgtattctttctactgtaaaatggcgcctttaaaaaagatgtaagactttggttcccaactttgttaaaaaacaaaaaaagtgatggaaaggtgtttgaaaggatgctatcaggcgaagtgacatctttctaaccagataggccattgctttcaccgattccaacccagccctggactgaggatggatggttccatgagcccccagatgaaaacctggattcgacagggaagagcttggatccccggctgccccgggcatgagtgtggctggccatgggcactgggctcgccttgcacgcccaccaggagggccaggggcatacgcagtcctgacgtggactttgtgtcttggcgtaccctctccacgtgcccgtccccctcgtcatcagaggtaaaggcatgagaaaatcgcgctgtgaaacgttttttaccttttattattattttttggacagatgcttttgtcaccaagacatgaaaagctgccattcttcttaacctgttttttaggaatgtctttttactgtgtgtcacacttagatcaaggagttttcagaggttccttattttattaattaattatttgtgctgcttttgacaggtagcagagggttttaatacttcactaacagtacaccctcctcccccttgggctagcatccccagcccttaatccacgtcggagccggcaggtgcttctcacaccaggagcctctgggggcaggggctggctcctcgccgctgtacaggacgtttactgctgcttggggccagggcagtcctttgaaagggaagcaagttccggaatttgttcgctcatggaactataacaccttagagcaagaggcaggaattccagggcctcctgcccctccccttcctccagcttgtcaagttaaaccactaatgtgttggtgggcctggccgtgctgcctctcctgagtagggtgggtgcaagtagggcctctttcccagctttcttgcttgccttctgtgcaatatttcttggagaatttggatgcctaaggcataaaggaaaaaaacagagttcatagtttgagctggtatttaccccctgggtttaaaaatcagattaacttcttggtctcccggaggctgctgtcaggaattctccagtacgggaagatgcagtcacttatgacgaaataagtcacccctgaacgcctccgcaggcagattcatggagaccagtcccagtagcaaccgccccttccccaagcatagaatacagaggtgccatacttggtgtaagccttccttctgtccactgtccagaatgtcctttttcacacagaggaagagatggcgggaaaacactgactgactccttgggtttcccccagacatactttcagagcgctagctgtgtggtgcacgggactttacagttaggattcatgtttaaggtggtggcgcttgaggcctgcaagggccacgttggattactgaagcggaaagcggtctcccatgtataagaaaaagttttacaacacgaattggaagctgcttgagtccacctgaacttgaattgattgcaaagccatctgctgggaacggttttgggttcctgagccatcagccagcctttctttcccctctgatgcacgttcctcccggcctagtccgtggaggcccatcacaccagcatccgtgacgccagcttcccactaggacatccaggcaggtcgggcggggacgccacacacctcagggccgtccgctgcattgccatagaggagccctccctccagtggtcacttcccaccattgcaggcagacttcccaccattgcaggcagctgggcccacttcatatcacacaaaatgaattttctataaagggaaaaaagtttgctcctccatagatttttgctgccttcgggtcaaatagtttccctggttgacactcttgggccactctgattggcagcctgctttgccaaagagaactgtgtgaggttttggtggttagtaagagaagggggagatggccagcctgaagtcacggtcctggcccagcacaggtgggcagcagcgagctggcaggtgaagtgtgagcagcacgcaaagtgtcacgtgggccttagccgtcacccaccagcttcctcaccaggcaaggaggccccggagccttagcagggacttgcccaacggcacagctgattggtgctcgactcccagcatgcatattttgttgtaaaaacccaggtttgtaattcacatccacaaccctaagccttttaaagcggaggcaaacgttaacaaaccccatcgtggtccatggagcctttcaaaatgggtgccctggaggggcctgacagtgggttccttccatggcggatactcccttgaaatttcacattccatcaaagtttaaagcatttacttcagaataagttatttatgtgtatatgttcaataaatatagtttttaatttatatctgtacatattagacacacgcgagccatcttgccagaattctgacagtgatgtcattttattcccctcccaaaacatgccccaggaacaagcaccccttgcctctgtggcagctgcgagtgtgtctgatttcataacgaagccaggctgagggcaagaggcccgacaggcaggccagggtccccggagaagccggatttcttcgcaatgtcactggtacttagcagatggtcgtgttcacaggggctagccacctgtactacggtgccgaccgcaatgcgaggaatgtggtggccacgcgatggagctggccggaggacaggtcaggtgagggggccgacccctgcggggctcagggctccttccattctaaccttgagccacagtgtcactcttcagggctctgctcctggctctattttgttaaggtgtcatcagccttcaacctccatttatatatttttataatgttaagccactgaccaactttttcatagaaacaactatcagattcgagggctccctttgtccccctgacctgggcacaggcatgggcgatggctccctcttcccagaatctgcggggaactggggcaaggcccatctgtctgcaaggctggtagctctctccctcggcttccagagtccacggcagttgcaaggtaaccagtgtggatctgctgagtcaccccaggcaccagacttaccccaggagcatgggccactgtccatggggccttccttgagaccttcccttggggctggcgggcggcggcttaccagctgggtcagtcccatctcgcccctctgtgcctatgccctggcgttgccaggcttaaccttcccctgtatcttactcatcccagaattattactggccatttctaaatagacaaaaactaccctaaaatgtggagatttactccttttgaaaagtctgtttcaaaaagtgtggcctcagctctggaggccacccccaggaaggagtttgaggttcattgtcattatggccacagtttggtgcttgtgcacgggactcaaagggcagcgtcgaagctggggttaggtgtagggttgtgagcaaagctcccctgtttgtggccacaccttccctttccaaaaaggctattaattctactcacccactatttggggggatgtaaattttgcccacagactttgccacccaggtgaggtgctgtgttcatgcacggaactgatgtcattagacaccatccaaggatgggcagcctgcagtgtggccggcgactgccatccagagaaaaggcaccttgtgccacagggcggggccgacaccctgagctcacaggtggcccctgcattcaggtggatgtccatccttgaaacagcctcttctgggaacacagcactggaggtctccaggcatcagggttggccggcagggtgccctgcagcttacataaaggtcgtggcaatgtttcaatgttaaactaaactattgccttcctcttacttttcctaaaatgattttctaatgggaacagtcacttcaagttcatgacatagtttgaaggaggataattcattttttcctggttgtcactgtcttcttatccccttggtgggctgggttcatactgtgaaataaactaaaatgaaaccaaaacgttcctgccgtaaatacgtggcacagcactgcagaaaaagcagtcacctctattcgtgagtccccaagccatagcagggcgtctgtaaaagaagggaaactgcacccaggaagtggtgggcgtcagacgcatcctttcgcccgtagttcatgaaatagttccggctttggtcttccagaaaatctcaacttcaccgtgcacaagtgttaccgggtctttttagtgtagccatggaagatactttcaaaaggacatcttcagatcataagtcttaggaccaaaggtgtttttaatgagataatctttttgattttctaacaagaaaggaaatattcactttacattttaacatcaacttttaagtgatattcagaattaattgaccatggtgatacgttgtaaaatgttttcatattaagaatgtaattatttccttattgtattttttaaaagctaaagtcatatttaaaattctctttgaaagaaacaggcaaagaaacagcaaagatttttttaaattaaatatgttagtagtgcccacttcaaatgactgtaaatatattttcactgtttctcaatgtatttaattcataaagtaaaaattttatgaaaagaaacttgcaaggaaaatcctagttttcagtccactcgccccactttgtagtagcttcactgaatttcctgctttcctggttgaattttctactgtttcacgtggtgtaaccctagactggcgcccttggcgtgcccctttgtgtatgaataaacttctctccccca

SEQ ID NO: 103891 - DNA, 2590 bp, Homo sapiens
  Payload ID: 423
  Gene Symbol: AFAP1
  Gene Name: actin filament associated protein 1
  Uniprot ID: Q8N556
  ENST ID: ENST00000382543
  CDS Start-End: 5-2449
agcaatggaagagttaatagttgaacttcgtctctttcttgaactcctggaccatgaatatctaacctcaactgtcagggagaaaaaggcagtgataaccaacattctgctaagaatacagtcatccaaaggttttgatgtgaaggaccatgctcagaagcaggagaccgctaacagcctgccagcccctcctcagatgcccctgccggagatccctcagccctggctgcctcctgacagtgggcctccaccattgccaacatcctccctcccagaaggttattatgaggaagctgtgccgctgagccccggaaaagctccggaatacatcacatcaaattatgattccgatgcgatgagcagctcttatgagtcgtatgatgaagaggaggaggatgggaaggggaagaaaacccggcaccagtggccctccgaggaggcctccatggacctggtcaaggacgccaaaatctgcgccttcctgctgcggaagaagcggttcggccagtggaccaagttgctctgcgtcatcaaagacaccaaactgctgtgctataaaagttccaaggaccagcagcctcagatggaactgccactccaaggctgtaacattacgtacatcccgaaagacagcaaaaagaagaagcacgagctgaagattactcagcagggcacggacccgcttgttctcgccgtccagagcaaggaacaggccgagcagtggctgaaggtgatcaaagaagcctacagtggttgtagtggccccgtggattcagagtgtcctcctccaccaagctccccggtgcacaaggcagaactggagaagaaactgtcttcagagagacccagctcagatggggagggtgttgtggaaaatggaattaccacatgtaatggaaaggagcaagtgaagaggaagaaaagttccaaatcagaggccaagggcactgtgtcgaaagtcactgggaaaaaaatcaccaagatcatcagtctgggaaagaaaaagccgtccacagacgagcagacctcctcagctgaggaagatgttcccacctgcggctatctgaacgtgctctccaacagccgctggcgagagcgctggtgccgagtgaaagataacaagctcattttccacaaggacaggaccgacctgaagacccatattgtgtctattccgctccgtggctgcgaggtgatcccgggtttggattctaaacatcctctgacgttccggctgctgcgcaacggccaggaggttgcagtattggaggcatcttcttctgaagacatgggcaggtggattgggattttactcgcagagacgggatcgtccacagacccggaggctctgcactatgactacattgatgtggagatgtctgcaagtgtcattcagacagccaaacagaccttctgtttcatgaacaggcgtgttatatctgctaacccatatctagggggcacctccaacggctatgcccaccccagcgggacggcacttcattatgacgatgtcccgtgcatcaacggctcgtgggaaccggaagacggctttcctgcttcctgcagcagaggcttgggagaagaggtgctttatgataacgcaggcctgtacgataacttgccgcctccgcacatctttgcccgctactctcctgctgacagaaaggcctctaggctgtctgctgacaagctgtcctctaaccattacaaataccctgcctccgctcagtctgtcactaatacctcttctgtggggagggcgtctctcgggctcaactcgcagctcaagggtaaaaagccccccgtggcgtctaatggggtcacaggaaaagggaagactctgagcagtcagccaaagaaagcggatcccgcggctgttgtgaaaaggacgggttcgaatgctgcccagtacaagtatggcaagaaccgggtagaagcagatgccaagcggctacagaccaaagaggaggagctgctgaagaggaaagaggccctgcggaataggctggcccagctccgcaaggaaagaaaagaccttcgagcggctattgaagtgaacgccggcaggaagccgcaggcgatcctggaggagaagctgaagcagctggaggaggagtgccggcagaaggaggcggagcgtgtcagcctggagctggagctgacggaggtcaaggagagcctgaagaaagcgctggcgggcggagtcaccctggggctggccatcgagcccaagtcagggacatcgagtccacagtctccagtgttccggcaccggaccctggaaaactcgcccatctccagctgtgacaccagtgacaccgagggccccgtgccggtgaacagcgcggccgtcttgaagaagagccaggctgccccgggcagctccccctgccgagggcatgtgctgcggaaggccaaggaatgggaattgaagaacgggacctaggggacagcagcaccactccagcctcagagactgcacacccccttgcctgtatcctcatctgtgtgacggcaggaagctctgcccagagtggcctcagctgcacgactccagaggctccacgactgagctctgaggccagtg

SEQ ID NO: 103892 - DNA, 7768 bp, Homo sapiens
  Payload ID: 423
  Gene Symbol: AFAP1
  Gene Name: actin filament associated protein 1
  Uniprot ID: Q8N556
  ENST ID: ENST00000420658
  CDS Start-End: 274-2718
gggcgcccggctccgctgggggcgggacggcgggcggcgggcggggccgtgtgcgcctgcgtggtgtctgtcccggccgcagccccacgccggctgcagctccgcgagccgagccggatctcgagcggggtacacgggctgaggcggcggcggcggccccgccccggggctccattgttaaggcggctgcggctctgtcggctgttcagctgcgctccagtcggcccaggcgccgcggcgaggagcgagcgctgcgaggtggcggcctgagcaatggaagagttaatagttgaacttcgtctctttcttgaactcctggaccatgaatatctaacctcaactgtcagggagaaaaaggcagtgataaccaacattctgctaagaatacagtcatccaaaggttttgatgtgaaggaccatgctcagaagcaggagaccgctaacagcctgccagcccctcctcagatgcccctgccggagatccctcagccctggctgcctcctgacagtgggcctccaccattgccaacatcctccctcccagaaggttattatgaggaagctgtgccgctgagccccggaaaagctccggaatacatcacatcaaattatgattccgatgcgatgagcagctcttatgagtcgtatgatgaagaggaggaggatgggaaggggaagaaaacccggcaccagtggccctccgaggaggcctccatggacctggtcaaggacgccaaaatctgcgccttcctgctgcggaagaagcggttcggccagtggaccaagttgctctgcgtcatcaaagacaccaaactgctgtgctataaaagttccaaggaccagcagcctcagatggaactgccactccaaggctgtaacattacgtacatcccgaaagacagcaaaaagaagaagcacgagctgaagattactcagcagggcacggacccgcttgttctcgccgtccagagcaaggaacaggccgagcagtggctgaaggtgatcaaagaagcctacagtggttgtagtggccccgtggattcagagtgtcctcctccaccaagctccccggtgcacaaggcagaactggagaagaaactgtcttcagagagacccagctcagatggggagggtgttgtggaaaatggaattaccacatgtaatggaaaggagcaagtgaagaggaagaaaagttccaaatcagaggccaagggcactgtgtcgaaagtcactgggaaaaaaatcaccaagatcatcagtctgggaaagaaaaagccgtccacagacgagcagacctcctcagctgaggaagatgttcccacctgcggctatctgaacgtgctctccaacagccgctggcgagagcgctggtgccgagtgaaagataacaagctcattttccacaaggacaggaccgacctgaagacccatattgtgtctattccgctccgtggctgcgaggtgatcccgggtttggattctaaacatcctctgacgttccggctgctgcgcaacggccaggaggttgcagtattggaggcatcttcttctgaagacatgggcaggtggattgggattttactcgcagagacgggatcgtccacagacccggaggctctgcactatgactacattgatgtggagatgtctgcaagtgtcattcagacagccaaacagaccttctgtttcatgaacaggcgtgttatatctgctaacccatatctagggggcacctccaacggctatgcccaccccagcgggacggcacttcattatgacgatgtcccgtgcatcaacggctcgtgggaaccggaagacggctttcctgcttcctgcagcagaggcttgggagaagaggtgctttatgataacgcaggcctgtacgataacttgccgcctccgcacatctttgcccgctactctcctgctgacagaaaggcctctaggctgtctgctgacaagctgtcctctaaccattacaaataccctgcctccgctcagtctgtcactaatacctcttctgtggggagggcgtctctcgggctcaactcgcagctcaagggtaaaaagccccccgtggcgtctaatggggtcacaggaaaagggaagactctgagcagtcagccaaagaaagcggatcccgcggctgttgtgaaaaggacgggttcgaatgctgcccagtacaagtatggcaagaaccgggtagaagcagatgccaagcggctacagaccaaagaggaggagctgctgaagaggaaagaggccctgcggaataggctggcccagctccgcaaggaaagaaaagaccttcgagcggctattgaagtgaacgccggcaggaagccgcaggcgatcctggaggagaagctgaagcagctggaggaggagtgccggcagaaggaggcggagcgtgtcagcctggagctggagctgacggaggtcaaggagagcctgaagaaagcgctggcgggcggagtcaccctggggctggccatcgagcccaagtcagggacatcgagtccacagtctccagtgttccggcaccggaccctggaaaactcgcccatctccagctgtgacaccagtgacaccgagggccccgtgccggtgaacagcgcggccgtcttgaagaagagccaggctgccccgggcagctccccctgccgagggcatgtgctgcggaaggccaaggaatgggaattgaagaacgggacctaggggacagcagcaccactccagcctcagagactgcacacccccttgcctgtatcctcatctgtgtgacggcaggaagctctgcccagagtggcctcagctgcacgactccagaggctccacgactgagctctgaggccagtgcctgtcccccaggcccacttgtattctttctactgtaaaatggcgcctttaaaaaagatgtaagactttggttcccaactttgttaaaaaacaaaaaaagtgatggaaaggtgtttgaaaggatgctatcaggcgaagtgacatctttctaaccagataggccattgctttcaccgattccaacccagccctggactgaggatggatggttccatgagcccccagatgaaaacctggattcgacagggaagagcttggatccccggctgccccgggcatgagtgtggctggccatgggcactgggctcgccttgcacgcccaccaggagggccaggggcatacgcagtcctgacgtggactttgtgtcttggcgtaccctctccacgtgcccgtccccctcgtcatcagaggtaaaggcatgagaaaatcgcgctgtgaaacgttttttaccttttattattattttttggacagatgcttttgtcaccaagacatgaaaagctgccattcttcttaacctgttttttaggaatgtctttttactgtgtgtcacacttagatcaaggagttttcagaggttccttattttattaattaattatttgtgctgcttttgacaggtagcagagggttttaatacttcactaacagtacaccctcctcccccttgggctagcatccccagcccttaatccacgtcggagccggcaggtgcttctcacaccaggagcctctgggggcaggggctggctcctcgccgctgtacaggacgtttactgctgcttggggccagggcagtcctttgaaagggaagcaagttccggaatttgttcgctcatggaactataacaccttagagcaagaggcaggaattccagggcctcctgcccctccccttcctccagcttgtcaagttaaaccactaatgtgttggtgggcctggccgtgctgcctctcctgagtagggtgggtgcaagtagggcctctttcccagctttcttgcttgccttctgtgcaatatttcttggagaatttggatgcctaaggcataaaggaaaaaaacagagttcatagtttgagctggtatttaccccctgggtttaaaaatcagattaacttcttggtctcccggaggctgctgtcaggaattctccagtacgggaagatgcagtcacttatgacgaaataagtcacccctgaacgcctccgcaggcagattcatggagaccagtcccagtagcaaccgccccttccccaagcatagaatacagaggtgccatacttggtgtaagccttccttctgtccactgtccagaatgtcctttttcacacagaggaagagatggcgggaaaacactgactgactccttgggtttcccccagacatactttcagagcgctagctgtgtggtgcacgggactttacagttaggattcatgtttaaggtggtggcgcttgaggcctgcaagggccacgttggattactgaagcggaaagcggtctcccatgtataagaaaaagttttacaacacgaattggaagctgcttgagtccacctgaacttgaattgattgcaaagccatctgctgggaacggttttgggttcctgagccatcagccagcctttctttcccctctgatgcacgttcctcccggcctagtccgtggaggcccatcacaccagcatccgtgacgccagcttcccactaggacatccaggcaggtcgggcggggacgccacacacctcagggccgtccgctgcattgccatagaggagccctccctccagtggtcacttcccaccattgcaggcagacttcccaccattgcaggcagctgggcccacttcatatcacacaaaatgaattttctataaagggaaaaaagtttgctcctccatagatttttgctgccttcgggtcaaatagtttccctggttgacactcttgggccactctgattggcagcctgctttgccaaagagaactgtgtgaggttttggtggttagtaagagaagggggagatggccagcctgaagtcacggtcctggcccagcacaggtgggcagcagcgagctggcaggtgaagtgtgagcagcacgcaaagtgtcacgtgggccttagccgtcacccaccagcttcctcaccaggcaaggaggccccggagccttagcagggacttgcccaacggcacagctgattggtgctcgactcccagcatgcatattttgttgtaaaaacccaggtttgtaattcacatccacaaccctaagccttttaaagcggaggcaaacgttaacaaaccccatcgtggtccatggagcctttcaaaatgggtgccctggaggggcctgacagtgggttccttccatggcggatactcccttgaaatttcacattccatcaaagtttaaagcatttacttcagaataagttatttatgtgtatatgttcaataaatatagtttttaatttatatctgtacatattagacacacgcgagccatcttgccagaattctgacagtgatgtcattttattcccctcccaaaacatgccccaggaacaagcaccccttgcctctgtggcagctgcgagtgtgtctgatttcataacgaagccaggctgagggcaagaggcccgacaggcaggccagggtccccggagaagccggatttcttcgcaatgtcactggtacttagcagatggtcgtgttcacaggggctagccacctgtactacggtgccgaccgcaatgcgaggaatgtggtggccacgcgatggagctggccggaggacaggtcaggtgagggggccgacccctgcggggctcagggctccttccattctaaccttgagccacagtgtcactcttcagggctctgctcctggctctattttgttaaggtgtcatcagccttcaacctccatttatatatttttataatgttaagccactgaccaactttttcatagaaacaactatcagattcgagggctccctttgtccccctgacctgggcacaggcatgggcgatggctccctcttcccagaatctgcggggaactggggcaaggcccatctgtctgcaaggctggtagctctctccctcggcttccagagtccacggcagttgcaaggtaaccagtgtggatctgctgagtcaccccaggcaccagacttaccccaggagcatgggccactgtccatggggccttccttgagaccttcccttggggctggcgggcggcggcttaccagctgggtcagtcccatctcgcccctctgtgcctatgccctggcgttgccaggcttaaccttcccctgtatcttactcatcccagaattattactggccatttctaaatagacaaaaactaccctaaaatgtggagatttactccttttgaaaagtctgtttcaaaaagtgtggcctcagctctggaggccacccccaggaaggagtttgaggttcattgtcattatggccacagtttggtgcttgtgcacgggactcaaagggcagcgtcgaagctggggttaggtgtagggttgtgagcaaagctcccctgtttgtggccacaccttccctttccaaaaaggctattaattctactcacccactatttggggggatgtaaattttgcccacagactttgccacccaggtgaggtgctgtgttcatgcacggaactgatgtcattagacaccatccaaggatgggcagcctgcagtgtggccggcgactgccatccagagaaaaggcaccttgtgccacagggcggggccgacaccctgagctcacaggtggcccctgcattcaggtggatgtccatccttgaaacagcctcttctgggaacacagcactggaggtctccaggcatcagggttggccggcagggtgccctgcagcttacataaaggtcgtggcaatgtttcaatgttaaactaaactattgccttcctcttacttttcctaaaatgattttctaatgggaacagtcacttcaagttcatgacatagtttgaaggaggataattcattttttcctggttgtcactgtcttcttatccccttggtgggctgggttcatactgtgaaataaactaaaatgaaaccaaaacgttcctgccgtaaatacgtggcacagcactgcagaaaaagcagtcacctctattcgtgagtccccaagccatagcagggcgtctgtaaaagaagggaaactgcacccaggaagtggtgggcgtcagacgcatcctttcgcccgtagttcatgaaatagttccggctttggtcttccagaaaatctcaacttcaccgtgcacaagtgttaccgggtctttttagtgtagccatggaagatactttcaaaaggacatcttcagatcataagtcttaggaccaaaggtgtttttaatgagataatctttttgattttctaacaagaaaggaaatattcactttacattttaacatcaacttttaagtgatattcagaattaattgaccatggtgatacgttgtaaaatgttttcatattaagaatgtaattatttccttattgtattttttaaaagctaaagtcatatttaaaattctctttgaaagaaacaggcaaagaaacagcaaagatttttttaaattaaatatgttagtagtgcccacttcaaatgactgtaaatatattttcactgtttctcaatgtatttaattcataaagtaaaaattttatgaaaagaaacttgcaaggaaaatcctagttttcagtccactcgccccactttgtagtagcttcactgaatttcctgctttcctggttgaattttctactgtttcacgtggtgtaaccctagactggcgcccttggcgtgcccctttgtgtatgaataaacttctctccccc

SEQ ID NO: 103893 - DNA, 356 bp, Homo sapiens
  Payload ID: 423
  Gene Symbol: AFAP1
  Gene Name: actin filament associated protein 1
  ENST ID: ENST00000614385
  CDS Start-End: 1-279
ggaattaccacatgtaatggaaaggagcaagtgaagaggaagaaaagttccaaatcagaggccaagggcactgtgtcgaaagtcactgggaaaaaaatcaccaagatcatcagtctgggaaagaaaaagccgtccacagacgagcagacctcctcagctgaggaagatgttcccacctgcggtaagactgcgcttcccggagacgagcagcgtgcacctaagtgggtttcattttctcctgcagtggtgtcggtacccagttcatccaaggctcgttaatttgagctcttttgcattggacttggaatcattcagatagtgggaaatgtattaaatgtttacatttttgcctctta

SEQ ID NO: 103894 - DNA, 4177 bp, Homo sapiens
  Payload ID: 424
  Gene Symbol: AFAP1L1
  Gene Name: actin filament associated protein 1-like 1
  Uniprot ID: Q8TED9
  ENST ID: ENST00000296721
  CDS Start-End: 99-2405
ccgctgggctggcctgagagcgcagcgcgccggccgctaccagccgcgccggagcccctgcgccctgcggcccgctccccggggaccgggccggcgccatggaccgaggccaggtgctggagcagctgctcccagagctcaccgggctgctcagcctcctggaccacgagtacctcagcgataccaccctggaaaagaagatggccgtggcctccatcctgcagagcctgcagccccttccagcaaaggaggtctcctacctgtatgtgaacacagcagacctccactcggggcccagcttcgtggaatccctctttgaagaatttgactgtgacctgagtgaccttcgggacatgccagaggatgatggggagcccagcaaaggagccagccctgagctagccaagagcccacgcctgagaaacgcggccgacctgcctccaccgctccccaacaagcctccccctgaggactactatgaagaggcccttcctctgggacccggcaagtcgcctgagtacatcagctcccacaatggctgcagcccctcacactcgattgtggatggctactatgaggacgcagacagcagctaccctgcaaccagggtgaacggcgagcttaagagctcctataatgactctgacgcaatgagcagctcctatgagtcctacgatgaagaggaggaggaagggaagagcccgcagccccgacaccagtggccctcagaggaggcctccatgcacctggtgagggaatgcaggatatgtgccttcctgctgcggaaaaagcgtttcgggcagtgggccaagcagctgacggtcatcagggaggaccagctcctgtgttacaaaagctccaaggatcggcagccacatctgaggttggcactggatacctgcagcatcatctacgtgcccaaggacagccggcacaagaggcacgagctgcgtttcacccagggggctaccgaggtcttggtgctggcactgcagagccgagagcaggccgaggagtggctgaaggtcatccgagaagtgagcaagccagttgggggagctgagggagtggaggtccccagatccccagtcctcctgtgcaagttggacctggacaagaggctgtcccaagagaagcagacctcagattctgacagcgtgggtgtgggtgacaactgttctacccttggccgccgggagacctgtgatcacggcaaagggaagaagagcagcctggcagaactgaagggctcaatgagcagggctgcgggccgcaagatcacccgtatcattggcttctccaagaagaagacactggccgatgacctgcagacgtcctccaccgaggaggaggttccctgctgtggctacctgaacgtgctggtgaaccagggctggaaggaacgctggtgccgcctgaagtgcaacactctgtatttccacaaggatcacatggacctgcgaacccatgtgaacgccatcgccctgcaaggctgtgaggtggccccgggctttgggccccgacacccatttgccttcaggatcctgcgcaaccggcaggaggtggccatcttggaggcaagctgttcagaggacatgggtcgctggctcgggctgctgctggtggagatgggctccagagtcactccggaggcgctgcactatgactacgtggatgtggagaccttaaccagcatcgtcagtgctgggcgcaactccttcctatatgcaagatcctgccagaatcagtggcctgagccccgagtctatgatgatgttccttatgaaaagatgcaggacgaggagcccgagcgccccacaggggcccaggtgaagcgtcacgcctcctcctgcagtgagaagtcccatcgtgtggacccgcaggtcaaagtcaaacgccacgcctccagtgccaatcaatacaagtatggcaagaaccgagccgaggaggatgcccggaggtacttggtagaaaaagagaagctggagaaagagaaagagacgattcggacagagctgatagcactgagacaggagaagagggaactgaaggaagccattcggagcagcccaggagcaaaattaaaggctctggaagaagccgtggccaccctggaagctcagtgtcgggcaaaggaggagcgccggattgacctggagctgaagctggtggctgtgaaggagcgcttgcagcagtccctggcaggagggccagccctggggctctccgtgagcagcaagcccaagagtggggaaactgcaaataaaccccagaacagcgttccagagcaacctctccctgtcaactgtgtttctgagctgaggaagaggagcccatccatcgtagcctccaaccaaggaagggtgctacagaaagccaaggaatgggaaatgaagaagacctaggaagaggatgaggatttcattccaaaggaaataccagcttgtccacctgaggaagaaatgcttttttcacaaggagacaccaagagaagactaggaagtagccctcgttctccagggcacccaaaataccagcctttattgtctgcatgattttaggggatatggggagggaacaagtagaagggaagagggaaatggagagcatccttatgactttacaaagggtggaaatgaggatggagggatacagaagtctgcacagctgtaaaggttttatagatgtctttgccttcccttctgaggaagggaagaagtaatgaaagcacatgtgaataaccccttccatcccattcacagcatcgcactcccagtccttaaggcaaagggaggcagtgctgaagcattggtggtgcagtgtaaagagacaagacctgatcatctgatcacacttgtgccaacttgattcatattgggcattactaacaacccctggtcaaggtaaataggttgaacaatcaataacattatccctgcctgcatacatgtgaacaaaagctatagaggacatgcaaattctacagtcattcctcatatgctttagacagagtgcagctactggaatcttccagatttcagtgttttaaaatcagagctctgaatacacaaaaggaaagagaaatggagcagctgacatattttaagctcacagtgatactcagtgacaggagcacagagctctaatgtccacaggatgttgtagggtagggtctctcagtaaatcaagtcccttacctatgttctgacactgaggctcttggagctatgggttagaaatccaggaggcaatatgtctttattctaatgaagtcctcatcttgcactcagaggcccactagtttgcccttctatatattaagtaaaaccaagagaaattaagaggatgatggcttctttctgtcacatgggtgctaaaccttttacaaacacttgatacttctatagagggaccaaggacctcaagtcctgggcagtctccttactgtgctactcactactgtctcaacactgtagtgagtctgtctttaacacatttccttccaataaagataaaaccacttaactcttaagtgccagtgcttagctcaagaggaaagaaggaaaatcccagaataaccgtggccactttgctataggggttacatattttaacccacctaaggttttacagactttagcctcactcaaactttatcaccctctgaggtagctggagaccacagcaggaaaaataacctgaccagtaatcacccactgattagtggcagagcgtaggacttaggggttataagcccagatccagatagggctaggtttgagccatgcctctaatgaccagctgggtgaccttgggaaagtcacttgattgctctgattcttgttttccttatctgtgaaatgggactaacaattgttacttttctcccaagattgttgggaagatttaataagataatatatagtaggcatcttgcatagtgtctgagaaataagaaatgctcagtcaatagtggctctcattagccaggcatggtggtactcgcctgtagtcccagctactcaggaggctgaggcaggaggaccgcttgagcccaggagtttgagactgtagtgcactatgatcacgcctgtgaattgccactgcactccagcctaagcaaatagcaagaccccatctattaaaaaaaaaaagtggctattattagctatatcag

SEQ ID NO: 103895 - DNA, 2319 bp, Homo sapiens
  Payload ID: 424
  Gene Symbol: AFAP1L1
  Gene Name: actin filament associated protein 1-like 1
  Uniprot ID: Q8TED9
  ENST ID: ENST00000515000
  CDS Start-End: 51-2228
ccggagcccctgcgccctgcggcccgctccccggggaccgggccggcgccatggaccgaggccaggtgctggagcagctgctcccagagctcaccgggctgctcagcctcctggaccacgagtacctcagcgataccaccctggaaaagaagatggccgtggcctccatcctgcagagcctgcagccccttccagcaaaggaggtctcctacctgtatgtgaacacagcagacctccactcggggcccagcttcgtggaatccctctttgaagaatttgactgtgacctgagtgaccttcgggacatgccagaggatgatggggagcccagcaaaggagccagccctgagctagccaagagcccacgcctgagaaacgcggccgacctgcctccaccgctccccaacaagcctccccctgaggactactatgaagaggcccttcctctgggacccggcaagtcgcctgagtacatcagctcccacaatggctgcagcccctcacactcgattgtggatggctactatgaggacgcagacagcagctaccctgcaaccagggtgaacggcgagcttaagagctcctataatgactctgacgcaatgagcagctcctatgagtcctacgatgaagaggaggaggaagggaagagcccgcagccccgacaccagtggccctcagaggaggcctccatgcacctggtgagggaatgcaggatatgtgccttcctgctgcggaaaaagcgtttcgggcagtgggccaagcagctgacggtcatcagggaggaccagctcctgtgttacaaaagctccaaggatcggcagccacatctgaggttggcactggatacctgcagcatcatctacgtgcccaaggacagccggcacaagaggcacgagctgcgtttcacccagggggctaccgaggtcttggtgctggcactgcagagccgagagcaggccgaggagtggctgaaggtcatccgagaagtgagcaagccagttgggggagctgagggagtggaggtccccagatccccagtcctcctgtgcaagttggacctggacaagaggctgtcccaagagaagcagacctcagattctgacagcgtgggtgtgggtgacaactgttctacccttggccgccgggagacctgtgatcacggcaaagggaagaagagcagcctggcagaactgaagggctcaatgagcagggctgcgggccgcaagatcacccgtatcattggcttctccaagaagaagacactggccgatgacctgcagacgtcctccaccgaggaggaggttccctgctgtggctacctgaacgtgctggtgaaccagggctggaaggaacgctggtgccgcctgaagtgcaacactctgtatttccacaaggatcacatggacctgcgaacccatgtgaacgccatcgccctgcaaggctgtgaggtggccccgggctttgggccccgacacccatttgccttcaggatcctgcgcaaccggcaggaggtggccatcttggaggcaagctgttcagaggacatgggtcgctggctcgggctgctgctggtggagatgggctccagagtcactccggaggcgctgcactatgactacgtggatgtggagaccttaaccagcatcgtcagtgctgggcgcaactccttcctatatgcaagatcctgccagaatcagtggcctgagccccgagtctatgatgatgttccttatgaaaagatgcaggacgaggagcccgagcgccccacaggggcccaggtgaagcgtcacgcctcctcctgcagtgagaagtcccatcgtgtggacccgcaggtcaaagtcaaacgccacgcctccagtgccaatcaatacaagtatggcaagaaccgagccgaggaggatgcccggaggtacttggtagaaaaagagaagctggagaaagagaaagagacgattcggacagagctgatagcactgagacaggagaagagggaactgaaggaagccattcggagcagcccaggagcaaaattaaaggctctggaagaagccgtggccaccctggaagctcagtgtcgggcaaaggaggagcgccggattgacctggagctgaagctggtggctgtgaaggagcgcttgcagcagtccctggcaggagggccagccctggggctctccgtgagcagcaagcccaagagtggggaatgggaaatgaagaagacctaggaagaggatgaggatttcattccaaaggaaataccagcttgtccacctgaggaagaaatgcttttttcacaaggagacaccaagagaagac

SEQ ID NO: 103896 - DNA, 3705 bp, Homo sapiens
  Payload ID: 425
  Gene Symbol: AFAP1L2
  Gene Name: actin filament associated protein 1-like 2
  Uniprot ID: Q8N4X5
  ENST ID: ENST00000304129
  CDS Start-End: 31-2487
gagccgcgaggagcgcactccgtggccccgatggagcggtacaaagccctggaacagctgctgacagagttggatgacttcctcaagattcttgaccaggagaacctgagcagcacagcactggtgaagaagagctgcctggcggagctcctccggctttacaccaaaagcagcagctctgatgaggagtacatttatatgaacaaagtgaccatcaacaagcaacagaatgcagagtctcaaggcaaagcgcctgaggagcagggcctgctacccaatggggagcccagccagcactcctcggcccctcagaagagccttccagacctcccgccacccaagatgattccagaacggaaacagcttgccatcccaaagacggagtctccagagggctactatgaagaggctgagccatatgacacatccctcaatgaggacggagaggctgtgagcagctcctacgagtcctacgatgaagaggacggcagcaagggcaagtcggccccttaccagtggccctcgccggaggccggcatcgagctgatgcgtgacgcccgcatctgcgccttcctgtggcgcaagaagtggctgggacagtgggccaagcagctctgtgtcatcaaggacaacaggcttctgtgctacaaatcctccaaggaccacagccctcagctggacgtgaacctactgggcagcagcgtcattcacaaggagaagcaagtgcggaagaaggagcacaagctgaagatcacgccgatgaatgccgatgtgattgtgctgggcctgcagagcaaggaccaggctgagcagtggctcagggtcatccaggaagtgagcggcctgccttccgaaggagcatctgaaggaaaccagtacaccccggatgcccagcgctttaactgccagaaaccagatatagctgagaagtacctgtcggcttcagagtatgggagctccgtggatggccaccctgaggtcccagaaaccaaagacgtcaagaagaaatgttctgctggcctcaaactgagcaacctaatgaatctgggcaggaagaaatccacctcactggagcctgtggagaggtccctcgagacatccagttacctgaacgtgctggtgaacagccagtggaagtctcgctggtgctctgtcagggacaatcacctgcacttctaccaggaccggaaccggagcaaggtggcccagcaacccctcagcctggtgggctgcgaggtggtcccagaccccagccccgaccacctctactccttccgcatcctccacaagggcgaggagctggccaagcttgaggccaagtcttccgaggaaatgggccactggctgggtctcctgctctctgagtcaggctccaagacagacccagaagagttcacctacgactatgtggatgccgatagggtctcctgtattgtgagtgcggccaaaaactctctcttactgatgcagagaaagttctcagagcccaacacttacatcgatggcctgcctagccaggaccgccaggaggagctgtatgacgacgtggacctgtcagagctcacagctgcggtggagcctaccgaggaagccacccctgttgcagatgacccaaatgagagagaatctgaccgagtgtacctggacctcacacctgtcaagtcctttctgcatggccccagcagtgcacaggcccaggcctcctccccgacgttgtcctgcctggacaatgcaactgaggccctcccggcagactcaggcccaggtcccaccccagatgagccctgcataaagtgtccagagaacctgggagaacagcagctggagagtttggagccagaggatccttccctgagaatcaccaccgtcaaaatccagacggaacagcagagaatctccttcccaccgagctgcccggatgccgtggtggccaccccacctggtgccagcccacctgtgaaggacaggttgcgcgtgaccagtgcagagatcaagcttggcaagaatcggacagaagctgaggtgaagcggtacacagaggagaaggagaggcttgaaaagaagaaggaagaaatccgggggcacctggctcagctccggaaagagaaacgggagctaaaggaaaccctactgaaatgcacagacaaggaagtcctggcgagcctggagcagaagctgaaggaaattgacgaggagtgccggggcgaggagagcaggcgcgtggacctggagctcagcatcatggaggtgaaggacaacctgaagaaggctgaggcagggcctgtgacgttaggcaccaccgtggacaccacccacctggagaatgtgagcccccgccccaaagctgtcacacctgcctctgccccagactgtaccccagtcaactctgcaaccacactcaagaacaggcctctctcggtcgtggtcacaggcaaaggcactgtactccagaaagccaaggaatgggagaagaaaggagcaagttagaaaacaagcttcatctaaagactctcatgtcaatgtggaccttggtgacaatcctgctttgttaaagcaaaaactatgcgaaagggtgagtctgtttagaagaaaaagcaaagactgaggtactgtgaatggagagcttcagctaagaggaggctctgtcccttttcagagccaaaggaaataatacaacaaaaaggaggcttctttggagacctaagtctattggatgtaaacaagacgttgtatttagggatgttctgtgtttctttcttttttgaagttgtcatcaattgctttactaagatttttaaatagtgaaaacctcctgtttagactttggtggaagatgaatcaaggaagcagggccctgtcttatgggtcacgtgtctttggtgagtgagaagacctaaactcctggccatcatctcttatccaatacttagcagttggggattaaaccatccttgccttcagttctctccaatattaccaggcccaactcagtcttcagtgattttaaacagcattgacatcatctgtaaaaccatcatctgtaaaaccatctatgacatgagttttgagaaacaataatggggaaaatatttgggaccaagctgaagcactaatcccactaagttaaagacttctttccagtccaaggcaggcctgaatcaactgtctttaaataaaattttaagtgatgctgtattatatataggaaaaaatgcttaaaatcctgtcatttagaacagtgaaaagtatcttttgagattaaagtgactctttactgtaggaaaaatattactctgtgtttacagattcattgctgtggtcaggccatttttaagggaagagttatttaatataaatagtctctgattttaagttctgtttaatgttcattctccttccaagaacaaagtggtgatttttggttagggtgatcgccctcttaaaattggcagtgctgttccttgtgctgcccctgtcttttcctctgatggcatttttttttttttttttttaacacaggttgaaacatttcatctattatctctgcctcatttctggagggttgtgtatcagttctctaacacttgttcctgagaactaaatgtcttttttattcttatttcctctctcataaacatttggtgaccttttaccaagtggtgagttagttaggttttttaaaataaaatgttcattgtatttgaa

SEQ ID NO: 103897 - DNA, 3964 bp, Homo sapiens
  Payload ID: 425
  Gene Symbol: AFAP1L2
  Gene Name: actin filament associated protein 1-like 2
  Uniprot ID: Q8N4X5
  ENST ID: ENST00000369271
  CDS Start-End: 302-2746
gtgccaaggcggccgggggcggcgagcggggccgcgggcgcgcaccgactcaagagccgactgtcagcctcggcgggccggagttctccggcgctgggacaggggcgctgggacaggggcgctgggggcgagccctggcgggggccaggtccgaggaccctgggcgcggcggccccgccaggaggtccggccgcgagcgtgacctcacggggaggggccagcgcggcggcctgggcgctgagccgagcgccgggagagcagcgcagaagccgagccgcgaggagcgcactccgtggccccgatggagcggtacaaagccctggaacagctgctgacagagttggatgacttcctcaagattcttgaccaggagaacctgagcagcacagcactggtgaagaagagctgcctggcggagctcctccggctttacaccaaaagcagcagctctgatgaggagtacatttatatgaacaaagtgaccatcaacaagcaacagaatgcagagtctcaaggcaaagcgcctgaggagcagggcctgctacccaatggggagcccagccagcactcctcggcccctcagaagagccttccagacctcccgccacccaagatgattccagaacggaaacagcttgccatcccaaagacggagtctccagagggctactatgaagaggctgagccatatgacacatccctcaatgaggacggagaggctgtgagcagctcctacgagtcctacgatgaagaggacggcagcaagggcaagtcggccccttaccagtggccctcgccggaggccggcatcgagctgatgcgtgacgcccgcatctgcgccttcctgtggcgcaagaagtggctgggacagtgggccaagcagctctgtgtcatcaaggacaacaggcttctgtgctacaaatcctccaaggaccacagccctcagctggacgtgaacctactgggcagcagcgtcattcacaaggagaagcaagtgcggaagaaggagcacaagctgaagatcacgccgatgaatgccgatgtgattgtgctgggcctgcagagcaaggaccaggctgagcagtggctcagggtcatccaggaagtgagcggcctgccttccgaaggagcatctgaaggaaaccagtacaccccggatgcccagcgctttaactgccagaaaccagatatagctgagaagtacctgtcggcttcagagtatgggagctccgtggatggccaccctgaggtcccagaaaccaaagacgtcaagaagaaatgttctgctggcctcaaactgagcaacctaatgaatctgggcaggaagaaatccacctcactggagcctgtggagaggtccctcgagacatccagttacctgaacgtgctggtgaacagccagtggaagtctcgctggtgctctgtcagggacaatcacctgcacttctaccaggaccggaaccggagcaaggtggcccagcaacccctcagcctggtgggctgcgaggtggtcccagaccccagccccgaccacctctactccttccgcatcctccacaagggcgaggagctggccaagcttgaggccaagtcttccgaggaaatgggccactggctgggtctcctgctctctgagtcaggctccaagacagacccagaagagttcacctacgactatgtggatgccgatagggtctcctgtattgtgagtgcggccaaaaactctctcttactgatgcagagaaagttctcagagcccaacacttacatcgatggcctgcctagccaggaccgccaggaggagctgtatgacgacgtggacctgtcagagctcacagctgcggtggagcctaccgaggaagccacccctgttgcagatgacccaaatgagagagaatctgaccgagtgtacctggacctcacacctgtcaagtcctttctgcatggccccagcagtgcacaggcccaggcctcctccccgacgttgtcctgcctggacaatgcaactgaggccctcccggcagactcaggcccaggtcccaccccagatgagccctgcataaagtgtccagagaacctgggagaacagcagctggagagtttggagccagaggatccttccctgagaatcaccaccgtcaaaatccagacggaacagcagagaatctccttcccaccgagctgcccggatgccgtggtggccaccccacctggtgccagcccacctgtgaaggacaggttgcgcgtgaccagtgcagagatcaagcttggcaagaatcggacagaagctgaggtgaagcggtacacagaggagaaggagaggcttgaaaagaagaaggaagaaatccgggggcacctggctcagctccggaaagagaaacgggagctaaaggaaaccctactgaaatgcacagacaaggaagtcctggcgagcctggagcagaagctgaaggaaattgacgaggagtgccggggcgaggagagcaggcgcgtggacctggagctcagcatcatggaggtgaaggacaacctgaagaaggctgaggcagggcctgtgacgttaggcaccaccgtggacaccacccacctggagaatcccaaagctgtcacacctgcctctgccccagactgtaccccagtcaactctgcaaccacactcaagaacaggcctctctcggtcgtggtcacaggcaaaggcactgtactccagaaagccaaggaatgggagaagaaaggagcaagttagaaaacaagcttcatctaaagactctcatgtcaatgtggaccttggtgacaatcctgctttgttaaagcaaaaactatgcgaaagggtgagtctgtttagaagaaaaagcaaagactgaggtactgtgaatggagagcttcagctaagaggaggctctgtcccttttcagagccaaaggaaataatacaacaaaaaggaggcttctttggagacctaagtctattggatgtaaacaagacgttgtatttagggatgttctgtgtttctttcttttttgaagttgtcatcaattgctttactaagatttttaaatagtgaaaacctcctgtttagactttggtggaagatgaatcaaggaagcagggccctgtcttatgggtcacgtgtctttggtgagtgagaagacctaaactcctggccatcatctcttatccaatacttagcagttggggattaaaccatccttgccttcagttctctccaatattaccaggcccaactcagtcttcagtgattttaaacagcattgacatcatctgtaaaaccatcatctgtaaaaccatctatgacatgagttttgagaaacaataatggggaaaatatttgggaccaagctgaagcactaatcccactaagttaaagacttctttccagtccaaggcaggcctgaatcaactgtctttaaataaaattttaagtgatgctgtattatatataggaaaaaatgcttaaaatcctgtcatttagaacagtgaaaagtatcttttgagattaaagtgactctttactgtaggaaaaatattactctgtgtttacagattcattgctgtggtcaggccatttttaagggaagagttatttaatataaatagtctctgattttaagttctgtttaatgttcattctccttccaagaacaaagtggtgatttttggttagggtgatcgccctcttaaaattggcagtgctgttccttgtgctgcccctgtcttttcctctgatggcatttttttttttttttttttaacacaggttgaaacatttcatctattatctctgcctcatttctggagggttgtgtatcagttctctaacacttgttcctgagaactaaatgtcttttttattcttatttcctctctcataaacatttggtgaccttttaccaagtggtgagttagttaggttttttaaaataaaatgttcattgtatttgaa

SEQ ID NO: 103898 - DNA, 961 bp, Homo sapiens
  Payload ID: 425
  Gene Symbol: AFAP1L2
  Gene Name: actin filament associated protein 1-like 2
  ENST ID: ENST00000419268
  CDS Start-End: 26-961
gcgaggagcgcactccgtggccccgatggagcggtacaaagcacaggggtgttgctgtctggtggtacagagaaggatccggcaggtttctgcgtccctggaacagctgctgacagagttggatgacttcctcaagattcttgaccaggagaacctgagcagcacagcactggtgaagaagagctgcctggcggagctcctccggctttacaccaaaagcagcagctctgatgaggagtacatttatatgaacaaagtgaccatcaacaagcaacagaatgcagagtctcaaggcaaagcgcctgaggagcagggcctgctacccaatggggagcccagccagcactcctcggcccctcagaagagccttccagacctcccgccacccaagatgattccagaacggaaacagcttgccatcccaaagacggagtctccagagggctactatgaagaggctgagccatatgacacatccctcaatgaggacggagaggctgtgagcagctcctacgagtcctacgatgaagaggacggcagcaagggcaagtcggccccttaccagtggccctcgccggaggccggcatcgagctgatgcgtgacgcccgcatctgcgccttcctgtggcgcaagaagtggctgggacagtgggccaagcagctctgtgtcatcaaggacaacaggcttctgtgctacaaatcctccaaggaccacagccctcagctggacgtgaacctactgggcagcagcgtcattcacaaggagaagcaagtgcggaagaaggagcacaagctgaagatcacgccgatgaatgccgatgtgattgtgctgggcctgcagagcaaggaccaggctgagcagtggctcagggtcatccaggaagtgagcggcctgccttccgaaggagcatctgaaggaaaccagtacaccccggatgcccagcgctttaactgccagaaa

SEQ ID NO: 103899 - DNA, 1994 bp, Homo sapiens
  Payload ID: 426
  Gene Symbol: ACTG1
  Gene Name: actin gamma 1
  Uniprot ID: P63261
  ENST ID: ENST00000331925
  CDS Start-End: 148-1275
ggggccgcgcgcgccgccgggccgcgcgggcgcgccgcttccgcttaaataacggcgggggaggccgcggtcggtctcagtcgccgctgccagctctcgcactctgttcttccgccgctccgccgtcgcgtttctctgccggtcgcaatggaagaagagatcgccgcgctggtcattgacaatggctccggcatgtgcaaagctggttttgctggggacgacgctccccgagccgtgtttccttccatcgtcgggcgccccagacaccagggcgtcatggtgggcatgggccagaaggactcctacgtgggcgacgaggcccagagcaagcgtggcatcctgaccctgaagtaccccattgagcatggcatcgtcaccaactgggacgacatggagaagatctggcaccacaccttctacaacgagctgcgcgtggccccggaggagcacccagtgctgctgaccgaggcccccctgaaccccaaggccaacagagagaagatgactcagattatgtttgagaccttcaacaccccggccatgtacgtggccatccaggccgtgctgtccctctacgcctctgggcgcaccactggcattgtcatggactctggagacggggtcacccacacggtgcccatctacgagggctacgccctcccccacgccatcctgcgtctggacctggctggccgggacctgaccgactacctcatgaagatcctcactgagcgaggctacagcttcaccaccacggccgagcgggaaatcgtgcgcgacatcaaggagaagctgtgctacgtcgccctggacttcgagcaggagatggccaccgccgcatcctcctcttctctggagaagagctacgagctgcccgatggccaggtcatcaccattggcaatgagcggttccggtgtccggaggcgctgttccagccttccttcctgggtatggaatcttgcggcatccacgagaccaccttcaactccatcatgaagtgtgacgtggacatccgcaaagacctgtacgccaacacggtgctgtcgggcggcaccaccatgtacccgggcattgccgacaggatgcagaaggagatcaccgccctggcgcccagcaccatgaagatcaagatcatcgcacccccagagcgcaagtactcggtgtggatcggtggctccatcctggcctcactgtccaccttccagcagatgtggattagcaagcaggagtacgacgagtcgggcccctccatcgtccaccgcaaatgcttctaaacggactcagcagatgcgtagcatttgctgcatgggttaattgagaatagaaatttgcccctggcaaatgcacacacctcatgctagcctcacgaaactggaataagccttcgaaaagaaattgtccttgaagcttgtatctgatatcagcactggattgtagaacttgttgctgattttgaccttgtattgaagttaactgttccccttggtatttgtttaataccctgtacatatctttgagttcaacctttagtacgtgtggcttggtcacttcgtggctaaggtaagaacgtgcttgtggaagacaagtctgtggcttggtgagtctgtgtggccagcagcctctgatctgtgcagggtattaacgtgtcagggctgagtgttctgggatttctctagaggctggcaagaaccagttgttttgtcttgcgggtctgtcagggttggaaagtccaagccgtaggacccagtttcctttcttagctgatgtctttggccagaacaccgtgggctgttacttgctttgagttggaagcggtttgcatttacgcctgtaaatgtattcattcttaatttatgtaaggttttttttgtacgcaattctcgattctttgaagagatgacaacaaattttggttttctactgttatgtgagaacattaggccccagcaacacgtcattgtgtaaggaaaaataaaagtgctgccgtaaccaa

SEQ ID NO: 103900 - DNA, 2256 bp, Homo sapiens
  Payload ID: 426
  Gene Symbol: ACTG1
  Gene Name: actin gamma 1
  Uniprot ID: P63261
  ENST ID: ENST00000575842
  CDS Start-End: 428-1555
ctctcgcactctgttcttccgccgctccgccgtcgcgtttctctgccggtgagcgccccgccccggggcctgagctggacgtcgcaggcctgcgccccccgaccccggctggccccgcttccagctgccgaggcctcgtcgcgccttccccgggaacaaaaggcggggtgggccgggtcaggcggacggggctgggggggcgccgggggtccagggcggggcccggccgcagtgcagacttccgagccgtggacgttacgtaaaaggcccggccttcggttccaggcggttgcgatcttggaggccacggccgctggggttggggcagggccgaggcttccccgcgggagggcattaggtggctgtggggaggggaccgtgttacagacgcgcccgcctgagtccatccttttccgggcaggtcgcaatggaagaagagatcgccgcgctggtcattgacaatggctccggcatgtgcaaagctggttttgctggggacgacgctccccgagccgtgtttccttccatcgtcgggcgccccagacaccagggcgtcatggtgggcatgggccagaaggactcctacgtgggcgacgaggcccagagcaagcgtggcatcctgaccctgaagtaccccattgagcatggcatcgtcaccaactgggacgacatggagaagatctggcaccacaccttctacaacgagctgcgcgtggccccggaggagcacccagtgctgctgaccgaggcccccctgaaccccaaggccaacagagagaagatgactcagattatgtttgagaccttcaacaccccggccatgtacgtggccatccaggccgtgctgtccctctacgcctctgggcgcaccactggcattgtcatggactctggagacggggtcacccacacggtgcccatctacgagggctacgccctcccccacgccatcctgcgtctggacctggctggccgggacctgaccgactacctcatgaagatcctcactgagcgaggctacagcttcaccaccacggccgagcgggaaatcgtgcgcgacatcaaggagaagctgtgctacgtcgccctggacttcgagcaggagatggccaccgccgcatcctcctcttctctggagaagagctacgagctgcccgatggccaggtcatcaccattggcaatgagcggttccggtgtccggaggcgctgttccagccttccttcctgggtatggaatcttgcggcatccacgagaccaccttcaactccatcatgaagtgtgacgtggacatccgcaaagacctgtacgccaacacggtgctgtcgggcggcaccaccatgtacccgggcattgccgacaggatgcagaaggagatcaccgccctggcgcccagcaccatgaagatcaagatcatcgcacccccagagcgcaagtactcggtgtggatcggtggctccatcctggcctcactgtccaccttccagcagatgtggattagcaagcaggagtacgacgagtcgggcccctccatcgtccaccgcaaatgcttctaaacggactcagcagatgcgtagcatttgctgcatgggttaattgagaatagaaatttgcccctggcaaatgcacacacctcatgctagcctcacgaaactggaataagccttcgaaaagaaattgtccttgaagcttgtatctgatatcagcactggattgtagaacttgttgctgattttgaccttgtattgaagttaactgttccccttggtatttgtttaataccctgtacatatctttgagttcaacctttagtacgtgtggcttggtcacttcgtggctaaggtaagaacgtgcttgtggaagacaagtctgtggcttggtgagtctgtgtggccagcagcctctgatctgtgcagggtattaacgtgtcagggctgagtgttctgggatttctctagaggctggcaagaaccagttgttttgtcttgcgggtctgtcagggttggaaagtccaagccgtaggacccagtttcctttcttagctgatgtctttggccagaacaccgtgggctgttacttgctttgagttggaagcggtttgcatttacgcctgtaaatgtattcattcttaatttatgtaaggttttttttgtacgcaattctcgattctttgaagagatgacaacaaattttggttttctactgttatgtgagaacattaggccccagcaacacgtcattgtgtaaggaaaaataa

SEQ ID NO: 103901 - DNA, 2002 bp, Homo sapiens
  Payload ID: 426
  Gene Symbol: ACTG1
  Gene Name: actin gamma 1
  Uniprot ID: P63261
  ENST ID: ENST00000573283
  CDS Start-End: 173-1300
tctcgcactctgttcttccgccgctccgccgtcgcgtttctctgccggtgagcgccccgccccggggcctgagctggacgtcgcaggcctgcgccccccgaccccggctggccccgcttccagctgccgaggcctcgtcgcgccttccccgggaacaaaaggcggggtcgcaatggaagaagagatcgccgcgctggtcattgacaatggctccggcatgtgcaaagctggttttgctggggacgacgctccccgagccgtgtttccttccatcgtcgggcgccccagacaccagggcgtcatggtgggcatgggccagaaggactcctacgtgggcgacgaggcccagagcaagcgtggcatcctgaccctgaagtaccccattgagcatggcatcgtcaccaactgggacgacatggagaagatctggcaccacaccttctacaacgagctgcgcgtggccccggaggagcacccagtgctgctgaccgaggcccccctgaaccccaaggccaacagagagaagatgactcagattatgtttgagaccttcaacaccccggccatgtacgtggccatccaggccgtgctgtccctctacgcctctgggcgcaccactggcattgtcatggactctggagacggggtcacccacacggtgcccatctacgagggctacgccctcccccacgccatcctgcgtctggacctggctggccgggacctgaccgactacctcatgaagatcctcactgagcgaggctacagcttcaccaccacggccgagcgggaaatcgtgcgcgacatcaaggagaagctgtgctacgtcgccctggacttcgagcaggagatggccaccgccgcatcctcctcttctctggagaagagctacgagctgcccgatggccaggtcatcaccattggcaatgagcggttccggtgtccggaggcgctgttccagccttccttcctgggtatggaatcttgcggcatccacgagaccaccttcaactccatcatgaagtgtgacgtggacatccgcaaagacctgtacgccaacacggtgctgtcgggcggcaccaccatgtacccgggcattgccgacaggatgcagaaggagatcaccgccctggcgcccagcaccatgaagatcaagatcatcgcacccccagagcgcaagtactcggtgtggatcggtggctccatcctggcctcactgtccaccttccagcagatgtggattagcaagcaggagtacgacgagtcgggcccctccatcgtccaccgcaaatgcttctaaacggactcagcagatgcgtagcatttgctgcatgggttaattgagaatagaaatttgcccctggcaaatgcacacacctcatgctagcctcacgaaactggaataagccttcgaaaagaaattgtccttgaagcttgtatctgatatcagcactggattgtagaacttgttgctgattttgaccttgtattgaagttaactgttccccttggtatttgtttaataccctgtacatatctttgagttcaacctttagtacgtgtggcttggtcacttcgtggctaaggtaagaacgtgcttgtggaagacaagtctgtggcttggtgagtctgtgtggccagcagcctctgatctgtgcagggtattaacgtgtcagggctgagtgttctgggatttctctagaggctggcaagaaccagttgttttgtcttgcgggtctgtcagggttggaaagtccaagccgtaggacccagtttcctttcttagctgatgtctttggccagaacaccgtgggctgttacttgctttgagttggaagcggtttgcatttacgcctgtaaatgtattcattcttaatttatgtaaggttttttttgtacgcaattctcgattctttgaagagatgacaacaaattttggttttctactgttatgtgagaacattaggccccagcaacacgtcattgtgtaaggaaaaataaa

SEQ ID NO: 103902 - DNA, 742 bp, Homo sapiens
  Payload ID: 426
  Gene Symbol: ACTG1
  Gene Name: actin gamma 1
  ENST ID: ENST00000575659
  CDS Start-End: 101-742
gcgggtggcggggaacccgggggtctcgaggcgccagcctcgcccccgcccccacgaccctggcggcctcgggtccgcaacgtggggaagaaaggtcgcaatggaagaagagatcgccgcgctggtcattgacaatggctccggcatgtgcaaagctggttttgctggggacgacgctccccgagccgtgtttccttccatcgtcgggcgccccagacaccagggcgtcatggtgggcatgggccagaaggactcctacgtgggcgacgaggcccagagcaagcgtggcatcctgaccctgaagtaccccattgagcatggcatcgtcaccaactgggacgacatggagaagatctggcaccacaccttctacaacgagctgcgcgtggccccggaggagcacccagtgctgctgaccgaggcccccctgaaccccaaggccaacagagagaagatgactcagattatgtttgagaccttcaacaccccggccatgtacgtggccatccaggccgtgctgtccctctacgcctctgggcgcaccactggcattgtcatggactctggagacggggtcacccacacggtgcccatctacgagggctacgccctcccccacgccatcctgcgtctggacctggctggccgggacctgaccgactacctcatgaagatcctcactgagcgaggctacagcttcaccaccacggccgagcgggaaatcgtgcgcgacatcaaggag

SEQ ID NO: 103903 - DNA, 2001 bp, Homo sapiens
  Payload ID: 426
  Gene Symbol: ACTG1
  Gene Name: actin gamma 1
  Uniprot ID: P63261
  ENST ID: ENST00000575087
  CDS Start-End: 192-1319
cgctgccagctctcgcactctgttcttccgccgctccgccgtcgcgtttctctgccggtgagcgccccgccccggggcctgagctggacgtcgcaggcctgcgccccccgaccccggctggccccgcttccagctgccgaggcctcgtcgcgccttccccgggaacaaaaggcggggtgggccgggtcgcaatggaagaagagatcgccgcgctggtcattgacaatggctccggcatgtgcaaagctggttttgctggggacgacgctccccgagccgtgtttccttccatcgtcgggcgccccagacaccagggcgtcatggtgggcatgggccagaaggactcctacgtgggcgacgaggcccagagcaagcgtggcatcctgaccctgaagtaccccattgagcatggcatcgtcaccaactgggacgacatggagaagatctggcaccacaccttctacaacgagctgcgcgtggccccggaggagcacccagtgctgctgaccgaggcccccctgaaccccaaggccaacagagagaagatgactcagattatgtttgagaccttcaacaccccggccatgtacgtggccatccaggccgtgctgtccctctacgcctctgggcgcaccactggcattgtcatggactctggagacggggtcacccacacggtgcccatctacgagggctacgccctcccccacgccatcctgcgtctggacctggctggccgggacctgaccgactacctcatgaagatcctcactgagcgaggctacagcttcaccaccacggccgagcgggaaatcgtgcgcgacatcaaggagaagctgtgctacgtcgccctggacttcgagcaggagatggccaccgccgcatcctcctcttctctggagaagagctacgagctgcccgatggccaggtcatcaccattggcaatgagcggttccggtgtccggaggcgctgttccagccttccttcctgggtatggaatcttgcggcatccacgagaccaccttcaactccatcatgaagtgtgacgtggacatccgcaaagacctgtacgccaacacggtgctgtcgggcggcaccaccatgtacccgggcattgccgacaggatgcagaaggagatcaccgccctggcgcccagcaccatgaagatcaagatcatcgcacccccagagcgcaagtactcggtgtggatcggtggctccatcctggcctcactgtccaccttccagcagatgtggattagcaagcaggagtacgacgagtcgggcccctccatcgtccaccgcaaatgcttctaaacggactcagcagatgcgtagcatttgctgcatgggttaattgagaatagaaatttgcccctggcaaatgcacacacctcatgctagcctcacgaaactggaataagccttcgaaaagaaattgtccttgaagcttgtatctgatatcagcactggattgtagaacttgttgctgattttgaccttgtattgaagttaactgttccccttggtatttgtttaataccctgtacatatctttgagttcaacctttagtacgtgtggcttggtcacttcgtggctaaggtaagaacgtgcttgtggaagacaagtctgtggcttggtgagtctgtgtggccagcagcctctgatctgtgcagggtattaacgtgtcagggctgagtgttctgggatttctctagaggctggcaagaaccagttgttttgtcttgcgggtctgtcagggttggaaagtccaagccgtaggacccagtttcctttcttagctgatgtctttggccagaacaccgtgggctgttacttgctttgagttggaagcggtttgcatttacgcctgtaaatgtattcattcttaatttatgtaaggttttttttgtacgcaattctcgattctttgaagagatgacaacaaattttggttttctactgttatgtgagaacattaggccccagcaacacgtc

SEQ ID NO: 103904 - DNA, 856 bp, Homo sapiens
  Payload ID: 426
  Gene Symbol: ACTG1
  Gene Name: actin gamma 1
  ENST ID: ENST00000575994
  CDS Start-End: 213-856
ggagaggtggctcctcgccctgctggactggagccctgaaaactgggaaatggagccctggggccaccccgcggctgaggaccacgcctttcacaggccagcagtgcctgcagccctccctgcaggcatcggaggagcccccacctcagtgccaggccctgaccgctgccactcctgttggcatccctgtctccagtgattcccaggtcgcaatggaagaagagatcgccgcgctggtcattgacaatggctccggcatgtgcaaagctggttttgctggggacgacgctccccgagccgtgtttccttccatcgtcgggcgccccagacaccagggcgtcatggtgggcatgggccagaaggactcctacgtgggcgacgaggcccagagcaagcgtggcatcctgaccctgaagtaccccattgagcatggcatcgtcaccaactgggacgacatggagaagatctggcaccacaccttctacaacgagctgcgcgtggccccggaggagcacccagtgctgctgaccgaggcccccctgaaccccaaggccaacagagagaagatgactcagattatgtttgagaccttcaacaccccggccatgtacgtggccatccaggccgtgctgtccctctacgcctctgggcgcaccactggcattgtcatggactctggagacggggtcacccacacggtgcccatctacgagggctacgccctcccccacgccatcctgcgtctggacctggctggccgggacctgaccgactacctcatgaagatcctcactgagcgaggctacagcttcaccaccacggccgagcgggaaatcgtgcgcgacatcaaggagaa

SEQ ID NO: 103905 - DNA, 813 bp, Homo sapiens
  Payload ID: 426
  Gene Symbol: ACTG1
  Gene Name: actin gamma 1
  ENST ID: ENST00000571721
  CDS Start-End: 322-813
tcgcactctgttcttccgccgctccgccgtcgcgtttctctgccggtgagcgccccgccccggggcctgagctggacgtcgcaggcctgcgccccccgaccccggctggccccgcttccagctgccgaggcctcgtcgcgccttccccgggaacaaaaggcggggtgggccgggtcaggcggacggggctgggggggcgccgggggtccagggcggggcccggccgcagtgcagacttccgagccgtggacgttacgtaaaaggcccggccttcggttccaggcggttgcgatcttggaggccacggccgctggggtcgcaatggaagaagagatcgccgcgctggtcattgacaatggctccggcatgtgcaaagctggttttgctggggacgacgctccccgagccgtgtttccttccatcgtcgggcgccccagacaccagggcgtcatggtgggcatgggccagaaggactcctacgtgggcgacgaggcccagagcaagcgtggcatcctgaccctgaagtaccccattgagcatggcatcgtcaccaactgggacgacatggagaagatctggcaccacaccttctacaacgagctgcgcgtggccccggaggagcacccagtgctgctgaccgaggcccccctgaaccccaaggccaacagagagaagatgactcagattatgtttgagaccttcaacaccccggccatgtacgtggccatccaggccgtgctgtccctctacgcctctgggcgcaccactggcattgtcatggactctggagacggggtcacccacacggtgccc

SEQ ID NO: 103906 - DNA, 761 bp, Homo sapiens
  Payload ID: 426
  Gene Symbol: ACTG1
  Gene Name: actin gamma 1
  ENST ID: ENST00000571691
  CDS Start-End: 37-761
ccgccgctccgccgtcgcgtttctctgccggtcgcaatggaagaagagatcgccgcgctggtcattgacaatggctccggcatgtgcaaagctggttttgctggggacgacgctccccgagccgtgtttccttccatcgtcgggcgccccagacaccaggactcctacgtgggcgacgaggcccagagcaagcgtggcatcctgaccctgaagtaccccattgagcatggcatcgtcaccaactgggacgacatggagaagatctggcaccacaccttctacaacgagctgcgcgtggccccggaggagcacccagtgctgctgaccgaggcccccctgaaccccaaggccaacagagagaagatgactcagattatgtttgagaccttcaacaccccggccatgtacgtggccatccaggccgtgctgtccctctacgcctctgggcgcaccactggcattgtcatggactctggagacggggtcacccacacggtgcccatctacgagggctacgccctcccccacgccatcctgcgtctggacctggctggccgggacctgaccgactacctcatgaagatcctcactgagcgaggctacagcttcaccaccacggccgagcgggaaatcgtgcgcgacatcaaggagaagctgtgctacgtcgccctggacttcgagcaggagatggccaccgccgcatcctcctcttctctggagaagagctacgagctgcccgatggccaggtcatcaccattgg

SEQ ID NO: 103907 - DNA, 1720 bp, Homo sapiens
  Payload ID: 426
  Gene Symbol: ACTG1
  Gene Name: actin gamma 1
  Uniprot ID: P63261
  ENST ID: ENST00000576544
  CDS Start-End: 65-1192
ccgctgccagctctcgcactctgttcttccgccgctccgccgtcgcgtttctctgccggtcgcaatggaagaagagatcgccgcgctggtcattgacaatggctccggcatgtgcaaagctggttttgctggggacgacgctccccgagccgtgtttccttccatcgtcgggcgccccagacaccagggcgtcatggtgggcatgggccagaaggactcctacgtgggcgacgaggcccagagcaagcgtggcatcctgaccctgaagtaccccattgagcatggcatcgtcaccaactgggacgacatggagaagatctggcaccacaccttctacaacgagctgcgcgtggccccggaggagcacccagtgctgctgaccgaggcccccctgaaccccaaggccaacagagagaagatgactcagattatgtttgagaccttcaacaccccggccatgtacgtggccatccaggccgtgctgtccctctacgcctctgggcgcaccactggcattgtcatggactctggagacggggtcacccacacggtgcccatctacgagggctacgccctcccccacgccatcctgcgtctggacctggctggccgggacctgaccgactacctcatgaagatcctcactgagcgaggctacagcttcaccaccacggccgagcgggaaatcgtgcgcgacatcaaggagaagctgtgctacgtcgccctggacttcgagcaggagatggccaccgccgcatcctcctcttctctggagaagagctacgagctgcccgatggccaggtcatcaccattggcaatgagcggttccggtgtccggaggcgctgttccagccttccttcctgggtatggaatcttgcggcatccacgagaccaccttcaactccatcatgaagtgtgacgtggacatccgcaaagacctgtacgccaacacggtgctgtcgggcggcaccaccatgtacccgggcattgccgacaggatgcagaaggagatcaccgccctggcgcccagcaccatgaagatcaagatcatcgcacccccagagcgcaagtactcggtgtggatcggtggctccatcctggcctcactgtccaccttccagcagatgtggattagcaagcaggagtacgacgagtcgggcccctccatcgtccaccgcaaatgcttctaaacggactcagcagatgcgtagcatttgctgcatgggttaattgagaatagaaatttgcccctggcaaatgcacacacctcatgctagcctcacgaaactggaataagccttcgaaaagaaattgtccttgaagcttgtatctgatatcagcactggattgtagaacttgttgctgattttgaccttgtattgaagttaactgttccccttgggtattaacgtgtcagggctgagtgttctgggatttctctagaggctggcaagaaccagttgttttgtcttgcgggtctgtcagggttggaaagtccaagccgtaggacccagtttcctttcttagctgatgtctttggccagaacaccgtgggctgttacttgctttgagttggaagcggtttgcatttacgcctgtaaatgtattcattcttaatttatgtaaggttttttttgtacgcaattctcgattctttgaagagatgacaacaaattttggttttctactgttatgtgagaacattaggccccagcaac

SEQ ID NO: 103908 - DNA, 1168 bp, Homo sapiens
  Payload ID: 426
  Gene Symbol: ACTG1
  Gene Name: actin gamma 1
  ENST ID: ENST00000572105
  CDS Start-End: 55-651
ctctcgcactctgttcttccgccgctccgccgtcgcgtttctctgccggtcgcaatggaagaagagatcgccgcgctggtcattgacaatggctccggcatgtgcaaagctggttttgctggggacgacgctccccgagccgtgtttccttccatcgtcgggcgccccagacaccagggcgtcatggtgggcatgggccagaaggactcctacgtgggcgacgaggcccagagcaagcgtggcatcctgaccctgaagtaccccattgagcatggcatcgtcaccaactgggacgacatggagaagatctggcaccacaccttctacaacgagctgcgcgtggccccggaggagcacccagtgctgctgaccgaggcccccctgaaccccaaggccaacagagagaagatgactcaggctctgttcctctcccggcatttcctccctgaagcctccagattatgtttgagaccttcaacaccccggccatgtacgtggccatccaggccgtgctgtccctctacgcctctgggcgcaccactggcattgtcatggactctggagacggggtcacccacacggtgcccatctacgagggctacgccctcccccacgccatcctgcgtctggacctggctggccgggacctgaccgactacctcatgaagatcctcactgagcgaggctacagcttcaccaccacggccgagcgggaaatcgtgcgcgacatcaaggagaagctgtgctacgtcgccctggacttcgagcaggagatggccaccgccgcatcctcctcttctctggagaagagctacgagctgcccgatggccaggtcatcaccattggcaatgagcggttccggtgtccggaggcgctgttccagccttccttcctgggtatggaatcttgcggcatccacgagaccaccttcaactccatcatgaagtgtgacgtggacatccgcaaagacctgtacgccaacacggtgctgtcgggcggcaccaccatgtacccgggcattgccgacaggatgcagaaggagatcaccgccctggcgcccagcaccatgaagatcaagatcatcgcacccccagagcgcaagtactcggtgtggatcggtggctccatcctggcctcactgtccaccttccagcagatgtggattag

SEQ ID NO: 103909 - DNA, 471 bp, Homo sapiens
  Payload ID: 426
  Gene Symbol: ACTG1
  Gene Name: actin gamma 1
  ENST ID: ENST00000570382
  CDS Start-End: 73-471
ctcagtcgccgctgccagctctcgcactctgttcttccgccgctccgccgtcgcgtttctctgccggtcgcaatggaagaagagatcgccgcgctggtcattgacaatggctccggcatgtgcaaagctggttttgctggggacgacgctccccgagccgtgtttccttccatcgtcgggcgccccagacaccagggcgtcatggtgggcatgggccagaaggactcctacgtgggcgacgaggcccagagcaagcgtggcatcctgaccctgaagtaccccattgagcatggcatcgtcaccaactgggacgacatggagaagatctggcaccacaccttctacaacgagctgcgcgtggccccggaggagcacccagtgctgctgaccgaggcccccctgaaccccaaggccgtgctgtccctctacgcctctgggcgcaccactggcattgtcatggactctggagac

SEQ ID NO: 103910 - DNA, 1723 bp, Homo sapiens
  Payload ID: 426
  Gene Symbol: ACTG1
  Gene Name: actin gamma 1
  Uniprot ID: P63261
  ENST ID: ENST00000615544
  CDS Start-End: 29-1156
ccgccgtcgcgtttctctgccggtcgcaatggaagaagagatcgccgcgctggtcattgacaatggctccggcatgtgcaaagctggttttgctggggacgacgctccccgagccgtgtttccttccatcgtcgggcgccccagacaccagggcgtcatggtgggcatgggccagaaggactcctacgtgggcgacgaggcccagagcaagcgtggcatcctgaccctgaagtaccccattgagcatggcatcgtcaccaactgggacgacatggagaagatctggcaccacaccttctacaacgagctgcgcgtggccccggaggagcacccagtgctgctgaccgaggcccccctgaaccccaaggccaacagagagaagatgactcagattatgtttgagaccttcaacaccccggccatgtacgtggccatccaggccgtgctgtccctctacgcctctgggcgcaccactggcattgtcatggactctggagacggggtcacccacacggtgcccatctacgagggctacgccctcccccacgccatcctgcgtctggacctggctggccgggacctgaccgactacctcatgaagatcctcactgagcgaggctacagcttcaccaccacggccgagcgggaaatcgtgcgcgacatcaaggagaagctgtgctacgtcgccctggacttcgagcaggagatggccaccgccgcatcctcctcttctctggagaagagctacgagctgcccgatggccaggtcatcaccattggcaatgagcggttccggtgtccggaggcgctgttccagccttccttcctgggtatggaatcttgcggcatccacgagaccaccttcaactccatcatgaagtgtgacgtggacatccgcaaagacctgtacgccaacacggtgctgtcgggcggcaccaccatgtacccgggcattgccgacaggatgcagaaggagatcaccgccctggcgcccagcaccatgaagatcaagatcatcgcacccccagagcgcaagtactcggtgtggatcggtggctccatcctggcctcactgtccaccttccagcagatgtggattagcaagcaggagtacgacgagtcgggcccctccatcgtccaccgcaaatgcttctaaacggactcagcagatgcgtagcatttgctgcatgggttaattgagaatagaaatttgcccctggcaaatgcacacacctcatgctagcctcacgaaactggaataagccttcgaaaagaaattgtccttgaagcttgtatctgatatcagcactggattgtagaacttgttgctgattttgaccttgtattgaagttaactgttccccttggtattaacgtgtcagggctgagtgttctgggatttctctagaggctggcaagaaccagttgttttgtcttgcgggtctgtcagggttggaaagtccaagccgtaggacccagtttcctttcttagctgatgtctttggccagaacaccgtgggctgttacttgctttgagttggaagcggtttgcatttacgcctgtaaatgtattcattcttaatttatgtaaggttttttttgtacgcaattctcgattctttgaagagatgacaacaaattttggttttctactgttatgtgagaacattaggccccagcaacacgtcattgtgtaaggaaaaataaaagtgctgccgtaacc

SEQ ID NO: 103911 - DNA, 1565 bp, Homo sapiens
  Payload ID: 427
  Gene Symbol: ARPC1A
  Gene Name: actin related protein 2/3 complex, subunit 1A, 41kDa
  Uniprot ID: Q92747
  ENST ID: ENST00000262942
  CDS Start-End: 125-1237
gtcctccgcccgcgcccgacggagcctgttcgcgtcgactgcccagagtccgcgaatcctccgctccgagcccgtccggactcccccgatcccagctttctctcctttgaaaacactaagaataatgtcactgcatcagtttttactagagccaatcacctgtcatgcctggaacagggatcgtactcagattgccctcagtcccaataatcacgaagtgcacatctataagaagaacgggagccagtgggtgaaagctcatgaactcaaggagcacaacggacacatcacaggtattgactgggctcccaagagcgaccgcattgtcacttgtggggcagaccgcaatgcctatgtctggagtcagaaagatggtgtttggaagccaaccctggtgatcctgagaattaatcgcgcagctacttttgtgaagtggtcccccctagagaacaaatttgctgtgggaagtggagcacgactcatttctgtttgttactttgagtctgaaaatgactggtgggtgagcaagcacattaaaaagccgattcgctccacagtcctcagcttggattggcatcccaacaacgttttgctggcagcaggatcatgtgacttcaaatgcagagtgttttctgcctacattaaagaagtggatgaaaagccagccagcacgccctggggcagcaagatgccttttgggcagctgatgtcagagtttggtggcagtggcactggtggctgggtccacggggtaagcttctctgccagtgggagccgcctggcctgggtcagccacgacagcaccgtgtctgttgctgatgcctcaaaaagtgtgcaggtctcgactctgaagacagagttcctgccgctcctaagtgtgtcatttgtctcagagaacagcgtcgtggctgctggccatgactgctgcccaatgctctttaactacgatgaccgcggctgcctgaccttcgtctccaagttagatattccaaaacagagcatccaacgcaacatgtctgccatggaacgcttccgcaacatggacaagagagccacaactgaggaccgcaacacggccttggagacgctgcaccagaatagcatcactcaagtctctatttatgaggtggacaagcaagattgtcgcaaattttgcactactggcatcgatggagccatgacaatttgggatttcaagaccctcgagtcttccatccagggcctccggataatgtgaagctgagtgagcctccgccatccagcatgacaaactgtggccgaccgcagctgtgccgtggcacgatggcgaggaagccagccccaaggaaacactgaaaacacatatcacgccaatgccgtgtggttttgtttgaatataaaattggtgaaagtgttggtttttttaaggcagtaatttttttgtttgtttttttgcgatttcattccattcttgaccaaagcttctctttaagtagtttattatggaaaattgtcacactaacttaaaagacagggtgagggagatatgtaaattgtccactagaaaattaaataaaagaactgaa

SEQ ID NO: 103912 - DNA, 1516 bp, Homo sapiens
  Payload ID: 427
  Gene Symbol: ARPC1A
  Gene Name: actin related protein 2/3 complex, subunit 1A, 41kDa
  ENST ID: ENST00000432786
  CDS Start-End: 108-947
gacggagcctgttcgcgtcgactgcccagagtccgcgaatcctccgctccgagcccgtccggactcccccgatcccagctttctctcctttgaaaacactaagaataatgtcactgcatcagtttttactagagccaatcacctgtcatgcctggaacagggatcgtactcagattgccctcagtcccaataatcacgaagtgcacatctataagaagaacgggagccagtgggtgaaagctcatgaactcaaggagcacaacggacacatcacaggtattgactgggctcccaagagcgaccgcattgtcacttgtggggcagaccgcaatgcctatgtctggagtcagaaagatggtgtttggaagccaaccctggtgatcctgagaattaatcgcgcagctacttttgtgaagtggtcccccctagagaacaaatttgctgtgggaagtggagcacgactcatttctgtttgttactttgagtctgaaaatgactggtgggtgagcaagcacattaaaaagccgattcgctccacagtcctcagcttggattggcatcccaacaacgttttgctggcagcaggatcatgtgacttcaaatgcagagtgttttctgcctacattaaagaagtggatgaaaagccagccagcacgccctggggcagcaagatgccttttgggcagctgatgtcagagtttggtggcagtggcactggtggctgggtccacggggtaagcttctctgccagtgggagccgcctggcctgggtcagccacgacagcaccgtgtctgttgctgatgcctcaaaaagtgtgcaggtctcgactctgaagacagagttcctgccgctcctaagtgtgtcatttgtctcagagaacagctcttgtttcagggccatgactgctgcccaatgctctttaactacgatgaccgcggctgcctgaccttcgtctccaagttagatattccaaaacagagcatccaacgcaacatgtctgccatggaacgcttccgcaacatggacaagagagccacaactgaggaccgcaacacggccttggagacgctgcaccagaatagcatcactcaagtctctatttatgaggtggacaagcaagattgtcgcaaattttgcactactggcatcgatggagccatgacaatttgggatttcaagaccctcgagtcttccatccagggcctccggataatgtgaagctgagtgagcctccgccatccagcatgacaaactgtggccgaccgcagctgtgccgtggcacgatggcgaggaagccagccccaaggaaacactgaaaacacatatcacgccaatgccgtgtggttttgtttgaatataaaattggtgaaagtgttggtttttttaaggcagtaatttttttgtttgtttttttgcgatttcattccattcttgaccaaagcttctctttaagtagtttattatggaaaattgtcacactaacttaaaagacagggtgagggagatatgtaaatt

SEQ ID NO: 103913 - DNA, 1702 bp, Homo sapiens
  Payload ID: 427
  Gene Symbol: ARPC1A
  Gene Name: actin related protein 2/3 complex, subunit 1A, 41kDa
  ENST ID: ENST00000441989
  CDS Start-End: 137-298
ctctgggcttccgtcctccgcccgcgcccgacggagcctgttcgcgtcgactgcccagagtccgcgaatcctccgctccgagcccgtccggactcccccgatcccagctttctctcctttgaaaacactaagaataatgtcactgcatcagtttttactagagccaatcacctgtcatgcctggaacagggatcgtactcgaccagtctgtcttgattactatagcttggtgagattgccctcagtcccaataatcacgaagtgcacatctataagaagaacgggagccagtgggtgaaagctcatgaactcaaggagcacaacggacacatcacagggtatgcatatctgcagtgcagtgttgccaggcctcatcagattgccatcattcccacctgtcctgtatgagagtgctcattttcccacaccccgccacatacttgagatgggaagactgaagaatgcatgaaaggttcatccattgcttctgtattgactgggctcccaagagcgaccgcattgtcacttgtggggcagaccgcaatgcctatgtctggagtcagaaagatggtgtttggaagccaaccctggtgatcctgagaattaatcgcgcagctacttttgtgaagtggtcccccctagagaacaaatttgctgtgggaagtggagcacgactcatttctgtttgttactttgagtctgaaaatgactggtgggtgagcaagcacattaaaaagccgattcgctccacagtcctcagcttggattggcatcccaacaacgttttgctggcagcaggatcatgtgacttcaaatgcagagtgttttctgcctacattaaagaagtggatgaaaagccagccagcacgccctggggcagcaagatgccttttgggcagctgatgtcagagtttggtggcagtggcactggtggctgggtccacggggtaagcttctctgccagtgggagccgcctggcctgggtcagccacgacagcaccgtgtctgttgctgatgcctcaaaaagtgtgcaggtctcgactctgaagacagagttcctgccgctcctaagtgtgtcatttgtctcagagaacagcgtcgtggctgctggccatgactgctgcccaatgctctttaactacgatgaccgcggctgcctgaccttcgtctccaagttagatattccaaaacagagcatccaacgcaacatgtctgccatggaacgcttccgcaacatggacaagagagccacaactgaggaccgcaacacggccttggagacgctgcaccagaatagcatcactcaagtctctatttatgaggtggacaagcaagattgtcgcaaattttgcactactggcatcgatggagccatgacaatttgggatttcaaggagccaagccgccatggcctaccacagcttcctggtggagcccatcagctgccacgcctggaacaaggaccgcacccagattgccatctgccccaacaaccatgaggtgcatatctatgaaaagagcggtgccaaatggaccaaggtgcacgagctcaaggagcacaacgggcaggtgacaggcatcgactgggcccccgagagtaaccgtattgtgacctgcggcacagaccgcaacgcctacgtgtggacgctgaagggccgcacatggaagcccacgctggtcatcctgcggatcaaccgggctg

SEQ ID NO: 103914 - DNA, 1551 bp, Homo sapiens
  Payload ID: 428
  Gene Symbol: ARPC1B
  Gene Name: actin related protein 2/3 complex, subunit 1B, 41kDa
  Uniprot ID: O15143
  ENST ID: ENST00000252725
  CDS Start-End: 121-1239
ggcaggccccgccccccgcccacgaggaagtggctgctgctccggcgcggagcccagagccggttcggcgcgtcgactgcccagagtccgcggccggggcgcgggaggagccaagccgccatggcctaccacagcttcctggtggagcccatcagctgccacgcctggaacaaggaccgcacccagattgccatctgccccaacaaccatgaggtgcatatctatgaaaagagcggtgccaaatggaccaaggtgcacgagctcaaggagcacaacgggcaggtgacaggcatcgactgggcccccgagagtaaccgtattgtgacctgcggcacagaccgcaacgcctacgtgtggacgctgaagggccgcacatggaagcccacgctggtcatcctgcggatcaaccgggctgcccgctgcgtgcgctgggcccccaacgagaacaagtttgctgtgggcagcggctctcgtgtgatctccatctgttatttcgagcaggagaatgactggtgggtttgcaagcacatcaagaagcccatccgctccaccgtcctcagcctggactggcaccccaacaatgtgctgctggctgccggctcctgtgacttcaagtgtcggatcttttcagcctacatcaaggaggtggaggaacggccggcacccaccccgtggggctccaagatgccctttggggaactgatgttcgaatccagcagtagctgcggctgggtacatggcgtctgtttctcagccagcgggagccgcgtggcctgggtaagccacgacagcaccgtctgcctggctgatgccgacaagaagatggccgtcgcgactctggcctctgaaacactaccactgctggcgctgaccttcatcacagacaacagcctggtggcagcgggccacgactgcttcccggtgctgttcacctatgacgccgccgcggggatgctgagcttcggcgggcggctggacgttcctaagcagagctcgcagcgtggcttgacggcccgcgagcgcttccagaacctggacaagaaggcgagctccgagggtggcacggctgcgggcgcgggcctagactcgctgcacaagaacagcgtcagccagatctcggtgctcagcggcggcaaggccaagtgctcgcagttctgcaccactggcatggatggcggcatgagtatctgggatgtgaagagcttggagtcagccttgaaggacctcaagatcaaatgacctgtgaggaatatgttgccttcatcctagctgctggggaagcggggagaggggtcagggaggctaatggttgctttgctgaatgtttctggggtaccaatacgagttcccataggggctgctccctcaaaaagggaggggacagatggggagcttttcttacctattcaaggaatacgtgcctttttcttaaatgctttcatttattgaaaaaaaaaaaaaatgcccccaaagcactatgctggtcatgaactgcttcaaaatgtggaggtaataaaatgcaactgtgtaaaaaaaaaaaaaaaaaaaaaa

SEQ ID NO: 103915 - DNA, 561 bp, Homo sapiens
  Payload ID: 428
  Gene Symbol: ARPC1B
  Gene Name: actin related protein 2/3 complex, subunit 1B, 41kDa
  ENST ID: ENST00000458033
  CDS Start-End: 164-561
agagccggttcggcgcgtcgactgcccagagtccgcggccggggcgcgggaggctggagtgtggtgacactaccttgactcactgcagcatctgcctcccgggttccagtgattctcctgcctcagcctctcaggtagctgggattacaggagccaagccgccatggcctaccacagcttcctggtggagcccatcagctgccacgcctggaacaaggaccgcacccagattgccatctgccccaacaaccatgaggtgcatatctatgaaaagagcggtgccaaatggaccaaggtgcacgagctcaaggagcacaacgggcaggtgacaggcatcgactgggcccccgagagtaaccgtattgtgacctgcggcacagaccgcaacgcctacgtgtggacgctgaagggccgcacatggaagcccacgctggtcatcctgcggatcaaccgggctgcccgctgcgtgcgctgggcccccaacgagaacaagtttgctgtgggcagcggctctcgtgtgatctccatctgttatttcgagcaggagaatgactggtgggt

SEQ ID NO: 103916 - DNA, 1715 bp, Homo sapiens
  Payload ID: 428
  Gene Symbol: ARPC1B
  Gene Name: actin related protein 2/3 complex, subunit 1B, 41kDa
  Uniprot ID: O15143
  ENST ID: ENST00000451682
  CDS Start-End: 310-1428
agagccggttcggcgcgtcgactgcccagagtccgcggccggggcgcgggagtgttcccccaggtgaacctaacttcctggcctccaagatttggggtcagagtcccaagctgcgtcatttagtagaagccgagtgactttgaacaaatcgttgcttttgtctgagcctgggtttcctcctgtacaaactgaagtgtcttgttctgttgcccaggctggagtgtggtgacactaccttgactcactgcagcatctgcctcccgggttccagtgattctcctgcctcagcctctcaggagccaagccgccatggcctaccacagcttcctggtggagcccatcagctgccacgcctggaacaaggaccgcacccagattgccatctgccccaacaaccatgaggtgcatatctatgaaaagagcggtgccaaatggaccaaggtgcacgagctcaaggagcacaacgggcaggtgacaggcatcgactgggcccccgagagtaaccgtattgtgacctgcggcacagaccgcaacgcctacgtgtggacgctgaagggccgcacatggaagcccacgctggtcatcctgcggatcaaccgggctgcccgctgcgtgcgctgggcccccaacgagaacaagtttgctgtgggcagcggctctcgtgtgatctccatctgttatttcgagcaggagaatgactggtgggtttgcaagcacatcaagaagcccatccgctccaccgtcctcagcctggactggcaccccaacaatgtgctgctggctgccggctcctgtgacttcaagtgtcggatcttttcagcctacatcaaggaggtggaggaacggccggcacccaccccgtggggctccaagatgccctttggggaactgatgttcgaatccagcagtagctgcggctgggtacatggcgtctgtttctcagccagcgggagccgcgtggcctgggtaagccacgacagcaccgtctgcctggctgatgccgacaagaagatggccgtcgcgactctggcctctgaaacactaccactgctggcgctgaccttcatcacagacaacagcctggtggcagcgggccacgactgcttcccggtgctgttcacctatgacgccgccgcggggatgctgagcttcggcgggcggctggacgttcctaagcagagctcgcagcgtggcttgacggcccgcgagcgcttccagaacctggacaagaaggcgagctccgagggtggcacggctgcgggcgcgggcctagactcgctgcacaagaacagcgtcagccagatctcggtgctcagcggcggcaaggccaagtgctcgcagttctgcaccactggcatggatggcggcatgagtatctgggatgtgaagagcttggagtcagccttgaaggacctcaagatcaaatgacctgtgaggaatatgttgccttcatcctagctgctggggaagcggggagaggggtcagggaggctaatggttgctttgctgaatgtttctggggtaccaatacgagttcccataggggctgctccctcaaaaagggaggggacagatggggagcttttcttacctattcaaggaatacgtgcctttttcttaaatgctttcatttattgaaaaaaaaaaaaaatgcccccaaagcactatgctggtcatgaactgcttcaaaatgtggaggtaataaaatgcaactg

SEQ ID NO: 103917 - DNA, 581 bp, Homo sapiens
  Payload ID: 428
  Gene Symbol: ARPC1B
  Gene Name: actin related protein 2/3 complex, subunit 1B, 41kDa
  ENST ID: ENST00000431816
  CDS Start-End: 184-581
agagccggttcggcgcgtcgactgcccagagtccgcggccggggcgcgggagtgtcttgttctgttgcccaggctggagtgtggtgacactaccttgactcactgcagcatctgcctcccgggttccagtgattctcctgcctcagcctctcaggtagctgggattacaggagccaagccgccatggcctaccacagcttcctggtggagcccatcagctgccacgcctggaacaaggaccgcacccagattgccatctgccccaacaaccatgaggtgcatatctatgaaaagagcggtgccaaatggaccaaggtgcacgagctcaaggagcacaacgggcaggtgacaggcatcgactgggcccccgagagtaaccgtattgtgacctgcggcacagaccgcaacgcctacgtgtggacgctgaagggccgcacatggaagcccacgctggtcatcctgcggatcaaccgggctgcccgctgcgtgcgctgggcccccaacgagaacaagtttgctgtgggcagcggctctcgtgtgatctccatctgttatttcgagcaggagaatgactggtgggt

SEQ ID NO: 103918 - DNA, 572 bp, Homo sapiens
  Payload ID: 428
  Gene Symbol: ARPC1B
  Gene Name: actin related protein 2/3 complex, subunit 1B, 41kDa
  ENST ID: ENST00000414376
  CDS Start-End: 267-572
acagttggcgcccaccggcatcagcgtgaagggagctcctcgctggctgccgacggggctgcagggctcgctagccgctcacctgcgtgtgagcgcggagcccgcagtacccgccgtccgggctcagaggacgtgactccccgaccctgcgcccggcagtccccgggggccgtgcgcccggcccaggctcggaggtccagcccagcggcggctcaggctgcgcgcctggctcccagcctcagtttccccattggagccaagccgccatggcctaccacagcttcctggtggagcccatcagctgccacgcctggaacaaggaccgcacccagattgccatctgccccaacaaccatgaggtgcatatctatgaaaagagcggtgccaaatggaccaaggtgcacgagctcaaggagcacaacgggcaggtgacaggcatcgactgggcccccgagagtaaccgtattgtgacctgcggcacagaccgcaacgcctacgtgtggacgctgaagggccgcacatggaagcccacgctggtcatcctgcggatcaaccgggctgcccgctgcgtg

SEQ ID NO: 103919 - DNA, 839 bp, Homo sapiens
  Payload ID: 428
  Gene Symbol: ARPC1B
  Gene Name: actin related protein 2/3 complex, subunit 1B, 41kDa
  ENST ID: ENST00000432343
  CDS Start-End: 16-408
aggagccaagccgccatggcctaccacagcttcctggtggagcccatcagctgccacgcctggaacaaggaccgcacccagattgccatctgccccaacaaccatgaggtgcatatctatgaaaagagcggtgccaaatggaccaaggtgcacgagctcaaggagcacaacgggcaggtgacaggcatcgactgggcccccgagagtaaccgtattgtgacctgcggcacagaccgcaacgcctacgtgtggacgctgaagggccgcacatggaagcccacgctggtcatcctgcggatcaaccgggctgcccgctgcgtgcgctgggcccccaacgagaacaagtttgctgtgggcagcggctctcgtgtgatctccatctgttatttcgagcaggagaatgactgatggagtctcactctgtcacccaggctggagtgcagtggcacgatcttggctcacggcagcctctgcctgccgggttcgagcagttctctgcctcagcctcccaagtagctgggattacaggcacctgctaccatgcccggataatttttatatttttagtagagatggggtttcaccatcttggccaggtgggtttgcaagcacatcaagaagcccatccgctccaccgtcctcagcctggactggcaccccaacaatgtgctgctggctgccggctcctgtgacttcaagtgtcggatcttttcagcctacatcaaggaggtggaggaacggccggcacccaccccgtggggctccaagatgccctttggggaactgatgttcgaatccagcagtagctgcggctgggtacatggcgtctgtttctcagc

SEQ ID NO: 103920 - DNA, 545 bp, Homo sapiens
  Payload ID: 428
  Gene Symbol: ARPC1B
  Gene Name: actin related protein 2/3 complex, subunit 1B, 41kDa
  ENST ID: ENST00000427217
  CDS Start-End: 148-545
agagccggttcggcgcgtcgactgcccagagtccgcggccggggcgcgggaggctggagtgtggtgacactaccttgactcactgcagcatctgcctcccgggttccagtgattctcctgcctcagcctctcaggagccaagccgccatggcctaccacagcttcctggtggagcccatcagctgccacgcctggaacaaggaccgcacccagattgccatctgccccaacaaccatgaggtgcatatctatgaaaagagcggtgccaaatggaccaaggtgcacgagctcaaggagcacaacgggcaggtgacaggcatcgactgggcccccgagagtaaccgtattgtgacctgcggcacagaccgcaacgcctacgtgtggacgctgaagggccgcacatggaagcccacgctggtcatcctgcggatcaaccgggctgcccgctgcgtgcgctgggcccccaacgagaacaagtttgctgtgggcagcggctctcgtgtgatctccatctgttatttcgagcaggagaatgactggtgggt

SEQ ID NO: 103921 - DNA, 559 bp, Homo sapiens
  Payload ID: 428
  Gene Symbol: ARPC1B
  Gene Name: actin related protein 2/3 complex, subunit 1B, 41kDa
  ENST ID: ENST00000417330
  CDS Start-End: 168-559
agagccggttcggcgcgtcgactgcccagagtccgcggccggggcgcgggagtgtcttgttctgttgcccaggctggagtgtggtgacactaccttgactcactgcagcatctgcctcccgggttccagtgattctcctgcctcagcctctcaggagccaagccgccatggcctaccacagcttcctggtggagcccatcagctgccacgcctggaacaaggaccgcacccagattgccatctgccccaacaaccatgaggtgcatatctatgaaaagagcggtgccaaatggaccaaggtgcacgagctcaaggagcacaacgggcaggtgacaggcatcgactgggcccccgagagtaaccgtattgtgacctgcggcacagaccgcaacgcctacgtgtggacgctgaagggccgcacatggaagcccacgctggtcatcctgcggatcaaccgggctgcccgctgcgtgcgctgggcccccaacgagaacaagtttgctgtgggcagcggctctcgtgtgatctccatctgttatttcgagcaggagaatgactg

SEQ ID NO: 103922 - DNA, 727 bp, Homo sapiens
  Payload ID: 428
  Gene Symbol: ARPC1B
  Gene Name: actin related protein 2/3 complex, subunit 1B, 41kDa
  ENST ID: ENST00000445924
  CDS Start-End: 16-114
aggagccaagccgccatggcctaccacagcttcctggtggagcccatcagctgccacgcctggaacaaggaccgcacccgacagccagttccaggagaagacagggtggcctagcagggcctgaaggacttcagggggcccctgcaaggcagaagaggagagactgagtcatgaaagagattgccatctgccccaacaaccatgaggtgcatatctatgaaaagagcggtgccaaatggaccaaggtgcacgagctcaaggagcacaacgggcaggtgacaggcatcgactgggcccccgagagtaaccgtattgtgacctgcggcacagaccgcaacgcctacgtgtggacgctgaagggccgcacatggaagcccacgctggtcatcctgcggatcaaccgggctgcccgctgcgtgcgctgggcccccaacgagaacaagtttgctgtgggcagcggctctcgtgtgatctccatctgttatttcgagcaggagaatgactggtgggtttgcaagcacatcaagaagcccatccgctccaccgtcctcagcctggactggcaccccaacaatgtgctgctggctgccggctcctgtgacttcaagtgtcggatcttttcagcctacatcaaggaggtggaggaacggccggcacccaccccgtggggctccaagatgccctttggggaactgatgttcgaatccagcagtagctgcggctgggt

SEQ ID NO: 103923 - DNA, 348 bp, Homo sapiens
  Payload ID: 428
  Gene Symbol: ARPC1B
  Gene Name: actin related protein 2/3 complex, subunit 1B, 41kDa
  ENST ID: ENST00000429246
  CDS Start-End: 285-348
agagccggttcggcgcgtcgactgcccagagtccgcggccggggcgcgggaggctggagtgtggtgacactaccttgactcactgcagcatctgcctcccgggttccagtgattctcctgcctcagcctctcaggtagctgggattacaggtccctgtgatgctgggaaactgagtcacggaggcggggagagatgtgtttgaggaattgggctgagaccgtgatctcacccccgtcaggcctggtgggctcctttgacactcagcggcaggagccaagccgccatggcctaccacagcttcctggtggagcccatcagctgccacgcctggaacaaggaccgcaccc

SEQ ID NO: 103924 - DNA, 580 bp, Homo sapiens
  Payload ID: 428
  Gene Symbol: ARPC1B
  Gene Name: actin related protein 2/3 complex, subunit 1B, 41kDa
  ENST ID: ENST00000455009
  CDS Start-End: 195-580
gctgctgctccggcgcggagcccagagccggttcggcgcgtcgactgcccagagtccgcggccggggcgcgggagacagtgtcttgttctgttgcccaggctggagtgtggtgacactaccttgactcactgcagcatctgcctcccgggttccagtgattctcctgcctcagcctctcaggagccaagccgccatggcctaccacagcttcctggtggagcccatcagctgccacgcctggaacaaggaccgcacccagattgccatctgccccaacaaccatgaggtgcatatctatgaaaagagcggtgccaaatggaccaaggtgcacgagctcaaggagcacaacgggcaggtgacaggcatcgactgggcccccgagagtaaccgtattgtgacctgcggcacagaccgcaacgcctacgtgtggacgctgaagggccgcacatggaagcccacgctggtcatcctgcggatcaaccgggctgcccgctgcgtgcgctgggcccccaacgagaacaagtttgctgtgggcagcggctctcgtgtgatctccatctgttatttcgagcaggagaa

SEQ ID NO: 103925 - DNA, 563 bp, Homo sapiens
  Payload ID: 428
  Gene Symbol: ARPC1B
  Gene Name: actin related protein 2/3 complex, subunit 1B, 41kDa
  ENST ID: ENST00000418347
  CDS Start-End: 316-563
cagagccggttcggcgcgtcgactgcccagagtccgcggccggggcgcgggaggtgaacctaacttcctggcctccaagatttggggtcagagtcccaagctgcgtcatttagtagaagccgagtgactttgaacaaatcgttgcttttgtctgagcctgggtttcctcctgtacaaactgaagtgtcttgttctgttgcccaggctggagtgtggtgacactaccttgactcactgcagcatctgcctcccgggttccagtgattctcctgcctcagcctctcaggtagctgggattacaggagccaagccgccatggcctaccacagcttcctggtggagcccatcagctgccacgcctggaacaaggaccgcacccagattgccatctgccccaacaaccatgaggtgcatatctatgaaaagagcggtgccaaatggaccaaggtgcacgagctcaaggagcacaacgggcaggtgacaggcatcgactgggcccccgagagtaaccgtattgtgacctgcggcacagaccgcaacgcctacgtgtggacgctgaaggg

SEQ ID NO: 103926 - DNA, 669 bp, Homo sapiens
  Payload ID: 428
  Gene Symbol: ARPC1B
  Gene Name: actin related protein 2/3 complex, subunit 1B, 41kDa
  ENST ID: ENST00000443222
  CDS Start-End: 344-669
cagggcctgcacagttggcgcccaccggcatcagcgtgaagggagctcctcgctggctgccgacggggctgcagggctcgctagccgctcacctgcgtgtgagcgcggagcccgcagtacccgccgtccgggctcagaggacgtgactccccgaccctgcgcccggcagtccccgggggccgtgcgcccggcccaggctcggaggtccagcccagcggcggctcaggctgcgcgcctggctcccagcctcagtttccccattggtaaagcattgacggtggttgcggacggcttctgcggacagagccttgggctccgacgtctgcgcgggagccaagccgccatggcctaccacagcttcctggtggagcccatcagctgccacgcctggaacaaggaccgcacccagattgccatctgccccaacaaccatgaggtgcatatctatgaaaagagcggtgccaaatggaccaaggtgcacgagctcaaggagcacaacgggcaggtgacaggcatcgactgggcccccgagagtaaccgtattgtgacctgcggcacagaccgcaacgcctacgtgtggacgctgaagggccgcacatggaagcccacgctggtcatcctgcggatcaaccgggctgcccgctgcgtgcgctgggcccccaacgagaa

SEQ ID NO: 103927 - DNA, 1605 bp, Homo sapiens
  Payload ID: 429
  Gene Symbol: ARPC2
  Gene Name: actin related protein 2/3 complex, subunit 2, 34kDa
  Uniprot ID: O15144
  ENST ID: ENST00000295685
  CDS Start-End: 262-1164
gcggcggcggcggctcggcaggcgggttcaggcttcgggggccaggtcggttgggtgggtgggtgtctccacagtctgcgtgcgtgggccagcgcgttcgtcttacccttccctccaccccggcccctctccccttctcccctaacctcctaccccacccagccccactcagggggcagcagggccgctccctccgtccttgcctcccttacccaccctcaccggcccttgtttctccttcccctgggggcagccgccgccatgatcctgctggaggtgaacaaccgcatcatcgaggagacgctcgcgctcaagttcgagaacgcggccgccggaaacaaaccggaagcagtagaagtaacatttgcagatttcgatggggtcctctatcatatttcaaatcctaatggagacaaaacaaaagtgatggtcagtatttctttgaaattctacaaggaacttcaggcacatggtgctgatgagttattaaagagggtgtacgggagtttcttggtaaatccagaatcaggatacaatgtctctttgctatatgaccttgaaaatcttccggcatccaaggattccattgtgcatcaagctggcatgttgaagcgaaattgttttgcctctgtctttgaaaaatacttccaattccaagaagagggcaaggaaggagagaacagggcagttatccattatagggatgatgagaccatgtatgttgagtctaaaaaggacagagtcacagtagtcttcagcacagtgtttaaggatgacgacgatgtggtcattggaaaggtgttcatgcaggagttcaaagaaggacgcagagccagccacacagccccacaggtcctctttagccacagggaacctcctctggagctgaaagacacagacgccgctgtgggtgacaacattggctacattacctttgtgctgttccctcgtcacaccaatgccagtgctcgagacaacaccatcaacctgatccacacgttccgggactacctgcactaccacatcaagtgctctaaggcctatattcacacacgtatgcgggcgaaaacgtctgacttcctcaaggtgctgaaccgcgcacgcccagatgccgagaaaaaagaaatgaaaacaatcacggggaagacgttttcatcccgctaatcttgggaataagaggaggaagcggctggcaactgaaggctggaacacttgctactggataatcgtagcttttaatgttgcgcctcttcaggttcttaagggattctccgttttggttccattttgtacacgtttggaaaataatctgcagaaacgagctgtgcttgcaaagacttcatagttcccaagaattaaaaaaaaaaaaaaaagaattccacttgatcaacttaattccttttctttatcttccctccctcacttcccttttctcccaccctcttttccaagctgtttcgctttgcaatatattactggtaatgagttgcaggataatgcagtcataacttgttttctcctaagtatttgagttcaaaactcctgtatctaaagaaatacggttggggtcattaataaagaaaatctttctatcttacatgagaa

SEQ ID NO: 103928 - DNA, 1505 bp, Homo sapiens
  Payload ID: 429
  Gene Symbol: ARPC2
  Gene Name: actin related protein 2/3 complex, subunit 2, 34kDa
  Uniprot ID: O15144
  ENST ID: ENST00000315717
  CDS Start-End: 170-1072
ggcgccgcggggccgcgcgtccaggcggcgagcggaagtgggtgtgagagcggaagtggccggctagagccgggggctgggcggggaccgggcttgtcggtgaagcggcagtggcggcggcggcggcggctcggcaggcgggttcaggcttcgggggccagccgccgccatgatcctgctggaggtgaacaaccgcatcatcgaggagacgctcgcgctcaagttcgagaacgcggccgccggaaacaaaccggaagcagtagaagtaacatttgcagatttcgatggggtcctctatcatatttcaaatcctaatggagacaaaacaaaagtgatggtcagtatttctttgaaattctacaaggaacttcaggcacatggtgctgatgagttattaaagagggtgtacgggagtttcttggtaaatccagaatcaggatacaatgtctctttgctatatgaccttgaaaatcttccggcatccaaggattccattgtgcatcaagctggcatgttgaagcgaaattgttttgcctctgtctttgaaaaatacttccaattccaagaagagggcaaggaaggagagaacagggcagttatccattatagggatgatgagaccatgtatgttgagtctaaaaaggacagagtcacagtagtcttcagcacagtgtttaaggatgacgacgatgtggtcattggaaaggtgttcatgcaggagttcaaagaaggacgcagagccagccacacagccccacaggtcctctttagccacagggaacctcctctggagctgaaagacacagacgccgctgtgggtgacaacattggctacattacctttgtgctgttccctcgtcacaccaatgccagtgctcgagacaacaccatcaacctgatccacacgttccgggactacctgcactaccacatcaagtgctctaaggcctatattcacacacgtatgcgggcgaaaacgtctgacttcctcaaggtgctgaaccgcgcacgcccagatgccgagaaaaaagaaatgaaaacaatcacggggaagacgttttcatcccgctaatcttgggaataagaggaggaagcggctggcaactgaaggctggaacacttgctactggataatcgtagcttttaatgttgcgcctcttcaggttcttaagggattctccgttttggttccattttgtacacgtttggaaaataatctgcagaaacgagctgtgcttgcaaagacttcatagttcccaagaattaaaaaaaaaaaaaaaagaattccacttgatcaacttaattccttttctttatcttccctccctcacttcccttttctcccaccctcttttccaagctgtttcgctttgcaatatattactggtaatgagttgcaggataatgcagtcataacttgttttctcctaagtatttgagttcaaaactcctgtatctaaagaaatacggttggggtcattaataaagaaaatctttctatctta

SEQ ID NO: 103929 - DNA, 732 bp, Homo sapiens
  Payload ID: 429
  Gene Symbol: ARPC2
  Gene Name: actin related protein 2/3 complex, subunit 2, 34kDa
  ENST ID: ENST00000420201
  CDS Start-End: 83-358
ccgggcttgtcggtgaagcggcagtggcggcggcggcggcggctcggcaggcgggttcaggcttcgggggccagccgccgccatgatcctgctggaggtgaacaaccgcatcatcgaggagacgctcgcgctcaagttcgagaacgcggccgccggaaacaaaccggaagcagtagaagtaacatttgcagatttcgatggggtcctctatcatatttcaaatcctaatggagacaaaacaaaagtgatggtcagtatttctttgaaattctacaaggaacttcaggcacatggtgctgatgagttattaaagagggtgtacgggagtttcttggtaaatccagaatcagtcttctaataggttgtctcaacattcatggccagaggaattgaaaggcaccgtgtcatccttgaatagaacagctatgttatactgctttaaaaaggaggtttaaagtggaaaaactgaacagcctttttaccctgtgattcagtggcatgtctcaaattctgaggcatttagcaggaccccaaagtgagaaccaggatacaatgtctctttgctatatgaccttgaaaatcttccggcatccaaggattccattgtgcatcaagctggcatgttgaagcgaaattgttttgcctctgtctttgaaaaatacttccaattccaagaagagggcaaggaaggagagaacagggcagttatccattatagggatgatgagacca

SEQ ID NO: 103930 - DNA, 482 bp, Homo sapiens
  Payload ID: 429
  Gene Symbol: ARPC2
  Gene Name: actin related protein 2/3 complex, subunit 2, 34kDa
  ENST ID: ENST00000420104
  CDS Start-End: 214-482
gagcggaagtggccggctagagccgggggctgggcggggaccgggcttgtcggtgaagcggcagtggcggcggcggcggcggctcggcaggcgggttcaggcttcgggggccagccccactcagggggcagcagggccgctccctccgtccttgcctcccttacccaccctcaccggcccttgtttctccttcccctgggggcagccgccgccatgatcctgctggaggtgaacaaccgcatcatcgaggagacgctcgcgctcaagttcgagaacgcggccgccggaaacaaaccggaagcagtagaagtaacatttgcagatttcgatggggtcctctatcatatttcaaatcctaatggagacaaaacaaaagtgatggtcagtatttctttgaaattctacaaggaacttcaggcacatggtgctgatgagttattaaagagggtgtacgggagtttcttggtaaatccagaatcagg

SEQ ID NO: 103931 - DNA, 644 bp, Homo sapiens
  Payload ID: 429
  Gene Symbol: ARPC2
  Gene Name: actin related protein 2/3 complex, subunit 2, 34kDa
  ENST ID: ENST00000456575
  CDS Start-End: 1-498
aaagaaggacgcagagccagccacacagccccacaggtcctctttagccacagggaacctcctctggagctgaaagacacagacgccgctgtgggtgacaacattggctacattacctttgtgctgttccctcgtcacaccaatgccagtgctcgagacaacaccatcaacctgatccacacgttccgggactacctgcactaccacatcaagtgctctaaggcctatattcacacacgtatgcgggcgaaaacgtctgacttcctcaaggtgctgaaccgcgcacgcccagatgccgagaaaaaagaaatgaaaacaatcaccttctctttggcagagttgggccccagaaaggagaagcaggagacaaacagctgcatccaccctgaaaaccagattatgttactaatgggggaagacgttttcatcccgctaatcttgggaataagaggaggaagcggctggcaactgaaggctggaacacttgctactggataatcgtagcttttaatgttgcgcctcttcaggttcttaagggattctccgttttggttccattttgtacacgtttggaaaataatctgcagaaacgagctgtgcttgcaaagacttcatagttcccaagaattaaaaaaaaaaaaaaa

SEQ ID NO: 103932 - DNA, 713 bp, Homo sapiens
  Payload ID: 429
  Gene Symbol: ARPC2
  Gene Name: actin related protein 2/3 complex, subunit 2, 34kDa
  ENST ID: ENST00000414983
  CDS Start-End: 62-178
cagtggcggcggcggcggcggctcggcaggcgggttcaggcttcgggggccagccgccgccatgatcctgctggaggtgaacaaccgcatcatcgaggagacgctcgcgctcaagttcgagaacgcggccgccggaaacaaaccggaagcagtagaagtaacatttgcaggtgaatgaactcagaggaatacaaccaccctttctacaacaagagtcctcgacaagatgatcttggaagacttttgcagctctgaagtgctgttacctggagatttcgatggggtcctctatcatatttcaaatcctaatggagacaaaacaaaagtgatggtcagtatttctttgaaattctacaaggaacttcaggcacatggtgctgatgagttattaaagagggtgtacgggagtttcttggtaaatccagaatcaggatacaatgtctctttgctatatgaccttgaaaatcttccggcatccaaggattccattgtgcatcaagctggcatgttgaagcgaaattgttttgcctctgtctttgaaaaatacttccaattccaagaagagggcaaggaaggagagaacagggcagttatccattatagggatgatgagaccatgtatgttgagtctaaaaaggacagagtcacagtagtcttcagcacagtgtttaaggatgacgacgatgtggtcattggaaaggtgttcatgcagg

SEQ ID NO: 103933 - DNA, 1014 bp, Homo sapiens
  Payload ID: 430
  Gene Symbol: ARPC3
  Gene Name: actin related protein 2/3 complex, subunit 3, 21kDa
  Uniprot ID: O15145
  ENST ID: ENST00000228825
  CDS Start-End: 148-684
agaagcggaactgcaaggccggaagctccacgtccgcacccgccccttccgtttcgcttccgcctacctcgcccaggctgccagaccggaagcgctccgctgtacctggatcctgctcctctgggttgaaacccgggcgccgccaagatgccggcttaccactcttctctcatggatcctgataccaaactcatcggaaacatggcactgttgcctatcagaagtcaattcaaaggacctgcccccagagagacaaaagatacagatattgtggatgaagccatctattacttcaaggccaatgtcttcttcaaaaactatgaaattaagaatgaagctgataggaccttgatatatataactctctacatttctgaatgtctgaagaaactgcaaaagtgcaattccaaaagccaaggtgagaaagaaatgtatacgctgggaatcactaattttcccattcctggagagcctggttttccacttaacgcaatttatgccaaacctgcaaacaaacaggaagatgaagtgatgagagcctatttacaacagctaaggcaagagactggactgagactttgtgagaaagttttcgaccctcagaatgataaacccagcaagtggtggacttgctttgtgaagagacagttcatgaacaagagtctttcaggacctggacagtgaagggagcccgggcagccaccgtctccagagccctgggcagcattttccagcaagatgtacacaatcttttgcctttatttcgtaaagttttatacagaagagagaagagcatgtctttacttgaaaaactcttgatcaagaatttgggtgggagaaaagaaagtgggttatcaagggtgatttgaaattttctgcagcattaaagctggcgcttaataagaataagtaataataaagaaatttctaacattccatgtcagaaaaactttattgccagtctttgacattcacttacaatttgttttgagataaaattcacattccataatg

SEQ ID NO: 103934 - DNA, 349 bp, Homo sapiens
  Payload ID: 430
  Gene Symbol: ARPC3
  Gene Name: actin related protein 2/3 complex, subunit 3, 21kDa
  ENST ID: ENST00000426440
  CDS Start-End: 52-349
ccgctgtacctggatcctgctcctctgggttgaaacccgggcgccgccaagatgccggcttaccactcttctctcatggatcctgataccaaactcatcggaaacatggcactgttgcctatcagaagtcaattcaaaggacctgcccccagagagacaaaagatacagatattgtggatgaagccatctattacttcaaggccaatgtcttcttcaaaaactatgaaattaagaatgaagctgataggaccttgatatatataactctctacatttctgaatgtctgaagaaactgcaaaagtgcaattccaaaagccaagaagtgatgagagcctatttacaacagc

SEQ ID NO: 103935 - DNA, 308 bp, Homo sapiens
  Payload ID: 430
  Gene Symbol: ARPC3
  Gene Name: actin related protein 2/3 complex, subunit 3, 21kDa
  ENST ID: ENST00000547365
  CDS Start-End: 55-308
tctgcttctgtgttcttcctgggcttgccattacaggcttaccactcttctctcatggatcctgataccaaactcatcggaaacatggcactgttgcctatcagaagtcaattcaaaggacctgcccccagagagacaaaagatacagatattgtggatgaagccatctattacttcaaggccaatgtcttcttcaaaaactatgaaattaagaatgaagctgataggaccttgatatatataactctctacatttctgaatgtctgaagaaactgcaaaagtgcaattccaaaagccaaggtgagaa

SEQ ID NO: 103936 - DNA, 2582 bp, Homo sapiens
  Payload ID: 431
  Gene Symbol: ARPC4
  Gene Name: actin related protein 2/3 complex, subunit 4, 20kDa
  Uniprot ID: P59998
  ENST ID: ENST00000397261
  CDS Start-End: 565-1071
aaggtgggcctcgagcaaagccgctagaggtggggtgcgggtggtcggcctcaggcgagccccggggcacagcccggggcgggaggcggagcttggcggccgagatctccgcgctgcagttagccccgccgagcgccaggagctgcgggtaggaggggcgagagaaaggatgggggtacagaaccggaagaaacgaagggctcgtccgcttcggcttgtcctaatttggtgcccaatctgaagctgggctgtaccattgcatacctgggggaggctgtggcaaaggtgacaagaaggccgaaggcacaaagggaagctgcacccattcctggaggagcttaaatagtgactcgagtgcaagaatttaaaaataccgagacagccctaggtggaaaacttccggaaggcccaagcgttcgtaagggctctctaccccgctcggagcatagatggtaccgtccggaagtccgggcggagaccgtagctgcgcttctcgcgaaagggcaggcatcgcggggctggccacttccgtacttccgctttccggcccagccagcgcccgcgatgactgccactctccgcccctacctgagtgccgtgcgggccacattgcaggctgccctctgcctggagaacttctcctcccaggttgtggaacgacacaacaagccggaagtggaagtcaggagtagcaaagagctcctgttacaacctgtgaccatcagcaggaatgagaaggaaaaggttctgattgagggctccatcaactctgtccgggtcagcattgctgtgaaacaggctgatgagatcgagaagattttgtgccacaagttcatgcgcttcatgatgatgcgagcagagaacttctttatccttcgaaggaagcctgtggaggggtatgatatcagctttctgatcaccaacttccacacagagcagatgtacaaacacaagttggtggactttgtgatccacttcatggaggagattgacaaggagatcagtgagatgaagctgtcagtcaatgcccgtgcccgcattgtggctgaagagttccttaagaatttttaaaccatctggctggatctcgtggccttccccctcagactacccatgtctccacgaaggcgtcctggagtcactccccgagcagcgcggcggcggcagggagttgggttggggtgggcatttgatgcgggaggtgggtggtgtgcttgctagctgggcaagaaagcagcagtggacctgccccaaggccacacgtgcctggtcaggctggcttctgatgttcagtcccctgggccgggacagattttttttaacgtcttgaaacttaaactctgtgcttgtaggatactgtaacctttttgtctttttttttttttttttttttaaacctccacctccagtggctgtgactggtcccagtgattatacgttattggttgctgtgggtctgggcgggcctggagccagaaggcgacttattttttctctcctatgccaccccaggtggggagggagggaggtttcagactccagtttctcccttgcccttttattcccaagcctccttggccccagtataagtgttgggaactctctgccagcttcctgagttctgcctaaagatggccccccagcactggttggggacaagggccaaattggtgaccaccagtcatgcctaggacctggggcccaaaagccgggcaacctctggctacaggggccattgggtgccctcccagttgagaggggccgctgtttcgccttgtccgtcagtgccagtgcctgtgccagaggtggcgaggtgagtcctccagagcttcctggccgggccctcctcctgcctgttctggctcctctgctcccacgctagctgtcccttttctgattctggtggatcctccctcccctaattaaagtctctttttgcccctttggggctgcatgaggtctatgctgtgtgtgtgtgtgaaaggaggggaggtggggcttcttttccctgagaccagatggctggtaattgtgcctggagctccccactgggtgcagtctcatgattggtcctgccattattcctgccaggggtcccaacccagagactccattcattgcagtccaggcaccattaatttctgaaactgctctgtctgcctatacagagctttggtgcttttcacataaggaacttacttgggctaaaaagtaacctcagagaaacagtgctcccatttggtggataaggaaactgaggttccaaacatgagatgtaatagcttgccccaaatctagccagtgagcaagagagtagacttttgcctgtgccaaaacagtaatcaccatccacaagtggctatttaaattttaattattacaattaaataaagtttaaaatccagttccccagtcccactggcaacttaacagctaccagtgactgtaccatatataacagcatatatagacatacagcatatacaacacatacatagagattcccatcattgcagaaagttccattggatagtactagaccttagtaacaccttgaagtaaaaagacaaaagacccttgtg

SEQ ID NO: 103937 - DNA, 926 bp, Homo sapiens
  Payload ID: 431
  Gene Symbol: ARPC4
  Gene Name: actin related protein 2/3 complex, subunit 4, 20kDa
  Uniprot ID: P59998
  ENST ID: ENST00000433034
  CDS Start-End: 6-569
ccgcgatggtgagagagccgggcccccggccagggacccccggctgttcggcctcagggcagtggactgccactctccgcccctacctgagtgccgtgcgggccacattgcaggctgccctctgcctggagaacttctcctcccaggttgtggaacgacacaacaagccggaagtggaagtcaggagtagcaaagagctcctgttacaacctgtgaccatcagcaggaatgagaaggaaaaggttctgattgagggctccatcaactctgtccgggtcagcattgctgtgaaacaggctgatgagatcgagaagattttgtgccacaagttcatgcgcttcatgatgatgcgagcagagaacttctttatccttcgaaggaagcctgtggaggggtatgatatcagctttctgatcaccaacttccacacagagcagatgtacaaacacaagttggtggactttgtgatccacttcatggaggagattgacaaggagatcagtgagatgaagctgtcagtcaatgcccgtgcccgcattgtggctgaagagttccttaagaatttttaaaccatctggctggatctcgtggccttccccctcagactacccatgtctccacgaaggcgtcctggagtcactccccgagcagcgcggcggcggcagggagttgggttggggtgggcatttgatgcgggaggtgggtggtgtgcttgctagctgggcaagaaagcagcagtggacctgccccaaggccacacgtgcctggtcaggctggcttctgatgttcagtcccctgggccgggacagattttttttaacgtcttgaaacttaaactctgtgcttgtaggatactgtaacctttttgtctttttttttttttttttttttaaacctccacctccagtggctgtgactggtcccag

SEQ ID NO: 103938 - DNA, 910 bp, Homo sapiens
  Payload ID: 431
  Gene Symbol: ARPC4
  Gene Name: actin related protein 2/3 complex, subunit 4, 20kDa
  ENST ID: ENST00000440787
  CDS Start-End: 30-371
tccgctttccggcccagccagcgcccgcgatgactgccactctccgcccctacctgagtgccgtgcgggccacattgcaggctgccctctgcctggagaacttctcctcccaggttgtggaacgacacaacaagccggaagtggaagtcaggagtagcaaagagctcctgttacaacctgtgaccatcagcaggaatgagaaggaaaaggttctgattgagggctccatcaactctgtccgggtcagcattgctgtgaaacaggctgatgagatcgagaagattttgtgccacaagttcatgcgcttcatgatgatgcgagcagagaacttctttatccttcgaaggaagcctgtggagattattctgtaacaagacttcaagttccttgactcattctgaatgcagagctgttgtgccacagatagttttccagagatgtctgatacacacagaattctcaacggggttcagttgcttggatccaacctagacaccctcccccagagcagctgggctgctgactggaagggggtatgatatcagctttctgatcaccaacttccacacagagcagatgtacaaacacaagttggtggactttgtgatccacttcatggaggagattgacaaggagatcagtgagatgaagctgtcagtcaatgcccgtgcccgcattgtggctgaagagttccttaagaatttttaaaccatctggctggatctcgtggccttccccctcagactacccatgtctccacgaaggcgtcctggagtcactccccgagcagcgcggcggcggcagggagttgggttggggtgggcatttgatgcgggaggtgggtggtgtgcttgctagctgggcaagaaagcagcagtggacctgccccaaggccacacgtgcctggtca

SEQ ID NO: 103939 - DNA, 957 bp, Homo sapiens
  Payload ID: 431
  Gene Symbol: ARPC4
  Gene Name: actin related protein 2/3 complex, subunit 4, 20kDa
  ENST ID: ENST00000417500
  CDS Start-End: 41-175
acttccgtacttccgctttccggcccagccagcgcccgcgatgactgccactctccgcccctacctgagtgccgtgcgggccacattgcaggctgccctctgcctggagaacttctcctcccaggttgtggaacgacacaacaagccggaagtggaagtcagtcctcgccagtgaattaggaatcagagtcattttacagatgagaaaattgagattccaacagggtaacttgcccaaggaaagtaacagaggaggctggatttcaaaaccttttcgccctgacttcagagcctgtgctctttctgctgaagaacacactcactggcccccatcttggagcactcctgcttgagtagcaaagagctcctgttacaacctgtgaccatcagcaggaatgagaaggaaaaggttctgattgagggctccatcaactctgtccgggtcagcattgctgtgaaacaggctgatgagatcgagaagattttgtgccacaagttcatgcgcttcatgatgatgcgagcagagaacttctttatccttcgaaggaagcctgtggaggggtatgatatcagctttctgatcaccaacttccacacagagcagatgtacaaacacaagttggtggactttgtgatccacttcatggaggagattgacaaggagatcagtgagatgaagctgtcagtcaatgcccgtgcccgcattgtggctgaagagttccttaagaatttttaaaccatctggctggatctcgtggccttccccctcagactacccatgtctccacgaaggcgtcctggagtcactccccgagcagcgcggcggcggcagggagttgggttggggtgggcatttgatgcgggaggtgggtggtgtgcttgctagctgggcaagaaagcagcagtggacctgccccaaggccacacgtgcctggtcaggctggcttctgatgttca

SEQ ID NO: 103940 - DNA, 942 bp, Homo sapiens
  Payload ID: 431
  Gene Symbol: ARPC4
  Gene Name: actin related protein 2/3 complex, subunit 4, 20kDa
  Uniprot ID: P59998
  ENST ID: ENST00000498623
  CDS Start-End: 479-715
agttgacgcgggggcggggagtcagcgagggcgagcctactggagtttgccgggggtgggaagaaggtgggcctcgagcaaagccgctagaggtggggtgcgggtggtcggcctcaggcgagccccggggcacagcccggggcgggaggcggagcttggcggccgagatctccgcgctgcagttagccccgccgagcgccaggagctgcggactgccactctccgcccctacctgagtgccgtgcgggccacattgcaggctgccctctgcctggagaacttctcctcccaggttgtggaacgacacaacaagccggaagtggaagtcaggagtagcaaagagctcctgttacaacctgtgaccatcagcaggaatgagaaggaaaaggttctgattgagggctccatcaactctgtccgggtcagcattgctgtgaaacaggctgatgagatcgagaagattttgtgccacaagttcatgcgcttcatgatgatgcgagcagagaacttctttatccttcgaaggaagcctgtggaggggtatgatatcagctttctgatcaccaacttccacacagagcagatgtacaaacacaagttggtggactttgtgatccacttcatggaggagattgacaaggagatcagtgagatgaagctgtcagtcaatgcccgtgcccgcattgtggctgaagagttccttaagaatttttaaaccatctggctggatctcgtggccttccccctcagactacccatgtctccacgaaggcgtcctggagtcactccccgagcagcgcggcggcggcagggagttgggttggggtgggcatttgatgcgggaggtgggtggtgtgcttgctagctgggcaagaaagcagcagtggacctgccccaaggccacacgtgcctggtcaggctggcttctgatgttcagtcccc

SEQ ID NO: 103941 - DNA, 577 bp, Homo sapiens
  Payload ID: 431
  Gene Symbol: ARPC4
  Gene Name: actin related protein 2/3 complex, subunit 4, 20kDa
  ENST ID: ENST00000485273
  CDS Start-End: 347-577
gctttccggcccagccagcgcccgcgatggtgagagagccgggcccccggccagggacccccggctgttcggcctcaggactgccactctccgcccctacctgagtgccgtgcgggccacattgcaggctgccctctgcctggagaacttctcctcccaggttgtggaacgacacaacaagccggaagtggaagtcaggagtagcaaagagctcctgttacaacctgtgaccatcagcaggaatgagaaggaaaaggttctgattgagggctccatcaactctgtccgggtcagcattgctgtgaaacaggctgatgagatcgagaagattttgtgccacaagttcatgcgcttcatgatgatgcgagcagagaacttctttatccttcgaaggaagcctgtggaggggtatgatatcagctttctgatcaccaacttccacacagagcagatgtacaaacacaagttggtggactttgtgatccacttcatggaggagattgacaaggagatcagtgagatgaagctgtcagtcaatgcccgtgcccgcattgtggctgaagagttccttaagaat

SEQ ID NO: 103942 - DNA, 1637 bp, Homo sapiens
  Payload ID: 432
  Gene Symbol: ARPC5
  Gene Name: actin related protein 2/3 complex, subunit 5, 16kDa
  Uniprot ID: O15511
  ENST ID: ENST00000294742
  CDS Start-End: 99-563
gggaagtgaatcaggcgccgggtagtgggttgctgggctgggcttgctgaggtagaggcagcgccaagaagaggcctttgccgctggtcgggattgggatgtcgaagaacacagtgtcgtcggcccgcttccggaaggtggacgtggatgaatatgacgagaacaagttcgtggacgaagaagatgggggcgacggccaggccgggcccgacgagggcgaggtggactcctgcctgcggcattccatcacaggaaacatgacagctgccctacaggcagctctgaagaacccccctatcaacaccaagagtcaggcagtgaaggaccgggcaggcagcattgtcttgaaggtgctcatctcttttaaagctaatgatatagaaaaggcagttcaatctctggacaagaatggtgtggatctcctaatgaagtatatttataaaggatttgagagcccgtctgacaatagcagtgctatgttactgcaatggcatgaaaaggcacttgctgctggaggagtagggtccattgttcgtgtcttgactgcaagaaaaactgtgtagtctggcaggaagtggattatctgcctcgggagtgggaattgctggtacaaagaccaaaacaaccaaatgccaccgctgccctgtgggtagcatctgtttctctcagctttgccttcttgctttttcatatctgtaaagaaaaaaattacatatcagttgtcctttaatgaaaattgggataatatagaagaaattgtgttaaaatagaagtgtttcatcctttcaaaaccatttcagtgatgtttataccaatctgtatatagtataatttacattcaagtttaattgtgcaacttttaacccctgttggctggttttttgttctgttttgttttgtattatttttaactaatactgagagatttggtcagaatttgaggccagtttcctagctcattgctagtcaggaaatgatatttataaaaaatatgagagactggcagctattaacattgcaaaactggaccatatttcccttatttaataagcaaaatatgtttttggaataagtggtgggtgaataccactgctaagttatagctttgtttttgcttgcctcctgattatctgtactgtgggtttaagtatgctactttctctcagcatccaataatcatggcccctcaatttatttgtggtcacccagggttcagagcaagaagtcttgctttatacaaatgtatccataaaatatcagagcttgttgggcatgaacatcaaacttttgttccactaatatggctctgtttggaaaaaactgcaaatcagaaagaatgatttgcagaaagaaagaaaaactatggtgtaatttaaactctgggcagcctctgaatgaaatgctactttctttagaaatataatagctgccttagacattatgaggtatacaactagtatttaagataccatttaatatgccccgtaaatgtcttcagtgttcttcagggtagttgggatctcaaaagatttggttcagatccaaacaaatacacattctgtgttttagctcagtgttttctaaaaaaagaaactgccacacagcaaaaaattgtttactttgttggacaaaccaaa

SEQ ID NO: 103943 - DNA, 7209 bp, Homo sapiens
  Payload ID: 432
  Gene Symbol: ARPC5
  Gene Name: actin related protein 2/3 complex, subunit 5, 16kDa
  Uniprot ID: O15511
  ENST ID: ENST00000359856
  CDS Start-End: 68-523
gctgggctgggcttgctgaggtagaggcagcgccaagaagaggcctttgccgctggtcgggattgggatgtcgaagaacacagtgtcgtcggcccgcttccggaaggtggacgtggatgaatatgacgagaacaagttcgtggacgaagaagatgggggcgacggccaggccgggcccgacgagggcgaggtggactcctgcctgcggcaaggaaacatgacagctgccctacaggcagctctgaagaacccccctatcaacaccaagagtcaggcagtgaaggaccgggcaggcagcattgtcttgaaggtgctcatctcttttaaagctaatgatatagaaaaggcagttcaatctctggacaagaatggtgtggatctcctaatgaagtatatttataaaggatttgagagcccgtctgacaatagcagtgctatgttactgcaatggcatgaaaaggcacttgctgctggaggagtagggtccattgttcgtgtcttgactgcaagaaaaactgtgtagtctggcaggaagtggattatctgcctcgggagtgggaattgctggtacaaagaccaaaacaaccaaatgccaccgctgccctgtgggtagcatctgtttctctcagctttgccttcttgctttttcatatctgtaaagaaaaaaattacatatcagttgtcctttaatgaaaattgggataatatagaagaaattgtgttaaaatagaagtgtttcatcctttcaaaaccatttcagtgatgtttataccaatctgtatatagtataatttacattcaagtttaattgtgcaacttttaacccctgttggctggttttttgttctgttttgttttgtattatttttaactaatactgagagatttggtcagaatttgaggccagtttcctagctcattgctagtcaggaaatgatatttataaaaaatatgagagactggcagctattaacattgcaaaactggaccatatttcccttatttaataagcaaaatatgtttttggaataagtggtgggtgaataccactgctaagttatagctttgtttttgcttgcctcctgattatctgtactgtgggtttaagtatgctactttctctcagcatccaataatcatggcccctcaatttatttgtggtcacccagggttcagagcaagaagtcttgctttatacaaatgtatccataaaatatcagagcttgttgggcatgaacatcaaacttttgttccactaatatggctctgtttggaaaaaactgcaaatcagaaagaatgatttgcagaaagaaagaaaaactatggtgtaatttaaactctgggcagcctctgaatgaaatgctactttctttagaaatataatagctgccttagacattatgaggtatacaactagtatttaagataccatttaatatgccccgtaaatgtcttcagtgttcttcagggtagttgggatctcaaaagatttggttcagatccaaacaaatacacattctgtgttttagctcagtgttttctaaaaaaagaaactgccacacagcaaaaaattgtttactttgttggacaaaccaaatcagttctcaaaaaatgaccggtgcttataaaaagttataaatatcgagtagctctaaaacaaaccacctgaccaagagggaagtgagcttgtgcttagtatttacattggatgccagttttgtaatcactgacttatgtgcaaactggtgcagaaattctataaactctttgctgtttttgatacctgctttttgtttcattttgttttgttttgtaaaaatgataaaacttcagaaaataaaatgtcagtgttgaataatttatttttctctgactttaacaattatgaatgtatggttaattaagaggaaaggttttctgcttctaccaccaagtactgtactcttaacaagaacagtttggtagggtttttataagactatatagatataagatgatagagaagagagtcatgaatgatgtcagagcactactgaagcctttggagtgattccatagccttctggatggcagctgaatacctatatgtagtatcactgcccaaagacctagactagaaagtgcaaagtagcttagcagctgcagtcattcactcccagcctccaaaattctctttctttcacctcaaatctatttcttgtacttacctactcacagcgacttctgtttgctttcgatcttcacctgactagattcccactttaaaacacttccaggcaattcagggtcctatgggtgaagataagctaagcaataggtattattcttaaatattacttagagatggggacttgctatgctgcccaggctggagtgcagtggctgttcacaggtgtgatcatagtgcactgaggcctcaaactcctggcttcaagcagtcctgcctcagcctcccgaaaaggtggaactacaggcacatgccactgtgccttagccaataggtattagaggtagtcaagtaggtatagcataaccaattacaaactttaaaatcaaatgatactgaatgctttttcataaaatccttcttaacatcactttcataactgaagcgtttggaaaaattctggagttcatatttgttcacaagaatgggtgggtgtatttagaatctgccagtctatcagctttactgaggggagatactaaaaatatttaacaagtagtataatatagagaccgagtcaaaatggatactagctggaaacaactggttcaactgttgcctcctgactaaatgtcagcccagggtatagtaaccatgacacagtactatccttggtgaagagttgggaataggattaattgcggaaaaaatatatataaatgccataggacacttttagcacaaaagtagttgtttacctcccattctcctcctttaatctcagtgcttttactatttggtttcttttttggcattttacaaaagggaagaaatggaaaacataccccttcttggtcattgggtaacagcaccatttcggtaacagtcatacttgatgacaagtatgatgatattttaaggacatgaacatgggtgaaatcaatgtgtagatggtacaaattaaccgaattctttttaaagcatttcctgtggatcccaggatcatgaggacataacagaagaataaggtctgaatcttgttcaccagtttgctctcagcctaattgggaagtaaggttaagcacctgaaaattatgtcatacaaaaaaaaagagaattaacgtcatacaatttagcatttgactgtaaatgcagttagtcaatgttgggagaacaacaaaatcagggtggatcagagtatttaaagtgagacattaatttgaactaatcctttggaggggcagaaaggacaaacggtccaagtgaaatgaacagagtagaaagagaaagttaaaagtgggtttaatagtcactgttcttgcagttttaatgttttttgttttgttttgttttgttttgttttgttttgttttttttgagacagagtctcgctctgtggcccaggcgggagtgcagtggcgcgatctcggctcactgcaagctctgcctcctgggttcacgccattctcctgcctcagcctcccaagtagctgggactacaggcgcccgccaccacgcccggctaattttttgtatttttagtagagacggggtttcattcaccgtgttagccaggatggtctcgatctcctgacctcgtgatccgcccacctcggcctcccaaagtgctgggattacatgcgtgagccaccgcgcccagctgcagttttaatgtttttaacataagaattctagatggtgcaaattattaacaggatcagaaactatctccgtgatagattcaagaaagtaaaattataggaaatcataatgttttattagctgaaatagacattgatgatcacttagtttaaccccatgtataaaggtaaaaaagaaaattaattaattaattttttttttttgagatggagtcttgctctgttgctcaggctggagtgcaatggcacaatctcggctcactgcagcctccacctcccaggctcaagcgattctcctgcctcagcctcctgagtagctcggattacaggcacgcatcaccgtgcccagctaatttttgtatttttaggagagatggggtttcaccatgttgcccaggctggtcttgaactcctgacctcaggtgatccaccctcctccgcctcccaaagcactgggattacaggcgtgaccaccgcgcccagccagattgattaatttttagatacacaatttttcctttagatttacaactaacatccccttacagacaaaatatgttaaaagcaccaaaataattgaaaaacacacccaattaaggaacagaccaacggcctctgtagaaccaagtgcccttaaacaaggctgcttctgtccatattcctgccgcgggacctctgccccactccctctccccctcaccccaatgtcactagtacaatatgtgaaaaccccaatgtgaaaacgttctgtgcaggtgcctcttgtatgattccagatatggaggaggcccgggaagcccacagaggtacagcatgtcatctgcctcaaggtggtgctacttcaccacattgatgatccaaccacaagcaacatgggacacagcattcactttaacatttctattttcctttatcatttctgttacttgagtgtgtaagagtaatcaacataaataatctatgtttacatctcttatttctctctgaaacagttccctagaatccacaccacatgaaacacaaattgagtagtgtatgacccacctgaattccaaagcattctaaaactcccgtattttccagcctagcagttagctcctgctctgcaagacacaccctcttgaccttgctgctagactgtatgggccccctgaagtcatagtagctggctcttactcatccccacattcacttggcatagttgatgttcaacaaatatctcttggttgcataacattgaacgagccaagtcacctaagaaatccttaatttatacacaggttcttagggtacctgaatagggcaacacatcagaagtacaaattgagaactatacaaagagtaaaataattcttgggttcaaataccctagagccaatcaagtttagtcacaaagaatttcaattcacttcaatgtggacagttaagaagggaatttatcagccttaggtggaaatcagagccaccatgagtaccacgtgcagcccctatagtgtttagctttgccagaagtcaccagagaaagtggctgaggaacagaattccagctcatatctggctaacagtggcactatgggagtttatatgatctgttcattattctgtggcatcaccttctaagagcagagatgtgacccaataccccttgttttccttaaagataaccattaaattatatccatgaatttatatcaccgtccttgactttatacgtagatttttctaattctgtcaacccttagggtaatgaataacttaaatggccaatgcctctgaataacatcatacttccttttgtttctccaaaaattgaatcaagatgccagggcaactaagattttcttcaatttgctaagttaaaggtcagtgtattcattagccaatggttctgtattttattcattttagtttttattcgttttcaaataatttgttcatattgttcaatattcaaaaggtaagaaatatgtactgtggtaattttccattccaccctagttcctcttttgacaaccaactattgtcacttaattcttaggcatccttccagatacagtgtatgcatttacaggcaaatacctatataagattttacccctttgtgtacataaatactaacatactatatatagtgttctgttccttgcttttttcattaacagtatattttggtggtaatttcctatcaatacataaagaacttccttattcccttcagaggcatttgaaccagagcaattccttcttgaatagaagctgggtaaaataaggctgagacctactgggctgcattcccagatggttaaggcattctaagtcacaggatgagataggaggtcaacacaagataccggtcataaagaccttgctgataaaacagtttgcagtaaagaagctggccaaaacccaccaaatccaagatggcaatgaaagtgacctctgcctctggccatcctcaccgctacgctcccaccggcaccatgacagtttacaaatgccatggcaacatcaggaagttatcctatatggtctaaaaaggggaggcatgaataatacaccccttgtttagcatatcatcaagaaataaccgttaaaatgggcaaccagcagccctcggggctgctctgcctatggagtagccattctttattcctttactttcttaataaacttgctttaactttacagactggccttgaattctttcttgtgtgagatccaagaacgctcacttggggtctggattgggaccactttccgataacaattttatttttatgactgcataataattctattatataaataaatgtaccataatttacttaaccatttccctattgatttaggtggtttctgatcttttgcagttacaaacagtgctacagtgaatagcattatacacaagtcattttacatatgttcaagcctatttgtagatcaattcctaaaagtgaaagttaaggtcagttggagggcatttaagggagatattgctaaattgcctttcttaaaggttttatcaattatactttctccagccgtgtagaagaatgcatgttttcccacccctttacctattctatgtgtttgtcataaaacattttttaatcttttcaaatctgatgttttaaaaatggtatcatatatttgcatttctcttaatgtaaatgagattgcacatcttttcacatgcctaatagccagttgtattttcttttctatatttttgtatttctatattttctttgcccttttgatggtctttttcttactgatttgtaggagctcttttcaacaggaatgtcaaatatttcttgcattttgagtttcgctttataatagcttttactataaataaaaaggttatttttattttta

SEQ ID NO: 103944 - DNA, 622 bp, Homo sapiens
  Payload ID: 432
  Gene Symbol: ARPC5
  Gene Name: actin related protein 2/3 complex, subunit 5, 16kDa
  ENST ID: ENST00000367534
  CDS Start-End: 24-431
ctttgccgctggtcgggattgggatgtcgaagaacacagtgtcgtcggcccgcttccggaaggtggacgtggatgaatatgacgagaacaagttcgtggacgaagaagatgggggcgacggccaggccgggcccgacgagggcgaggtggactcctgcctgcggcaaggaaacatgacagctgccctacaggcagctctgaagaacccccctatcaacaccaagagtcaggcagtgaaggaccgggcaggcagcattgtcttgaaggtgctcatctcttttaaagctaatgatatagaaaaggcagttcaatctctggacaagaatggtgtggatctcctaatgaagtatatttataaaggatttgagagcccgtctgacaatagcagtgctatgttactgcaatggcatgaaaaggtgcctcttgtatgattccagatatggaggaggcccgggaagcccacagaggtacagcatgtcatctgcctcaaggtggtgctacttcaccacattgatgatccaaccacaagcaacatgggacacagcattcactttaacatttctattttcctttatcatttctgttacttgagtgtgtaagagtaatcaacataaataatcta

SEQ ID NO: 103945 - DNA, 1325 bp, Homo sapiens
  Payload ID: 433
  Gene Symbol: ARPC5L
  Gene Name: actin related protein 2/3 complex, subunit 5-like
  Uniprot ID: Q9BPX5
  ENST ID: ENST00000259477
  CDS Start-End: 87-548
gcccccgagcaggagccggtgcgagcggagcagagccgaggtcgggccgcgagcggagccggctgagcgggcgccgagctcccgccatggcccggaacacgctgtcctcgcgcttccgccgggtggacatcgacgaatttgacgagaacaaatttgtggacgagcaggaggaggcggcggcggcggcggcggagccaggcccggacccgagcgaggtggacgggctcctgcggcaaggggacatgcttcgggcattccatgcagccttgcggaactctcccgtcaacaccaagaatcaagctgtgaaggagcgagcccagggcgtggtgctgaaagtgctcacaaacttcaagagcagtgagattgagcaggctgtgcagtcactggacagaaacggcgttgacttgttaatgaagtacatttataaaggctttgagaagcccacagaaaatagcagcgcagtgttactccagtggcacgaaaaggccttagcagtaggaggactaggctccattataagagttcttacagcaagaaagactgtttaaaaaaaataaaaagactcatgttaccttgagaagaattctggatgcccaggctggtgaagaagggattgacaatggaccatcttcctaggaactcccaagtaaactatttcaggacatgtatctgctgaaatgtattttattttcaaggtggaggggaaaatcgtctgtttcctaaatcctgtttaggatctgatagtctatgcctttgtctccgagtactgcagaactgacattttgacggtctaccagcgtggcggctggtgttggtcagatgcacctgtgtgcactgggggagggatggtttgggcaggtgcagatccaagggctgtggtaaacgggagagcttgtgtttttgaagtggaaaaaaacccaagagtttgtacagacatcctgtcttcccagagaaggtggacactcttgggctcattgtaaagtgcctgctgcatcaataaagctcttggcttattagtctatacattgcggtgtgtttcgtgtatgtaaaaaaaaatggtaatgaatgggatggtaatgaatgagagttcagttgttgttccggaaacccgatgtggaaggagtagacctgtgtccctgttgagccacccctgggagcgagcatggcaatccacaggccctctgccacaggacgccagcctcggcctcagagctgccggctgctgcagagaggtgtttgctgaataaactatttattgtttcttattcctttgatttgtatgtaattaattttggagcttatttaattaatttaataaagtgcca

SEQ ID NO: 103946 - DNA, 2507 bp, Homo sapiens
  Payload ID: 433
  Gene Symbol: ARPC5L
  Gene Name: actin related protein 2/3 complex, subunit 5-like
  Uniprot ID: Q9BPX5
  ENST ID: ENST00000353214
  CDS Start-End: 1253-1714
attcacggcacccctgatagcgaggtcggcgtcacggtgtaggcgcgcagttggggaaaccgaggcccaacgtgggcggcagctaccagagatggcacacggaggactcaaattcgtccattcagtcattcgttcattcattccttcgggaaaccttgcagatctcccaatctgggcaactctgagctgggcgccagtagtctgggggtgctgacgggaggaggggccagagttttcaaagacgattaaccgaggctcacgtcgcggagccaacctagaagttctctggggacagaaccttggcggacaactgaattaattgttctagtctccaggcccagtacatggatgcttgttggatgaattaatgaaccttgacccacaccaagattctgagaatttggtttctgtcaagatgtgcctctccagccaggcctctcctgccaggacggtggccacagggccatctccctctcctggcgcccccaactgcctggccaaggtgactgctacacacgtggggtcgcagaatccctcgagtcacaacgtcttcaacgtcttgtcagtcccgtgatcgcactaaacgtatttaaagccccctactcctttaagagggtcacctctgtgtacaggcggcctcctcgtactaagtgtggtggcgttcaaggctccgagacacaggcgcctcccgcgccactccccgggcacaggaactcctactcatccctcagtcatcagctcgaaggtttcttctccaagaagcctgcccggcactcgagaagtagagccgcgagccttctcccgggggcccagccttccccagtaccggcagggatcaccccgggagcacgcgcccggccccgctgaggccaggggctcctcggaggcgcgggaaagccggggaaccagcgcagttacggcacacacgaggcggggcctgcacagatgccgggcgcccgatcctcagtgacaaaatagagactccgtggaagggacactgaggtgggggaggctgcggtgatcccataccgcactccaggtgccaggctccgccccgcccctgacggcgcttccggatccggcgggtgccggaagtgggcgggcggcggcggctgcgcgcggaggcggtggaggaggtgctgggagcagccgggcagccgcttcccgcccccgagcaggagccggtgcgagcggagcagagccgaggtcgggccgcgagcggagccggctgagcgggcgccgagctcccgccatggcccggaacacgctgtcctcgcgcttccgccgggtggacatcgacgaatttgacgagaacaaatttgtggacgagcaggaggaggcggcggcggcggcggcggagccaggcccggacccgagcgaggtggacgggctcctgcggcaaggggacatgcttcgggcattccatgcagccttgcggaactctcccgtcaacaccaagaatcaagctgtgaaggagcgagcccagggcgtggtgctgaaagtgctcacaaacttcaagagcagtgagattgagcaggctgtgcagtcactggacagaaacggcgttgacttgttaatgaagtacatttataaaggctttgagaagcccacagaaaatagcagcgcagtgttactccagtggcacgaaaaggccttagcagtaggaggactaggctccattataagagttcttacagcaagaaagactgtttaaaaaaaataaaaagactcatgttaccttgagaagaattctggatgcccaggctggtgaagaagggattgacaatggaccatcttcctaggaactcccaagtaaactatttcaggacatgtatctgctgaaatgtattttattttcaaggtggaggggaaaatcgtctgtttcctaaatcctgtttaggatctgatagtctatgcctttgtctccgagtactgcagaactgacattttgacggtctaccagcgtggcggctggtgttggtcagatgcacctgtgtgcactgggggagggatggtttgggcaggtgcagatccaagggctgtggtaaacgggagagcttgtgtttttgaagtggaaaaaaacccaagagtttgtacagacatcctgtcttcccagagaaggtggacactcttgggctcattgtaaagtgcctgctgcatcaataaagctcttggcttattagtctatacattgcggtgtgtttcgtgtatgtaaaaaaaaatggtaatgaatgggatggtaatgaatgagagttcagttgttgttccggaaacccgatgtggaaggagtagacctgtgtccctgttgagccacccctgggagcgagcatggcaatccacaggccctctgccacaggacgccagcctcggcctcagagctgccggctgctgcagagaggtgtttgctgaataaactatttattgtttcttattcctttgatttgtatgtaattaattttggagcttatttaattaatttaataaagtgccaaacatttaataattga

SEQ ID NO: 103947 - DNA, 1122 bp, Homo sapiens
  Payload ID: 434
  Gene Symbol: ACTA1
  Gene Name: actin, alpha 1, skeletal muscle
  ENST ID: ENST00000366683
  CDS Start-End: 108-872
ggccaccgcagcggacagcgccaagtgaagcctcgcttcccctccgcggcgaccagggcccgagccgagagtagcagttgtagctacccgcccagaaactagacacaatgtgcgacgaagacgagaccaccgccctcgtgtgcgacaatggctccggcctggtgaaagccggcttcgccggggatgacgcccctagggccgtgttcccgtccatcgtgggccgcccccgacaccagggcgtcatggtcggtatgggtcagaaagattcctacgtgggcgacgaggctcagagcaagagaggtatcctgaccctgaagtaccctatcgagcacggcatcatcaccaactgggatgacatggagaagatctggcaccacaccttctacaacgagcttcgcgtggctcccgaggagcaccccaccctgctcaccgaggcccccctcaatcccaaggccaaccgcgagaagatgacccagatcatgtttgagaccttcaacgtgcccgccatgtacgtggccatccaggccgtgctgtccctctacgcctccggcaggaccaccggcatcgtgctggactccggcgacggcatcatgaagtgtgacatcgacatcaggaaggacctgtatgccaacaacgtcatgtcggggggcaccacgatgtaccctgggatcgctgaccgcatgcagaaagagatcaccgcgctggcacccagcaccatgaagatcaagatcatcgccccgccggagcgcaaatactcggtgtggatcggcggctccatcctggcctcgctgtccaccttccagcagatgtggatcaccaagcaggagtacgacgaggccggcccttccatcgtccaccgcaaatgcttctagacacactccacctccagcacgcgacttctcaggacgacgaatcttctcaatgggggggcggctgagctccagccaccccgcagtcactttctttgtaacaacttccgttgctgccatcgtaaactgacacagtgtttataacgtgtacatacattaacttattacctcattttgttatttttcgaaacaaagccctgtggaagaaaatggaaaacttgaagaagcattaaagtcattctgttaagctgcg

SEQ ID NO: 103948 - DNA, 1491 bp, Homo sapiens
  Payload ID: 434
  Gene Symbol: ACTA1
  Gene Name: actin, alpha 1, skeletal muscle
  Uniprot ID: P68133
  ENST ID: ENST00000366684
  CDS Start-End: 104-1237
accgcagcggacagcgccaagtgaagcctcgcttcccctccgcggcgaccagggcccgagccgagagtagcagttgtagctacccgcccagaaactagacacaatgtgcgacgaagacgagaccaccgccctcgtgtgcgacaatggctccggcctggtgaaagccggcttcgccggggatgacgcccctagggccgtgttcccgtccatcgtgggccgcccccgacaccagggcgtcatggtcggtatgggtcagaaagattcctacgtgggcgacgaggctcagagcaagagaggtatcctgaccctgaagtaccctatcgagcacggcatcatcaccaactgggatgacatggagaagatctggcaccacaccttctacaacgagcttcgcgtggctcccgaggagcaccccaccctgctcaccgaggcccccctcaatcccaaggccaaccgcgagaagatgacccagatcatgtttgagaccttcaacgtgcccgccatgtacgtggccatccaggccgtgctgtccctctacgcctccggcaggaccaccggcatcgtgctggactccggcgacggcgtcacccacaacgtgcccatttatgagggctacgcgctgccgcacgccatcatgcgcctggacctggcgggccgcgatctcaccgactacctgatgaagatcctcactgagcgtggctactccttcgtgaccacagctgagcgcgagatcgtgcgcgacatcaaggagaagctgtgctacgtggccctggacttcgagaacgagatggcgacggccgcctcctcctcctccctggaaaagagctacgagctgccagacgggcaggtcatcaccatcggcaacgagcgcttccgctgcccggagacgctcttccagccctccttcatcggtatggagtcggcgggcattcacgagaccacctacaacagcatcatgaagtgtgacatcgacatcaggaaggacctgtatgccaacaacgtcatgtcggggggcaccacgatgtaccctgggatcgctgaccgcatgcagaaagagatcaccgcgctggcacccagcaccatgaagatcaagatcatcgccccgccggagcgcaaatactcggtgtggatcggcggctccatcctggcctcgctgtccaccttccagcagatgtggatcaccaagcaggagtacgacgaggccggcccttccatcgtccaccgcaaatgcttctagacacactccacctccagcacgcgacttctcaggacgacgaatcttctcaatgggggggcggctgagctccagccaccccgcagtcactttctttgtaacaacttccgttgctgccatcgtaaactgacacagtgtttataacgtgtacatacattaacttattacctcattttgttatttttcgaaacaaagccctgtggaagaaaatggaaaacttgaagaagcattaaagtcattctgttaagctgcgtaaa

SEQ ID NO: 103949 - DNA, 1349 bp, Homo sapiens
  Payload ID: 435
  Gene Symbol: ACTA2
  Gene Name: actin, alpha 2, smooth muscle, aorta
  Uniprot ID: P62736
  ENST ID: ENST00000224784
  CDS Start-End: 67-1200
gaacaccacccagtgtggagcagcccagccaagcactgtcaggaatcctgtgaagcagctccagctatgtgtgaagaagaggacagcactgccttggtgtgtgacaatggctctgggctctgtaaggccggctttgctggggacgatgctcccagggctgttttcccatccattgtgggacgtcccagacatcagggggtgatggtgggaatgggacaaaaagacagctacgtgggtgacgaagcacagagcaaaagaggaatcctgaccctgaagtacccgatagaacatggcatcatcaccaactgggacgacatggaaaagatctggcaccactctttctacaatgagcttcgtgttgcccctgaagagcatcccaccctgctcacggaggcacccctgaaccccaaggccaaccgggagaaaatgactcaaattatgtttgagactttcaatgtcccagccatgtatgtggctatccaggcggtgctgtctctctatgcctctggacgcacaactggcatcgtgctggactctggagatggtgtcacccacaatgtccccatctatgagggctatgccttgccccatgccatcatgcgtctggatctggctggccgagatctcactgactacctcatgaagatcctgactgagcgtggctattccttcgttactactgctgagcgtgagattgtccgggacatcaaggagaaactgtgttatgtagctctggactttgaaaatgagatggccactgccgcatcctcatcctcccttgagaagagttacgagttgcctgatgggcaagtgatcaccatcggaaatgaacgtttccgctgcccagagaccctgttccagccatccttcatcgggatggagtctgctggcatccatgaaaccacctacaacagcatcatgaagtgtgatattgacatcaggaaggacctctatgctaacaatgtcctatcagggggcaccactatgtaccctggcattgccgaccgaatgcagaaggagatcacggccctagcacccagcaccatgaagatcaagatcattgcccctccggagcgcaaatactctgtctggatcggtggctccatcctggcctctctgtccaccttccagcagatgtggatcagcaaacaggaatacgatgaagccgggccttccattgtccaccgcaaatgcttctaaaacactttcctgctcctctctgtctctagcacacaactgtgaatgtcctgtggaattatgccttcagttcttttccaaatcattcctagccaaagctctgactcgttacctatgtgttttttaataaatctgaaataggctactggtaa

SEQ ID NO: 103950 - DNA, 878 bp, Homo sapiens
  Payload ID: 435
  Gene Symbol: ACTA2
  Gene Name: actin, alpha 2, smooth muscle, aorta
  ENST ID: ENST00000415557
  CDS Start-End: 425-878
gacctttggcttggcttgtcagggcttgtccaggagttccgctcctctctccaaccggggtccccctccagcgaccctaaagcttcccagacttccgcttcaattcctgtccgcaccccacgcccacctcaacgtggagcgcagtggtctccgaggagcgccggagctgccccgcctgcccagcggggtcagcacttcgcatcaaggcccaagaaaagcaagtcctccagcgttctgagcacccgggcctgagggaaggtcctaacagcccccgggagccagtctccaacgcctcccgcagcagcccgccgctcccaggtgcccgcgtgcgccgctgccgccgcaatcccgcacgcgtcccgcgcccgccccactttgcctatccccgggactaagacgggaatcctgtgaagcagctccagctatgtgtgaagaagaggacagcactgccttggtgtgtgacaatggctctgggctctgtaaggccggctttgctggggacgatgctcccagggctgttttcccatccattgtgggacgtcccagacatcagggggtgatggtgggaatgggacaaaaagacagctacgtgggtgacgaagcacagagcaaaagaggaatcctgaccctgaagtacccgatagaacatggcatcatcaccaactgggacgacatggaaaagatctggcaccactctttctacaatgagcttcgtgttgcccctgaagagcatcccaccctgctcacggaggcacccctgaaccccaaggccaaccgggagaaaatgactcaaattatgtttgagactttcaatgtcccagccatgtatgtggctatccaggcggtgctgtctctctatgcctctggacgcacaactg

SEQ ID NO: 103951 - DNA, 744 bp, Homo sapiens
  Payload ID: 435
  Gene Symbol: ACTA2
  Gene Name: actin, alpha 2, smooth muscle, aorta
  ENST ID: ENST00000458159
  CDS Start-End: 291-744
caaccggggtccccctccagcgaccctaaagcttcccagacttccgcttcaattcctgtccgcaccccacgcccacctcaacgtggagcgcagtggtctccgaggagcgccggagctgccccgcctgcccagcggggtcagcacttcgcatcaaggcccaagaaaagcaagtcctccagcgttctgagcacccgggcctgagggaaggtcctaacagcccccgggagccagtctccaacgcctcccgcagcagcccgccgctcccagaatcctgtgaagcagctccagctatgtgtgaagaagaggacagcactgccttggtgtgtgacaatggctctgggctctgtaaggccggctttgctggggacgatgctcccagggctgttttcccatccattgtgggacgtcccagacatcagggggtgatggtgggaatgggacaaaaagacagctacgtgggtgacgaagcacagagcaaaagaggaatcctgaccctgaagtacccgatagaacatggcatcatcaccaactgggacgacatggaaaagatctggcaccactctttctacaatgagcttcgtgttgcccctgaagagcatcccaccctgctcacggaggcacccctgaaccccaaggccaaccgggagaaaatgactcaaattatgtttgagactttcaatgtcccagccatgtatgtggctatccaggcggtgctgtctctctatgcctctggacgcacaactg

SEQ ID NO: 103952 - DNA, 1756 bp, Homo sapiens
  Payload ID: 435
  Gene Symbol: ACTA2
  Gene Name: actin, alpha 2, smooth muscle, aorta
  Uniprot ID: P62736
  ENST ID: ENST00000458208
  CDS Start-End: 476-1609
ctctccccgcccccgcggggcggcgcgcactcacccacccgcgccggagcggacctttggcttggcttgtcagggcttgtccaggagttccgctcctctctccaaccggggtccccctccagcgaccctaaagcttcccagacttccgcttcaattcctgtccgcaccccacgcccacctcaacgtggagcgcagtggtctccgaggagcgccggagctgccccgcctgcccagcggggtcagcacttcgcatcaaggcccaagaaaagcaagtcctccagcgttctgagcacccgggcctgagggaaggtcctaacagcccccgggagccagtctccaacgcctcccgcagcagcccgccgctcccaggtgcccgcgtgcgccgctgccgccgcaatcccgcacgcgtcccgcgcccgccccactttgcctatccccgggactaagacgggaatcctgtgaagcagctccagctatgtgtgaagaagaggacagcactgccttggtgtgtgacaatggctctgggctctgtaaggccggctttgctggggacgatgctcccagggctgttttcccatccattgtgggacgtcccagacatcagggggtgatggtgggaatgggacaaaaagacagctacgtgggtgacgaagcacagagcaaaagaggaatcctgaccctgaagtacccgatagaacatggcatcatcaccaactgggacgacatggaaaagatctggcaccactctttctacaatgagcttcgtgttgcccctgaagagcatcccaccctgctcacggaggcacccctgaaccccaaggccaaccgggagaaaatgactcaaattatgtttgagactttcaatgtcccagccatgtatgtggctatccaggcggtgctgtctctctatgcctctggacgcacaactggcatcgtgctggactctggagatggtgtcacccacaatgtccccatctatgagggctatgccttgccccatgccatcatgcgtctggatctggctggccgagatctcactgactacctcatgaagatcctgactgagcgtggctattccttcgttactactgctgagcgtgagattgtccgggacatcaaggagaaactgtgttatgtagctctggactttgaaaatgagatggccactgccgcatcctcatcctcccttgagaagagttacgagttgcctgatgggcaagtgatcaccatcggaaatgaacgtttccgctgcccagagaccctgttccagccatccttcatcgggatggagtctgctggcatccatgaaaccacctacaacagcatcatgaagtgtgatattgacatcaggaaggacctctatgctaacaatgtcctatcagggggcaccactatgtaccctggcattgccgaccgaatgcagaaggagatcacggccctagcacccagcaccatgaagatcaagatcattgcccctccggagcgcaaatactctgtctggatcggtggctccatcctggcctctctgtccaccttccagcagatgtggatcagcaaacaggaatacgatgaagccgggccttccattgtccaccgcaaatgcttctaaaacactttcctgctcctctctgtctctagcacacaactgtgaatgtcctgtggaattatgccttcagttcttttccaaatcattcctagccaaagctctgactcgttacctatgtgttttttaataaatctgaaataggctactggt

SEQ ID NO: 103953 - DNA, 4106 bp, Homo sapiens
  Payload ID: 436
  Gene Symbol: ACTC1
  Gene Name: actin, alpha, cardiac muscle 1
  Uniprot ID: P68032
  ENST ID: ENST00000290378
  CDS Start-End: 657-1790
attcaggctggcggggactagaccagaagggtgccctgtcctgggtgccccttttgcagccactcagatgtgctgctgcggtgtcctttgtgctggtggcagccctggaagatgagaagccgctgttgctcccctgctgccctggcccagctgtcaggacccctcagcagagggcagggcgccaagccttcccactgcatgtggcttattgtccccaaggctggcagggctgcggaggaccgaatccacagaccatccagggagcacccacaccccagaaagggggaggggtgggctggcgtcacttagtcttcccctgccccctacccttcagcgcctgcccctccccagctccctatttggccatccccctgactgccccctccccttccttacatggtctgggggctccctggctgatcctctcccctgcccttggctccatgaatggcctcggcagtcctagcgggtgcgaaggggaccaaataaggcaaggtggcagaccgggccccccacccctgcccccggctgctccaactgaccctgtccatcagcgttctataaagcggccctcctggagccagccacccagagcccgctgccgccggagccgagccgacccgccccgccgacgaaccccctgaagctgtgccaagatgtgtgacgacgaggagaccaccgccctggtgtgcgacaacggctctgggctggtgaaggccggctttgcgggcgatgacgcgccccgcgctgtcttcccgtccatcgtgggccgcccgcggcaccagggagttatggtgggtatgggtcagaaggactcctacgtaggtgatgaagcccagagcaagagaggcatcctgaccctgaagtatcccatcgagcatggtatcatcaccaactgggacgacatggagaagatctggcaccacaccttctacaatgagctccgtgtggctcccgaggagcaccccaccctgctcacagaggccccgctgaaccccaaggccaaccgggagaagatgactcagatcatgtttgagaccttcaatgtccctgccatgtacgtggccatccaggcagtgctatccctgtatgcttctggccgtaccacaggcattgttctggactctggggatggtgtaactcacaatgtccccatctatgagggctacgctttgccccatgccatcatgcgtctggatctggctggtcgggacctcactgactacctcatgaagatcctcactgagcgtggctactcctttgtcaccactgctgaacgtgaaattgtccgtgacattaaagagaagctgtgctatgtcgccctggattttgagaatgagatggccacagctgcctcttcctcctccctggagaagagctatgaactgcctgatggccaagtcatcactattggcaatgagcgcttccgctgtcctgagacactcttccagccctccttcattggtatggaatctgctggcatccatgaaacaacttacaatagcatcatgaagtgtgacattgatatccgcaaggacctgtatgccaacaatgtcttatctggaggcaccactatgtaccctggtattgctgatcgtatgcagaaggaaatcactgctctggctcctagcaccatgaagattaagattattgctccccctgagcgtaaatactctgtctggattgggggctccatcctggcctctctgtccaccttccagcaaatgtggattagcaagcaagagtacgatgaggcaggcccatccattgtccaccgcaaatgcttctaagatgccttctctctccatctaccttccagtcaggatgacggtattatgcttcttggagtcttccaaaccaccttccctcatctttcatcaatcattgtacagtttgtttacacacgtgcaatttgtttgtgcttctaatatttattgctttataaataaaccagaccaggacttgcaacctataaaagcctctcgtttgtttttggggtaggcgtggggtggggcaggtgtttgctttgacaccctgagcattgtcaaagttcagtaccacaaggttcatccagatgaattaatatgacagttagctgggagttataatgctaacttttgatttcatattttgagacagaatcatgaatatatttcatacctgaaaagcagattaaggtttagttccatataagtaagaaatgaaattgaataagatagttctctagaattagttgctgcagatgacactgaagattattttaacatatgttccagttgtttttgtaaccttgcagaaaatacacatatattgataatgagaaagtcaaagattattttaaatgaattggcttaacttttcaattctttgaactcttcaattttcttcctgggggctatgaaagaaacatgaaggttagctgacagttgggccagccacatcccattgcaaataccctctaaacatatcaagaccattgtgtgtgtgcaaaacaaatgtgaggaagcaggagccaaacacttctgcctgatcagtgactaacttgcgagacagaagccttcaatctcttcgtttctttgaaatcttgagatcttgggttgagtgaactgaaggctgcgaggtcctgagggagcaaggggaggcgagagccacagtgtttgctttgctctgtgcagagctctctgcaaagtatggtgggaaggctgctaggggcagcgttgaaaagaattgaatgtgttccatcctcgaggagttcacacacctacacataatcccccagtgcgtgtggcctggaggctttaaggagatgtatgtgggtctgggtcttagagaatggtcaggaattagggaggtgagaagagcagagaggacatctcagcagaaggaagtgtggcagaagccaggatacaagacatggggcaggctggtaggtgctgatgaattttagaaaatccactgggaaaggtagatttcaactagattgcagaagccttacagatttttgttttcaaattaattgccagtgaactgttagcattcacagaagtgtttgaatagacttaattgaattttattgatgaggattcaagacacagagattaagcaactggtgcaatgttataaactttatttgtggaatgtgctagacaggaactcagattttctgacacctactctgatggtgtctctaaaataatctttctaactttatagtttatcaagggtaaccccattctatcacatgccttttgagaatttgggttcaatatttggagtactctggactcatcagacatctttaataaattgtaatacattgccactgtcattcaaggtcctatgtgtgtctttttgcctattcataccaaaaatatcttttgatccctgactctgggtcgggcatagtattaagggcaggggacacaaagatgtatgagagcacattttctgtgaataaaaagctcagagtttagagttctgtatgtagcatattcaaatggaaggccttctatgcaataaaggctaaataatacatcaacttggtggcattttatttagataaggtgcaaacattattgtacatatgccccccgcccccaccaccccattgtatcctatagcacagttgaactggtttaaaagccatgcatggggaggtatgatttcactagtttttgtgtctctttcttttcctctgtacaattgagtgcataaatattatgaattgtatcctctgaacacagtattaatgctttaactgtagatgattggctggggtatcacctctggttctttccatctgtgattagaaatggagaggacatttttatttctatgtaaaagtagaagctttaagaatcagcttctgatatttatatcagaagaggtaagcacccagattcttgttgaattctgaggtcttctcatctttgcttgattatagggtataaagtattagaacaattgaatcttaaaaattgtgcttaaggaaggtactaagacaaaaatgtttgcttaaggtaatcttcatatgtatacaataactgagacatggatagtgcctacgtctttggttaaagtgcaataaacaaagaactatataaatt

SEQ ID NO: 103954 - DNA, 1917 bp, Homo sapiens
  Payload ID: 437
  Gene Symbol: ACTB
  Gene Name: actin, beta
  Uniprot ID: P60709
  ENST ID: ENST00000331789
  CDS Start-End: 193-1320
gagtgagcggcgcggggccaatcagcgtgcgccgttccgaaagttgccttttatggctcgagcggccgcggcggcgccctataaaacccagcggcgcgacgcgccaccaccgccgagaccgcgtccgccccgcgagcacagagcctcgcctttgccgatccgccgcccgtccacacccgccgccagctcaccatggatgatgatatcgccgcgctcgtcgtcgacaacggctccggcatgtgcaaggccggcttcgcgggcgacgatgccccccgggccgtcttcccctccatcgtggggcgccccaggcaccagggcgtgatggtgggcatgggtcagaaggattcctatgtgggcgacgaggcccagagcaagagaggcatcctcaccctgaagtaccccatcgagcacggcatcgtcaccaactgggacgacatggagaaaatctggcaccacaccttctacaatgagctgcgtgtggctcccgaggagcaccccgtgctgctgaccgaggcccccctgaaccccaaggccaaccgcgagaagatgacccagatcatgtttgagaccttcaacaccccagccatgtacgttgctatccaggctgtgctatccctgtacgcctctggccgtaccactggcatcgtgatggactccggtgacggggtcacccacactgtgcccatctacgaggggtatgccctcccccatgccatcctgcgtctggacctggctggccgggacctgactgactacctcatgaagatcctcaccgagcgcggctacagcttcaccaccacggccgagcgggaaatcgtgcgtgacattaaggagaagctgtgctacgtcgccctggacttcgagcaagagatggccacggctgcttccagctcctccctggagaagagctacgagctgcctgacggccaggtcatcaccattggcaatgagcggttccgctgccctgaggcactcttccagccttccttcctgggcatggagtcctgtggcatccacgaaactaccttcaactccatcatgaagtgtgacgtggacatccgcaaagacctgtacgccaacacagtgctgtctggcggcaccaccatgtaccctggcattgccgacaggatgcagaaggagatcactgccctggcacccagcacaatgaagatcaagatcattgctcctcctgagcgcaagtactccgtgtggatcggcggctccatcctggcctcgctgtccaccttccagcagatgtggatcagcaagcaggagtatgacgagtccggcccctccatcgtccaccgcaaatgcttctaggcggactatgacttagttgcgttacaccctttcttgacaaaacctaacttgcgcagaaaacaagatgagattggcatggctttatttgttttttttgttttgttttggttttttttttttttttggcttgactcaggatttaaaaactggaacggtgaaggtgacagcagtcggttggagcgagcatcccccaaagttcacaatgtggccgaggactttgattgcacattgttgtttttttaatagtcattccaaatatgagatgcgttgttacaggaagtcccttgccatcctaaaagccaccccacttctctctaaggagaatggcccagtcctctcccaagtccacacaggggaggtgatagcattgctttcgtgtaaattatgtaatgcaaaatttttttaatcttcgccttaatacttttttattttgttttattttgaatgatgagccttcgtgcccccccttcccccttttttgtcccccaacttgagatgtatgaaggcttttggtctccctgggagtgggtggaggcagccagggcttacctgtacactgacttgagaccagttgaataaaagtgcacaccttaaaaa

SEQ ID NO: 103955 - DNA, 569 bp, Homo sapiens
  Payload ID: 437
  Gene Symbol: ACTB
  Gene Name: actin, beta
  ENST ID: ENST00000443528
  CDS Start-End: 262-569
gtctggagtaagcctcgcccccaccccaactcccaggaattctgctgagtcacttcggaggccacagctgcaaccttgggaacaatacgagtcattcaattcactaggcagcgtcccagcgctcacctgggggacttggccacggtctcttgttagaagcctcttcatggacaacgtggccaaccccacctcacccctatcgtctcccccggccacaccctgggccaatcgggctcccacgtcagggtctttgcactcaccatggatgatgatatcgccgcgctcgtcgtcgacaacggctccggcatgtgcaaggccggcttcgcgggcgacgatgccccccgggccgtcttcccctccatcgtggggcgccccaggcaccagggcgtgatggtgggcatgggtcagaaggattcctatgtgggcgacgaggcccagagcaagagaggcatcctcaccctgaagtaccccatcgagcacggcatcgtcaccaactgggacgacatggagaaaatctggcaccacaccttctacaatgagctgcgtgtggctcccgaggagcaccccgt

SEQ ID NO: 103956 - DNA, 472 bp, Homo sapiens
  Payload ID: 437
  Gene Symbol: ACTB
  Gene Name: actin, beta
  ENST ID: ENST00000417101
  CDS Start-End: 175-472
gcacttcctgcccgagccgctggccgcccgagggtgtggccgctgcgtgcgcgcgcgccgacccggcgctgtttgaaccgggcggaggcggggctggcgcccggttgggagggggttggggcctggcttcctgccgcgcgccgcggggacgcctccgaccagtgtttgccttttatgctcaccatggatgatgatatcgccgcgctcgtcgtcgacaacggctccggcatgtgcaaggccggcttcgcgggcgacgatgccccccgggccgtcttcccctccatcgtggggcgccccaggcaccagggcgtgatggtgggcatgggtcagaaggattcctatgtgggcgacgaggcccagagcaagagaggcatcctcaccctgaagtaccccatcgagcacggcatcgtcaccaactgggacgacatggagaaaatctggcaccacaccttctacaatgagctgcgtgtgg

SEQ ID NO: 103957 - DNA, 561 bp, Homo sapiens
  Payload ID: 437
  Gene Symbol: ACTB
  Gene Name: actin, beta
  ENST ID: ENST00000414620
  CDS Start-End: 320-561
attctgctgagtcacttcggaggccacagctgcaaccttgggaacaatacgagtcattcaattcactaggcagcgtcccagcgctcacctgggggacttggccacggtctcttgttagaagcctcttcatggacaacgtggccaaccccacctcacccctatcgtctcccccggccacaccctgggccaatcgggctcccacgtcagggtctttgcatagagatggagtttcaacatgttgtccaggctggtcttgaactcgtgaccacaagtgatccacccaccatggcctcccaaagtgctgggattacagctcaccatggatgatgatatcgccgcgctcgtcgtcgacaacggctccggcatgtgcaaggccggcttcgcgggcgacgatgccccccgggccgtcttcccctccatcgtggggcgccccaggcaccagggcgtgatggtgggcatgggtcagaaggattcctatgtgggcgacgaggcccagagcaagagaggcatcctcaccctgaagtaccccatcgagcacggcatcgtcaccaactgggacga

SEQ ID NO: 103958 - DNA, 568 bp, Homo sapiens
  Payload ID: 437
  Gene Symbol: ACTB
  Gene Name: actin, beta
  ENST ID: ENST00000432588
  CDS Start-End: 78-568
agcttggcgcggcaggcgcgtcggttgcgccacctggcggtcgcctggaaccccacaacccaaccaaccagctcaccatggatgatgatatcgccgcgctcgtcgtcgacaacggctccggcatgtgcaaggccggcttcgcgggcgacgatgccccccgggccgtcttcccctccatcgtggggcgccccaggcaccagggcgtgatggtgggcatgggtcagaaggattcctatgtgggcgacgaggcccagagcaagagaggcatcctcaccctgaagtaccccatcgagcacggcatcgtcaccaactgggacgacatggagaaaatctggcaccacaccttctacaatgagctgcgtgtggctcccgaggagcaccccgtgctgctgaccgaggcccccctgaaccccaaggccaaccgcgagaagatgacccagatcatgtttgagaccttcaacaccccagccatgtacgttgctatccaggctgtgctatccctgtacgcctctggccgtaccactggcatcgtgatggactccggtgacggggtcacccacactgtgcc

SEQ ID NO: 103959 - DNA, 1845 bp, Homo sapiens
  Payload ID: 437
  Gene Symbol: ACTB
  Gene Name: actin, beta
  ENST ID: ENST00000425660
  CDS Start-End: 85-462
accgccgagaccgcgtccgccccgcgagcacagagcctcgcctttgccgatccgccgcccgtccacacccgccgccagctcaccatggatgatgatatcgccgcgctcgtcgtcgacaacggctccggcatgtgcaaggccggcttcgcgggcgacgatgccccccgggccgtcttcccctccatcgtggggcgccccaggcaccagggcgtgatggtgggcatgggtcagaaggattcctatgtgggcgacgaggcccagagcaagagaggcatcctcaccctgaagtaccccatcgagcacggcatcgtcaccaactgggacgacatggagaaaatctggcaccacaccttctacaatgagctgcgtgtggctcccgaggagcaccccgtgctgctgaccgaggcccccctgaaccccaaggccaaccgcgagaagatgacccaggactctcttctctgacctgagtctcctttggaactctgcagatcatgtttgagaccttcaacaccccagccatgtacgttgctatccaggctgtgctatccctgtacgcctctggccgtaccactggcatcgtgatggactccggtgacggggtcacccacactgtgcccatctacgaggggtatgccctcccccatgccatcctgcgtctggacctggctggccgggacctgactgactacctcatgaagatcctcaccgagcgcggctacagcttcaccaccacggccgagcgggaaatcgtgcgtgacattaaggagaagctgtgctacgtcgccctggacttcgagcaagagatggccacggctgcttccagctcctccctggagaagagctacgagctgcctgacggccaggtcatcaccattggcaatgagcggttccgctgccctgaggcactcttccagccttccttcctgggcatggagtcctgtggcatccacgaaactaccttcaactccatcatgaagtgtgacgtggacatccgcaaagacctgtacgccaacacagtgctgtctggcggcaccaccatgtaccctggcattgccgacaggatgcagaaggagatcactgccctggcacccagcacaatgaagatcaagatcattgctcctcctgagcgcaagtactccgtgtggatcggcggctccatcctggcctcgctgtccaccttccagcagatgtggatcagcaagcaggagtatgacgagtccggcccctccatcgtccaccgcaaatgcttctaggcggactatgacttagttgcgttacaccctttcttgacaaaacctaacttgcgcagaaaacaagatgagattggcatggctttatttgttttttttgttttgttttggttttttttttttttttggcttgactcaggatttaaaaactggaacggtgaaggtgacagcagtcggttggagcgagcatcccccaaagttcacaatgtggccgaggactttgattgcacattgttgtttttttaatagtcattccaaatatgagatgcgttgttacaggaagtcccttgccatcctaaaagccaccccacttctctctaaggagaatggcccagtcctctcccaagtccacacaggggaggtgatagcattgctttcgtgtaaattatgtaatgcaaaatttttttaatcttcgccttaatacttttttattttgttttattttgaatgatgagccttcgtgcccccccttcccccttttttgtcccccaacttgagatgtatgaaggcttttggtctccctgggagtgggtggaggcagccagggcttacctgtacactgacttgagaccagttgaataaaagtgcacacctt

SEQ ID NO: 103960 - DNA, 2794 bp, Homo sapiens
  Payload ID: 438
  Gene Symbol: ACTBL2
  Gene Name: actin, beta-like 2
  Uniprot ID: Q562R1
  ENST ID: ENST00000423391
  CDS Start-End: 103-1233
gtctgaaagcatttctggagtgttttaggcctgttcactttctcttactcactgtctattcacttgtcctgttcactcgtctggaagatctcagccagcaccatgactgacaatgagctgtctgccttggtagtggataatgggtcagggatgtgcaaggcaggctttggtggtgacgatgccccccgggctgtgttcccctccatgatagggcgtcctcgacaccagggcgttatggtaggcatgggccagaaggactgctacgtgggagatgaggctcagagcaagagaggcgtcctgaccctgaagtatcctatcgagcatggagtggtcaccaactgggacgatatggaaaagatctggtaccacacattctacaatgagctccgtgtggcaccagatgagcatcccatcctcctcaccgaggcacccctgaaccccaagatcaaccgggaaaagatgactcagatcatgttcgaggctttcaacacaccagccatgtatgtcgccatccaggctgtgctgtccctctatgcctcaggacggaccacaggcatcgtgatggattctggggatggggtcactcacatcgtgcccatctatgaaggttatgccctgcctcatgccattctacgcctggatctggcagggagagacctgactgattacctcatgaagatcctgacagagcgaggctataacttcaccaccactgctgagcgggagattgtgcgagatgtcaaagagaagctgtgctacgtagccctggactttgagcaggagatggtcagggcagccgcatcctcctcaccggaacggagctatgaacttcctgatgggcaggtgatcaccattgggaatgaacgcttccgatgccctgaagccattttccagccttcctttctgggcattgagtccagtgggatccatgagacaaccttcaactctatcatgaagtgcgatgtggatattcgcaaggatctctatgccaacaccgtgttatctggagggagcaccatgtacccaggcattgctgacaggatgcagaaagaaatcataaccctggcacccagcaccatgaaaatcaagatcatagctcccccagagcggaagtattctgtttggattgggggctccatccttgccagcctgtccacattccagcagatgtggatcagtaagcaggaatatgatgaggctggtcctcctatcgttcacagaaaatgtttctgaatgggcttccatattagtgggcttacattttcccttttcctaggtcacagtgatggtactgcttttatccgctttcagtagaatcgaggtaaatacgtcactcttcctagtgtaaaccagcaaacccatctctccatccaagtaacctgggctcttacccagataaccacatccggttctccatcaagtgaaggtgaattctaataccatattcctttttctttgcctatactgttcaaagataggtaggccagcttaaatacatataagtgacaaggagtaaaatcacgagaaatgtcatttcagaatggataactataattatcaagctttaaaacttagttctcgctaaaatatttaacaagaacaggctgtataaacttgtttaaaaaaaaaaggtgcgtatgcatttagcagccgtgtcttactagttaagtatctttgttttgtttacttctttgtatggagataatgaattataaagttcaataatatccatatatacataagcaccagggaaataaaatatattgtgaaatatgctgatgtatctagctatctgaacagctaatgtgaatttctttactcccaaaagtcatcgttgtactaggtacatattttaattgtttcccttactaaataagcataatgagacagccaccattccattaatgtttataaatcatctaaattttcagctcatagtggagttctgctggtcaaattatattttaatatctttcttactgaaccttctcataccaaaactacagacaatgtctaattcttaagagagatagatattataatatcaaattaatgtcattatggtacaatttgacagaggtaattttatttctatttcttagtgtaatagcacatcttaaataatttctgtagaccaggattacagatacttctcttgtgcaaggatttcactgtgggaaaatatagctgcagcatctttattaattatacattttactaccagtatactaacacagttttatccttggaaagcttttagaataattctactttattatgtccagtaactagcaatacttatttatgcaaagtgtctctgagatactaacatctttgaaaatatcaatgtatgttcctataatgtctaaaatattttagttactccagtgatgatttattaaccaattttaagtaccagtatgtttattccaatctatgcagtgatttctgaatatttggatatcagcattatttgtatttttcagggtaatttctgaaaatttaaaatatttatttggattgcttattcaggcattataaggtactctggaggaaggaatcacttctctttttttcttagttgggaaacttgtacttatgttataaatctttaaaatggaatcagtaagaattttttgtttaaggtaatacttttcaaataatttgattattccttattggctttatctgacaacataatctttaaaatgcatgtaaccaaaattaatctccaaaaacactttattttatataacttgctttcagtacattaaaattgcttcatacttgtata

SEQ ID NO: 103961 - DNA, 1530 bp, Homo sapiens
  Payload ID: 439
  Gene Symbol: ACTG2
  Gene Name: actin, gamma 2, smooth muscle, enteric
  Uniprot ID: P63267
  ENST ID: ENST00000345517
  CDS Start-End: 110-1240
tatattgctctggtattcatgccaaagacacaccagccctcagtcactgggagaagaacctctcataccctcggtgctccagtccccagctcactcagccacacacaccatgtgtgaagaggagaccaccgcgctcgtgtgtgacaatggctctggcctgtgcaaggcaggcttcgcaggagatgatgccccccgggctgtcttcccctccattgtgggccgccctcgccaccagggtgtgatggtgggaatgggccagaaagacagctatgtgggggatgaggctcagagcaagcgagggatcctaactctcaaataccccattgaacacggcatcatcaccaactgggatgacatggagaagatctggcaccactccttctacaatgagctgcgtgtagcacctgaagagcaccccaccctgctcacagaggctcccctaaatcccaaggccaacagggaaaagatgacccagatcatgtttgaaaccttcaatgtccctgccatgtacgtcgccattcaagctgtgctctccctctatgcctctggccgcacgacaggcatcgtcctggattcaggtgatggcgtcacccacaatgtccccatctatgaaggctatgccctgccccatgccatcatgcgcctggacttggctggccgtgacctcacggactacctcatgaagatcctcacagagagaggctattcctttgtgaccacagctgagagagaaattgtgcgagacatcaaggagaagctgtgctatgtggccctggattttgagaatgagatggccacagcagcttcctcttcctccctggagaagagctatgagctgccagatgggcaggttatcaccattggcaatgagcgcttccgctgccctgagaccctcttccagccttcctttattggcatggagtccgctggaattcatgagacaacctacaattccatcatgaagtgtgacattgacatccgtaaggacttatatgccaacaatgtcctctctgggggcaccaccatgtaccctggcattgctgacaggatgcagaaggagatcacagccctggcccccagcaccatgaagatcaagattattgctcccccagagcggaagtactcagtctggatcgggggctctatcctggcctctctctccaccttccagcagatgtggatcagcaagcctgagtatgatgaggcagggccctccattgtccacaggaagtgcttctaaagtcagaacaggttctccaaggatcccctcgagactactctgttaccagtcatgaaacattaaaacctacaagccttacttctctgtgtggggctcttttttcctgggctatgtctcatacacagtgctaaggacttttcacacattacttttaatccatgcaatagtgctgtaaggtaggtgctatcattatacccatattacagatgaggaaattgaggctcagagaagtcaaggacttgcgaagatcacacagattccagattaaaattcaagtatctgactgcaaa

SEQ ID NO: 103962 - DNA, 2064 bp, Homo sapiens
  Payload ID: 439
  Gene Symbol: ACTG2
  Gene Name: actin, gamma 2, smooth muscle, enteric
  Uniprot ID: P63267
  ENST ID: ENST00000409624
  CDS Start-End: 644-1774
acaccagccctcagtcactgggagaagaacctctcataccctcggggaataaaagcttcattcctgagtcagtgagagcttcaatgaagcccagatgtcattcgtgctgaaagaaccagaacaactctctgctccctgccaagcatgaagcggttgtgaccccaggaaaccacagtgactttgactctggttcagctgacatgctcgagtctagccacaaattaccagaaagcagctgaggaaagtttagaatttctcctggcagagatggtccacgagtctggctccagggtgaaccccttcttcccagagcagcacggggccctttggaggctcgactccgccagccctcccactgccttccccctgccttccccaccctcacttcggttgagttttgccttcaaaatagcagactccaagccacctgaagggctgcagaacagcgttgttgacagcttcaagtcgccttgtggcttctctgagctgctgctgtgctttggaaacaaaattccaggctctccctctttctgtgtgtgggaaacaccggagagagtttggggagggagacaaaagggcccattgaaaacccagacaggcttgaactgtgctccagtccccagctcactcagccacacacaccatgtgtgaagaggagaccaccgcgctcgtgtgtgacaatggctctggcctgtgcaaggcaggcttcgcaggagatgatgccccccgggctgtcttcccctccattgtgggccgccctcgccaccagggtgtgatggtgggaatgggccagaaagacagctatgtgggggatgaggctcagagcaagcgagggatcctaactctcaaataccccattgaacacggcatcatcaccaactgggatgacatggagaagatctggcaccactccttctacaatgagctgcgtgtagcacctgaagagcaccccaccctgctcacagaggctcccctaaatcccaaggccaacagggaaaagatgacccagatcatgtttgaaaccttcaatgtccctgccatgtacgtcgccattcaagctgtgctctccctctatgcctctggccgcacgacaggcatcgtcctggattcaggtgatggcgtcacccacaatgtccccatctatgaaggctatgccctgccccatgccatcatgcgcctggacttggctggccgtgacctcacggactacctcatgaagatcctcacagagagaggctattcctttgtgaccacagctgagagagaaattgtgcgagacatcaaggagaagctgtgctatgtggccctggattttgagaatgagatggccacagcagcttcctcttcctccctggagaagagctatgagctgccagatgggcaggttatcaccattggcaatgagcgcttccgctgccctgagaccctcttccagccttcctttattggcatggagtccgctggaattcatgagacaacctacaattccatcatgaagtgtgacattgacatccgtaaggacttatatgccaacaatgtcctctctgggggcaccaccatgtaccctggcattgctgacaggatgcagaaggagatcacagccctggcccccagcaccatgaagatcaagattattgctcccccagagcggaagtactcagtctggatcgggggctctatcctggcctctctctccaccttccagcagatgtggatcagcaagcctgagtatgatgaggcagggccctccattgtccacaggaagtgcttctaaagtcagaacaggttctccaaggatcccctcgagactactctgttaccagtcatgaaacattaaaacctacaagccttacttctctgtgtggggctcttttttcctgggctatgtctcatacacagtgctaaggacttttcacacattacttttaatccatgcaatagtgctgtaaggtaggtgctatcattatacccatattacagatgaggaaattgaggctcagagaagtcaaggacttgcgaagatcacacagattccagattaaaattcaagtatctgactgcaaa

SEQ ID NO: 103963 - DNA, 1413 bp, Homo sapiens
  Payload ID: 439
  Gene Symbol: ACTG2
  Gene Name: actin, gamma 2, smooth muscle, enteric
  Uniprot ID: P63267
  ENST ID: ENST00000409731
  CDS Start-End: 122-1123
cctctggggttttatattgctctggtattcatgccaaagacacaccagccctcagtcactgggagaagaacctctcataccctcggtgctccagtccccagctcactcagccacacacaccatgtgtgaagaggagaccaccgcgctcgtgtgtgacaatggctctggcctgtgcaaggcaggcttcgcaggagatgatgccccccgggctgtcttcccctccattgtgggccgccctcgccaccagatctggcaccactccttctacaatgagctgcgtgtagcacctgaagagcaccccaccctgctcacagaggctcccctaaatcccaaggccaacagggaaaagatgacccagatcatgtttgaaaccttcaatgtccctgccatgtacgtcgccattcaagctgtgctctccctctatgcctctggccgcacgacaggcatcgtcctggattcaggtgatggcgtcacccacaatgtccccatctatgaaggctatgccctgccccatgccatcatgcgcctggacttggctggccgtgacctcacggactacctcatgaagatcctcacagagagaggctattcctttgtgaccacagctgagagagaaattgtgcgagacatcaaggagaagctgtgctatgtggccctggattttgagaatgagatggccacagcagcttcctcttcctccctggagaagagctatgagctgccagatgggcaggttatcaccattggcaatgagcgcttccgctgccctgagaccctcttccagccttcctttattggcatggagtccgctggaattcatgagacaacctacaattccatcatgaagtgtgacattgacatccgtaaggacttatatgccaacaatgtcctctctgggggcaccaccatgtaccctggcattgctgacaggatgcagaaggagatcacagccctggcccccagcaccatgaagatcaagattattgctcccccagagcggaagtactcagtctggatcgggggctctatcctggcctctctctccaccttccagcagatgtggatcagcaagcctgagtatgatgaggcagggccctccattgtccacaggaagtgcttctaaagtcagaacaggttctccaaggatcccctcgagactactctgttaccagtcatgaaacattaaaacctacaagccttacttctctgtgtggggctcttttttcctgggctatgtctcatacacagtgctaaggacttttcacacattacttttaatccatgcaatagtgctgtaaggtaggtgctatcattatacccatattacagatgaggaaattgaggctcagagaagtcaaggacttgcgaagatcacacagattccagattaaaattcaagtatctgactgcaaa

SEQ ID NO: 103964 - DNA, 927 bp, Homo sapiens
  Payload ID: 439
  Gene Symbol: ACTG2
  Gene Name: actin, gamma 2, smooth muscle, enteric
  ENST ID: ENST00000409918
  CDS Start-End: 107-466
attgctctggtattcatgccaaagacacaccagccctcagtcactgggagaagaacctctcataccctcggtgctccagtccccagctcactcagccacacacaccatgtgtgaagaggagaccaccgcgctcgtgtgtgacaatggctctggcctgtgcaaggcaggcttcgcaggagatgatgccccccgggctgtcttcccctccattgtgggccgccctcgccaccagggtgtgatggtgggaatgggccagaaagacagctatgtgggggatgaggctcagagcaagcgagggatcctaactctcaaataccccattgaacacggcatcatcaccaactgggatgacatggagaagccccacgaccatttctccaacctaggctgccaacatctctccctggactattgcaatggcttcctggctgatttcttggtctcttgccctcattcaccgaattaattctctacactgctgcaaaactgatctttctaaacacaggtcagctcatgtcactcacctcctcagaaatcttcagtagctcttcattaaccaacagggggttcctaactccccgtcttggcattggaggacctttccctgcctgatccccgcgatcatcttttcctgcaatatttactcaggccagtgctcaccccttctttaaaatgctggtgctggctcaagagaggcaaacagccatctctctcattcttatcttccctgtcaagacttcacataggtggactgatgctagactatgatgatgagtctccagtgaaagtttctaagtagaactctctcagggtttctagaagcatttttgtttaagaaaatattgtggggggagcgggatttttaaatggtggagctcatggtaaacaaaattatgtgtgcaaaatgttaatagagcctttctaata

SEQ ID NO: 103965 - DNA, 594 bp, Homo sapiens
  Payload ID: 439
  Gene Symbol: ACTG2
  Gene Name: actin, gamma 2, smooth muscle, enteric
  ENST ID: ENST00000429756
  CDS Start-End: 122-280
cctctggggttttatattgctctggtattcatgccaaagacacaccagccctcagtcactgggagaagaacctctcataccctcggtgctccagtccccagctcactcagccacacacaccatgtgtgaagaggagaccaccgcgctcgtgtgtgacaatggctctggcctgtgcaaggcaggcttcgcaggagatgatgccccccgggctgtcttcccctccattgtgggccgccctcgccaccaggtgcgtgctcatctggataccaccaggctttgagccactaggaatctggcaccactccttctacaatgagctgcgtgtagcacctgaagagcaccccaccctgctcacagaggctcccctaaatcccaaggccaacagggaaaagatgacccagatcatgtttgaaaccttcaatgtccctgccatgtacgtcgccattcaagctgtgctctccctctatgcctctggccgcacgacaggcatcgtcctggattcaggtgatggcgtcacccacaatgtccccatctatgaaggctatgccctgccccatgccatcatgcgcctggacttggctggccgtgacctca

SEQ ID NO: 103966 - DNA, 540 bp, Homo sapiens
  Payload ID: 439
  Gene Symbol: ACTG2
  Gene Name: actin, gamma 2, smooth muscle, enteric
  ENST ID: ENST00000442912
  CDS Start-End: 107-540
attgctctggtattcatgccaaagacacaccagccctcagtcactgggagaagaacctctcataccctcggtgctccagtccccagctcactcagccacacacaccatgtgtgaagaggagaccaccgcgctcgtgtgtgacaatggctctggcctgtgcaaggcaggcttcgcaggagatgatgccccccgggctgtcttcccctccattgtgggccgccctcgccaccagggtgtgatggtgggaatgggccagaaagacagctatgtgggggatgaggctcagagcaagcgagggatcctaactctcaaataccccattgaacacggcatcatcaccaactgggatgacatggagaagatctggcaccactccttctacaatgagctgcgtgtagcacctgaagagcaccccaccctgctcacagaggctcccctaaatcccaaggccaacagggaaaagatgacccaggtaagaagccaggaagacttgaacactggcataagaatgcaacatggatgcttggccagatactttct

SEQ ID NO: 103967 - DNA, 1921 bp, Homo sapiens
  Payload ID: 439
  Gene Symbol: ACTG2
  Gene Name: actin, gamma 2, smooth muscle, enteric
  ENST ID: ENST00000438902
  CDS Start-End: 308-625
gttaggtgtgcctcaaccctgaagcaggtccctcagtctgcagatatttagagatatttaaaggaaaaccaggaaggagccaagagagaatgaagcctaaggtgtcctgagaccctcagagaactcagcccaagggttaggagcttgtgtcaaggtgcagcagggactttgtttaaagaagatccgcctctggggttttatattgctctggtattcatgccaaagacacaccagccctcagtcactgggagaagaacctctcataccctcggtgctccagtccccagctcactcagccacacacaccatgtgtgaagaggagaccaccgcgctcgtgtgtgacaatggctctggcctgtgcaaggcaggcttcgcaggagatgatgccccccgggctgtcttcccctccattgtgggccgccctcgccaccagggtgtgatggtgggaatgggccagaaagacagctatgtgggggatgaggctcagagcaagcgagggatcctaactctcaaataccccattgaacacggcatcatcaccaactgggatgacatggagaagcctcttgcaggaatcttctatcagccaaatatagccagaagccagaaagcaatgaacacttgagtgatacaatgtgccttgcatcactcagtgcacaaaggcaggggagagactgtaggagagtgaagaggagggaaggtcaaatggaaataatgaacacatagaaaatactggttccaggtctgagtcctacctggggccctgttgagaaggagtataccctttaaatgtcaatcagaaatttccagggctgaccattctcctctccagatccatcccatcctgtgtaacatggtgccacactctcccagcatgggaatgtcaatgagaattttccagccattgggagtctgccaggctcatatggcttttgtctccactagatctggcaccactccttctacaatgagctgcgtgtagcacctgaagagcaccccaccctgctcacagaggctcccctaaatcccaaggccaacagggaaaagatgacccagatcatgtttgaaaccttcaatgtccctgccatgtacgtcgccattcaagctgtgctctccctctatgcctctggccgcacgacaggcatcgtcctggattcaggtgatggcgtcacccacaatgtccccatctatgaaggctatgccctgccccatgccatcatgcgcctggacttggctggccgtgacctcacggactacctcatgaagatcctcacagagagaggctattcctttgtgaccacagctgagagagaaattgtgcgagacatcaaggagaagctgtgctatgtggccctggattttgagaatgagatggccacagcagcttcctcttcctccctggagaagagctatgagctgccagatgggcaggttatcaccattggcaatgagcgcttccgctgccctgagaccctcttccagccttcctttattggcatggagtccgctggaattcatgagacaacctacaattccatcatgaagtgtgacattgacatccgtaaggacttatatgccaacaatgtcctctctgggggcaccaccatgtaccctggcattgctgacaggatgcagaaggagatcacagccctggcccccagcaccatgaagatcaagattattgctcccccagagcggaagtactcagtctggatcgggggctctatcctggcctctctctccaccttccagcagatgtggatcagcaagcctgagtatgatgaggcagggccctccattgtccacaggaagtgcttctaaagtcagaacaggttctccaaggatcccctcgagactactctgttaccagtcatgaaacattaaaacctacaagccttacttctctgtgtggggctctttt

SEQ ID NO: 103968 - DNA, 3779 bp, Homo sapiens
  Payload ID: 440
  Gene Symbol: ACTN1
  Gene Name: actinin, alpha 1
  Uniprot ID: P12814
  ENST ID: ENST00000193403
  CDS Start-End: 385-3063
aggaattcccaatgagaggcgatggggggaagtttgggcaactcggcctggccaatggagagcctcgggagggctctgccccttccccccgcccccgcccgcctcggctcccgcagcgctagtgtgtccgcctagttcagtgtgcgtggagattaggtccaagcgcccgcccagaggcaggcagtccgcgagcccagccgccgctgtcgccgccagtagcagccttcgccagcagcgccgcggcggaaccgggcgcaggggagcgagcccggccccgccagcccagcccagcccagccctactccctccccacgccagggcagcagccgttgctcagagagaaggtggaggaagaaatccagaccctagcacgcgcgcaccatcatggaccattatgattctcagcaaaccaacgattacatgcagccagaagaggactgggaccgggacctgctcctggacccggcctgggagaagcagcagagaaagacattcacggcatggtgtaactcccacctccggaaggcggggacacagatcgagaacatcgaagaggacttccgggatggcctgaagctcatgctgctgctggaggtcatctcaggtgaacgcttggccaagccagagcgaggcaagatgagagtgcacaagatctccaacgtcaacaaggccctggatttcatagccagcaaaggcgtcaaactggtgtccatcggagccgaagaaatcgtggatgggaatgtgaagatgaccctgggcatgatctggaccatcatcctgcgctttgccatccaggacatctccgtggaagagacttcagccaaggaagggctgctcctgtggtgtcagagaaagacagccccttacaaaaatgtcaacatccagaacttccacataagctggaaggatggcctcggcttctgtgctttgatccaccgacaccggcccgagctgattgactacgggaagctgcggaaggatgatccactcacaaatctgaatacggcttttgacgtggcagagaagtacctggacatccccaagatgctggatgccgaagacatcgttggaactgcccgaccggatgagaaagccatcatgacttacgtgtctagcttctaccacgccttctctggagcccagaaggcggagacagcagccaatcgcatctgcaaggtgttggccgtcaaccaggagaacgagcagcttatggaagactacgagaagctggccagtgatctgttggagtggatccgccgcacaatcccgtggctggagaaccgggtgcccgagaacaccatgcatgccatgcaacagaagctggaggacttccgggactaccggcgcctgcacaagccgcccaaggtgcaggagaagtgccagctggagatcaacttcaacacgctgcagaccaagctgcggctcagcaaccggcctgccttcatgccctctgagggcaggatggtctcggacatcaacaatgcctggggctgcctggagcaggtggagaagggctatgaggagtggttgctgaatgagatccggaggctggagcgactggaccacctggcagagaagttccggcagaaggcctccatccacgaggcctggactgacggcaaagaggccatgctgcgacagaaggactatgagaccgccaccctctcggagatcaaggccctgctcaagaagcatgaggccttcgagagtgacctggctgcccaccaggaccgtgtggagcagattgccgccatcgcacaggagctcaatgagctggactattatgactcacccagtgtcaacgcccgttgccaaaagatctgtgaccagtgggacaatctgggggccctaactcagaagcgaagggaagctctggagcggaccgagaaactgctggagaccattgaccagctgtacttggagtatgccaagcgggctgcacccttcaacaactggatggagggggccatggaggacctgcaggacaccttcattgtgcacaccattgaggagatccagggactgaccacagcccatgagcagttcaaggccaccctccctgatgccgacaaggagcgcctggccatcctgggcatccacaatgaggtgtccaagattgtccagacctaccacgtcaatatggcgggcaccaacccctacacaaccatcacgcctcaggagatcaatggcaaatgggaccacgtgcggcagctggtgcctcggagggaccaagctctgacggaggagcatgcccgacagcagcacaatgagaggctacgcaagcagtttggagcccaggccaatgtcatcgggccctggatccagaccaagatggaggagatcgggaggatctccattgagatgcatgggaccctggaggaccagctcagccacctgcggcagtatgagaagagcatcgtcaactacaagccaaagattgatcagctggagggcgaccaccagctcatccaggaggcgctcatcttcgacaacaagcacaccaactacaccatggagcacatccgtgtgggctgggagcagctgctcaccaccatcgccaggaccatcaatgaggtagagaaccagatcctgacccgggatgccaagggcatcagccaggagcagatgaatgagttccgggcctccttcaaccactttgaccgggatcactccggcacactgggtcccgaggagttcaaagcctgcctcatcagcttgggttatgatattggcaacgacccccagggagaagcagaatttgcccgcatcatgagcattgtggaccccaaccgcctgggggtagtgacattccaggccttcattgacttcatgtcccgcgagacagccgacacagatacagcagaccaagtcatggcttccttcaagatcctggctggggacaagaactacattaccatggacgagctgcgccgcgagctgccacccgaccaggctgagtactgcatcgcgcggatggccccctacaccggccccgactccgtgccaggtgctctggactacatgtccttctccacggcgctgtacggcgagagtgacctctaatccaccccgcccggccgccctcgtcttgtgcgccgtgccctgccttgcacctccgccgtcgcccatctcctgcctgggttcggtttcagctcccagcctccacccgggtgagctggggcccacgtggcatcgatcctccctgcccgcgaagtgacagtttacaaaattattttctgcaaaaaagaaaaaaaagttacgttaaaaaccaaaaaactacatattttattatagaaaaagtattttttctccaccagacaaatggaaaaaaagaggaaagattaactatttgcaccgaaatgtcttgttttgttgcgacataggaaaataaccaagcacaaagttatattccatcctttttactgatttttttttcttctatctgttccatctgctgtattcatttctccaatctcatgtccattttggtgtgggagtcggggtagggggtactcttgtcaaaaggcacattggtgcatgtgtgtttgctagctcacttgtccatgaaaatattttatgatattaaagaaaatcttttgaaatggctgttttttaaggaagagaatttatgtggcttctcatttttaaatcccctcagaggtgtgactagtctctttatcagcacacacttaaaaaatttttaatattgtctattaaaaataggacaaacttggagagtatggacaactttgatattgcttggcacagatggtattaaa

SEQ ID NO: 103969 - DNA, 2824 bp, Homo sapiens
  Payload ID: 440
  Gene Symbol: ACTN1
  Gene Name: actinin, alpha 1
  ENST ID: ENST00000376839
  CDS Start-End: 280-2748
aaaacacacacaatgggcttcctcaaagcaggatgacctgggccgcggtgcccaaggcctatgcagggctgggccctatacagcgacatcggtcatctacatcggacatgggaaggtcccctgacttcgaactgacttctttgtaatgtgccagttgcttaaactccccctcttcctgtcatcttcctaacattcacggcatggtgtaactcccacctccggaaggcggggacacagatcgagaacatcgaagaggacttccgggatggcctgaagctcatgctgctgctggaggtcatctcaggtgaacgcttggccaagccagagcgaggcaagatgagagtgcacaagatctccaacgtcaacaaggccctggatttcatagccagcaaaggcgtcaaactggtgtccatcggagccgaagaaatcgtggatgggaatgtgaagatgaccctgggcatgatctggaccatcatcctgcgctttgccatccaggacatctccgtggaagagacttcagccaaggaagggctgctcctgtggtgtcagagaaagacagccccttacaaaaatgtcaacatccagaacttccacataagctggaaggatggcctcggcttctgtgctttgatccaccgacaccggcccgagctgattgactacgggaagctgcggaaggatgatccactcacaaatctgaatacggcttttgacgtggcagagaagtacctggacatccccaagatgctggatgccgaagacatcgttggaactgcccgaccggatgagaaagccatcatgacttacgtgtctagcttctaccacgccttctctggagcccagaaggcggagacagcagccaatcgcatctgcaaggtgttggccgtcaaccaggagaacgagcagcttatggaagactacgagaagctggccagtgatctgttggagtggatccgccgcacaatcccgtggctggagaaccgggtgcccgagaacaccatgcatgccatgcaacagaagctggaggacttccgggactaccggcgcctgcacaagccgcccaaggtgcaggagaagtgccagctggagatcaacttcaacacgctgcagaccaagctgcggctcagcaaccggcctgccttcatgccctctgagggcaggatggtctcggacatcaacaatgcctggggctgcctggagcaggtggagaagggctatgaggagtggttgctgaatgagatccggaggctggagcgactggaccacctggcagagaagttccggcagaaggcctccatccacgaggcctggactgacggcaaagaggccatgctgcgacagaaggactatgagaccgccaccctctcggagatcaaggccctgctcaagaagcatgaggccttcgagagtgacctggctgcccaccaggaccgtgtggagcagattgccgccatcgcacaggagctcaatgagctggactattatgactcacccagtgtcaacgcccgttgccaaaagatctgtgaccagtgggacaatctgggggccctaactcagaagcgaagggaagctctggagcggaccgagaaactgctggagaccattgaccagctgtacttggagtatgccaagcgggctgcacccttcaacaactggatggagggggccatggaggacctgcaggacaccttcattgtgcacaccattgaggagatccagggactgaccacagcccatgagcagttcaaggccaccctccctgatgccgacaaggagcgcctggccatcctgggcatccacaatgaggtgtccaagattgtccagacctaccacgtcaatatggcgggcaccaacccctacacaaccatcacgcctcaggagatcaatggcaaatgggaccacgtgcggcagctggtgcctcggagggaccaagctctgacggaggagcatgcccgacagcagcacaatgagaggctacgcaagcagtttggagcccaggccaatgtcatcgggccctggatccagaccaagatggaggagatcgggaggatctccattgagatgcatgggaccctggaggaccagctcagccacctgcggcagtatgagaagagcatcgtcaactacaagccaaagattgatcagctggagggcgaccaccagctcatccaggaggcgctcatcttcgacaacaagcacaccaactacaccatggagcacatccgtgtgggctgggagcagctgctcaccaccatcgccaggaccatcaatgaggtagagaaccagatcctgacccgggatgccaagggcatcagccaggagcagatgaatgagttccgggcctccttcaaccactttgaccggaagaagacaggcatgatggacacggatgatttccgcgcctgcctgatctccatgggttacaacatgggagaagcagaatttgcccgcatcatgagcattgtggaccccaaccgcctgggggtagtgacattccaggccttcattgacttcatgtcccgcgagacagccgacacagatacagcagaccaagtcatggcttccttcaagatcctggctggggacaagaactacattaccatggacgagctgcgccgcgagctgccacccgaccaggctgagtactgcatcgcgcggatggccccctacaccggccccgactccgtgccaggtgctctggactacatgtccttctccacggcgctgtacggcgagagtgacctctaatccaccccgcccggccgccctcgtcttgtgcgccgtgccctgccttgcacctccgccgtcgcccatctcctgcctg

SEQ ID NO: 103970 - DNA, 3464 bp, Homo sapiens
  Payload ID: 440
  Gene Symbol: ACTN1
  Gene Name: actinin, alpha 1
  Uniprot ID: P12814
  ENST ID: ENST00000394419
  CDS Start-End: 184-2928
cgctgtcgccgccagtagcagccttcgccagcagcgccgcggcggaaccgggcgcaggggagcgagcccggccccgccagcccagcccagcccagccctactccctccccacgccagggcagcagccgttgctcagagagaaggtggaggaagaaatccagaccctagcacgcgcgcaccatcatggaccattatgattctcagcaaaccaacgattacatgcagccagaagaggactgggaccgggacctgctcctggacccggcctgggagaagcagcagagaaagacattcacggcatggtgtaactcccacctccggaaggcggggacacagatcgagaacatcgaagaggacttccgggatggcctgaagctcatgctgctgctggaggtcatctcaggtgaacgcttggccaagccagagcgaggcaagatgagagtgcacaagatctccaacgtcaacaaggccctggatttcatagccagcaaaggcgtcaaactggtgtccatcggagccgaagaaatcgtggatgggaatgtgaagatgaccctgggcatgatctggaccatcatcctgcgctttgccatccaggacatctccgtggaagagacttcagccaaggaagggctgctcctgtggtgtcagagaaagacagccccttacaaaaatgtcaacatccagaacttccacataagctggaaggatggcctcggcttctgtgctttgatccaccgacaccggcccgagctgattgactacgggaagctgcggaaggatgatccactcacaaatctgaatacggcttttgacgtggcagagaagtacctggacatccccaagatgctggatgccgaagacatcgttggaactgcccgaccggatgagaaagccatcatgacttacgtgtctagcttctaccacgccttctctggagcccagaaggcggagacagcagccaatcgcatctgcaaggtgttggccgtcaaccaggagaacgagcagcttatggaagactacgagaagctggccagtgatctgttggagtggatccgccgcacaatcccgtggctggagaaccgggtgcccgagaacaccatgcatgccatgcaacagaagctggaggacttccgggactaccggcgcctgcacaagccgcccaaggtgcaggagaagtgccagctggagatcaacttcaacacgctgcagaccaagctgcggctcagcaaccggcctgccttcatgccctctgagggcaggatggtctcggacatcaacaatgcctggggctgcctggagcaggtggagaagggctatgaggagtggttgctgaatgagatccggaggctggagcgactggaccacctggcagagaagttccggcagaaggcctccatccacgaggcctggactgacggcaaagaggccatgctgcgacagaaggactatgagaccgccaccctctcggagatcaaggccctgctcaagaagcatgaggccttcgagagtgacctggctgcccaccaggaccgtgtggagcagattgccgccatcgcacaggagctcaatgagctggactattatgactcacccagtgtcaacgcccgttgccaaaagatctgtgaccagtgggacaatctgggggccctaactcagaagcgaagggaagctctggagcggaccgagaaactgctggagaccattgaccagctgtacttggagtatgccaagcgggctgcacccttcaacaactggatggagggggccatggaggacctgcaggacaccttcattgtgcacaccattgaggagatccagggactgaccacagcccatgagcagttcaaggccaccctccctgatgccgacaaggagcgcctggccatcctgggcatccacaatgaggtgtccaagattgtccagacctaccacgtcaatatggcgggcaccaacccctacacaaccatcacgcctcaggagatcaatggcaaatgggaccacgtgcggcagctggtgcctcggagggaccaagctctgacggaggagcatgcccgacagcagcacaatgagaggctacgcaagcagtttggagcccaggccaatgtcatcgggccctggatccagaccaagatggaggagatcgggaggatctccattgagatgcatgggaccctggaggaccagctcagccacctgcggcagtatgagaagagcatcgtcaactacaagccaaagattgatcagctggagggcgaccaccagctcatccaggaggcgctcatcttcgacaacaagcacaccaactacaccatggagcacatccgtgtgggctgggagcagctgctcaccaccatcgccaggaccatcaatgaggtagagaaccagatcctgacccgggatgccaagggcatcagccaggagcagatgaatgagttccgggcctccttcaaccactttgaccgggatcactccggcacactgggtcccgaggagttcaaagcctgcctcatcagcttgggttatgatattggcaacgacccccagaagaagacaggcatgatggacacggatgatttccgcgcctgcctgatctccatgggttacaacatgggagaagcagaatttgcccgcatcatgagcattgtggaccccaaccgcctgggggtagtgacattccaggccttcattgacttcatgtcccgcgagacagccgacacagatacagcagaccaagtcatggcttccttcaagatcctggctggggacaagaactacattaccatggacgagctgcgccgcgagctgccacccgaccaggctgagtactgcatcgcgcggatggccccctacaccggccccgactccgtgccaggtgctctggactacatgtccttctccacggcgctgtacggcgagagtgacctctaatccaccccgcccggccgccctcgtcttgtgcgccgtgccctgccttgcacctccgccgtcgcccatctcctgcctgggttcggtttcagctcccagcctccacccgggtgagctggggcccacgtggcatcgatcctccctgcccgcgaagtgacagtttacaaaattattttctgcaaaaaagaaaaaaaagttacgttaaaaaccaaaaaactacatattttattatagaaaaagtattttttctccaccagacaaatggaaaaaaagaggaaagattaactatttgcaccgaaatgtcttgttttgttgcgacataggaaaataaccaagcacaaagttatattccatcctttttactgatttttttttcttctatctgttccatctgctgtattcatttctccaatctcatgtccattttggtgtgggagtcggggtagggggtactcttgtcaaaaggcacattggtgcatgtgtgtttgctagctcacttgtccatgaaaatattttatgatattaaagaaaatcttttg

SEQ ID NO: 103971 - DNA, 3043 bp, Homo sapiens
  Payload ID: 440
  Gene Symbol: ACTN1
  Gene Name: actinin, alpha 1
  Uniprot ID: P12814
  ENST ID: ENST00000438964
  CDS Start-End: 207-2870
aggcagtccgcgagcccagccgccgctgtcgccgccagtagcagccttcgccagcagcgccgcggcggaaccgggcgcaggggagcgagcccggccccgccagcccagcccagcccagccctactccctccccacgccagggcagcagccgttgctcagagagaaggtggaggaagaaatccagaccctagcacgcgcgcaccatcatggaccattatgattctcagcaaaccaacgattacatgcagccagaagaggactgggaccgggacctgctcctggacccggcctgggagaagcagcagagaaagacattcacggcatggtgtaactcccacctccggaaggcggggacacagatcgagaacatcgaagaggacttccgggatggcctgaagctcatgctgctgctggaggtcatctcaggtgaacgcttggccaagccagagcgaggcaagatgagagtgcacaagatctccaacgtcaacaaggccctggatttcatagccagcaaaggcgtcaaactggtgtccatcggagccgaagaaatcgtggatgggaatgtgaagatgaccctgggcatgatctggaccatcatcctgcgctttgccatccaggacatctccgtggaagagacttcagccaaggaagggctgctcctgtggtgtcagagaaagacagccccttacaaaaatgtcaacatccagaacttccacataagctggaaggatggcctcggcttctgtgctttgatccaccgacaccggcccgagctgattgactacgggaagctgcggaaggatgatccactcacaaatctgaatacggcttttgacgtggcagagaagtacctggacatccccaagatgctggatgccgaagacatcgttggaactgcccgaccggatgagaaagccatcatgacttacgtgtctagcttctaccacgccttctctggagcccagaaggcggagacagcagccaatcgcatctgcaaggtgttggccgtcaaccaggagaacgagcagcttatggaagactacgagaagctggccagtgatctgttggagtggatccgccgcacaatcccgtggctggagaaccgggtgcccgagaacaccatgcatgccatgcaacagaagctggaggacttccgggactaccggcgcctgcacaagccgcccaaggtgcaggagaagtgccagctggagatcaacttcaacacgctgcagaccaagctgcggctcagcaaccggcctgccttcatgccctctgagggcaggatggtctcggacatcaacaatgcctggggctgcctggagcaggtggagaagggctatgaggagtggttgctgaatgagatccggaggctggagcgactggaccacctggcagagaagttccggcagaaggcctccatccacgaggcctggactgacggcaaagaggccatgctgcgacagaaggactatgagaccgccaccctctcggagatcaaggccctgctcaagaagcatgaggccttcgagagtgacctggctgcccaccaggaccgtgtggagcagattgccgccatcgcacaggagctcaatgagctggactattatgactcacccagtgtcaacgcccgttgccaaaagatctgtgaccagtgggacaatctgggggccctaactcagaagcgaagggaagctctggagcggaccgagaaactgctggagaccattgaccagctgtacttggagtatgccaagcgggctgcacccttcaacaactggatggagggggccatggaggacctgcaggacaccttcattgtgcacaccattgaggagatccagggactgaccacagcccatgagcagttcaaggccaccctccctgatgccgacaaggagcgcctggccatcctgggcatccacaatgaggtgtccaagattgtccagacctaccacgtcaatatggcgggcaccaacccctacacaaccatcacgcctcaggagatcaatggcaaatgggaccacgtgcggcagctggtgcctcggagggaccaagctctgacggaggagcatgcccgacagcagcacaatgagaggctacgcaagcagtttggagcccaggccaatgtcatcgggccctggatccagaccaagatggaggagatcgggaggatctccattgagatgcatgggaccctggaggaccagctcagccacctgcggcagtatgagaagagcatcgtcaactacaagccaaagattgatcagctggagggcgaccaccagctcatccaggaggcgctcatcttcgacaacaagcacaccaactacaccatggagcacatccgtgtgggctgggagcagctgctcaccaccatcgccaggaccatcaatgaggtagagaaccagatcctgacccgggatgccaagggcatcagccaggagcagatgaatgagttccgggcctccttcaaccactttgaccggaagaagacaggcatgatggacacggatgatttccgcgcctgcctgatctccatgggttacaacatgggagaagcagaatttgcccgcatcatgagcattgtggaccccaaccgcctgggggtagtgacattccaggccttcattgacttcatgtcccgcgagacagccgacacagatacagcagaccaagtcatggcttccttcaagatcctggctggggacaagaactacattaccatggacgagctgcgccgcgagctgccacccgaccaggctgagtactgcatcgcgcggatggccccctacaccggccccgactccgtgccaggtgctctggactacatgtccttctccacggcgctgtacggcgagagtgacctctaatccaccccgcccggccgccctcgtcttgtgcgccgtgccctgccttgcacctccgccgtcgcccatctcctgcctgggttcggtttcagctcccagcctccacccgggtgagctggggcccacgtggcatcgatcctccctgcccgcgaagtgacagtttacaaaattatttt

SEQ ID NO: 103972 - DNA, 2813 bp, Homo sapiens
  Payload ID: 440
  Gene Symbol: ACTN1
  Gene Name: actinin, alpha 1
  Uniprot ID: P12814
  ENST ID: ENST00000538545
  CDS Start-End: 21-2813
cctagcacgcgcgcaccatcatggaccattatgattctcagcaaaccaacgattacatgcagccagaagaggactgggaccgggacctgctcctggacccggcctgggagaagcagcagagaaagacattcacggcatggtgtaactcccacctccggaaggcggggacacagatcgagaacatcgaagaggacttccgggatggcctgaagctcatgctgctgctggaggtcatctcaggtgaacgcttggccaagccagagcgaggcaagatgagagtgcacaagatctccaacgtcaacaaggccctggatttcatagccagcaaaggcgtcaaactggtgtccatcggagccgaagaaatcgtggatgggaatgtgaagatgaccctgggcatgatctggaccatcatcctgcgctttgccatccaggacatctccgtggaagagacttcagccaaggaagggctgctcctgtggtgtcagagaaagacagccccttacaaaaatgtcaacatccagaacttccacataagctggaaggatggcctcggcttctgtgctttgatccaccgacaccggcccgagctgattgactacgggaagctgcggaaggatgatccactcacaaatctgaatacggcttttgacgtggcagagaagtacctggacatccccaagatgctggatgccgaagacatcgttggaactgcccgaccggatgagaaagccatcatgacttacgtgtctagcttctaccacgccttctctggagcccagaaggcggagacagcagccaatcgcatctgcaaggtgttggccgtcaaccaggagaacgagcagcttatggaagactacgagaagctggccagtgatctgttggagtggatccgccgcacaatcccgtggctggagaaccgggtgcccgagaacaccatgcatgccatgcaacagaagctggaggacttccgggactaccggcgcctgcacaagccgcccaaggtgcaggagaagtgccagctggagatcaacttcaacacgctgcagaccaagctgcggctcagcaaccggcctgccttcatgccctctgagggcaggatggtctcggacatcaacaatgcctggggctgcctggagcaggtggagaagggctatgaggagtggttgctgaatgagatccggaggctggagcgactggaccacctggcagagaagttccggcagaaggcctccatccacgaggcctggactgacggcaaagaggccatgctgcgacagaaggactatgagaccgccaccctctcggagatcaaggccctgctcaagaagcatgaggccttcgagagtgacctggctgcccaccaggaccgtgtggagcagattgccgccatcgcacaggagctcaatgagctggactattatgactcacccagtgtcaacgcccgttgccaaaagatctgtgaccagtgggacaatctgggggccctaactcagaagcgaagggaagctctggagcggaccgagaaactgctggagaccattgaccagctgtacttggagtatgccaagcgggctgcacccttcaacaactggatggagggggccatggaggacctgcaggacaccttcattgtgcacaccattgaggagatccagggactgaccacagcccatgagcagttcaaggccaccctccctgatgccgacaaggagcgcctggccatcctgggcatccacaatgaggtgtccaagattgtccagacctaccacgtcaatatggcgggcaccaacccctacacaaccatcacgcctcaggagatcaatggcaaatgggaccacgtgcggcagctggtgcctcggagggaccaagctctgacggaggagcatgcccgacagcagcacaatgagaggctacgcaagcagtttggagcccaggccaatgtcatcgggccctggatccagaccaagatggaggagatcgggaggatctccattgagatgcatgggaccctggaggaccagctcagccacctgcggcagtatgagaagagcatcgtcaactacaagccaaagattgatcagctggagggcgaccaccagctcatccaggaggcgctcatcttcgacaacaagcacaccaactacaccatggagcacatccgtgtgggctgggagcagctgctcaccaccatcgccaggaccatcaatgaggtagagaaccagatcctgacccgggatgccaagggcatcagccaggagcagatgaatgagttccgggcctccttcaaccactttgaccggaagaagacaggcatgatggacacggatgatttccgcgcctgcctgatctccatgggttacaacatgggagaagcagaatttgcccgcatcatgagcattgtggaccccaaccgcctgggggtagtgacattccaggccttcattgacttcatgtcccgcgagacagccgacacagatacagcagaccaagtcatggcttccttcaagatcctggctggggacaagttacaggagggaggcaaaatgcaaacggcacatgctgccttcacgccgccaggctttgcggctgtgtcgggccgcgccgctttacggctgctggactttgcggccttcctgaccactctctcctcgcagaactacattaccatggacgagctgcgccgcgagctgccacccgaccaggctgagtactgcatcgcgcggatggccccctacaccggccccgactccgtgccaggtgctctggactacatgtccttctccacggcgctgtacggcgagagtgacctctaa

SEQ ID NO: 103973 - DNA, 891 bp, Homo sapiens
  Payload ID: 440
  Gene Symbol: ACTN1
  Gene Name: actinin, alpha 1
  ENST ID: ENST00000544964
  CDS Start-End: 1-891
gacggcaaagaggccatgctgcgacagaaggactatgagaccgccaccctctcggagatcaaggccctgctcaagaagcatgaggccttcgagagtgacctggctgcccaccaggaccgtgtggagcagattgccgccatcgcacaggagctcaatgagctggactattatgactcacccagtgtcaacgcccgttgccaaaagatctgtgaccagtgggacaatctgggggccctaactcagaagcgaagggaagctctggagcggaccgagaaactgctggagaccattgaccagctgtacttggagtatgccaagcgggctgcacccttcaacaactggatggagggggccatggaggacctgcaggacaccttcattgtgcacaccattgaggagatccagggactgaccacagcccatgagcagttcaaggccaccctccctgatgccgacaaggagcgcctggccatcctgggcatccacaatgaggtgtccaagattgtccagacctaccacgtcaatatggcgggcaccaacccctacacaaccatcacgcctcaggagatcaatggcaaatgggaccacctcagccacctgcggcagtatgagaagagcatcgtcaactacaagccaaagattgatcagctggagggcgaccaccagctcatccaggaggcgctcatcttcgacaacaagcacaccaactacaccatggagcacatccgtgtgggctgggagcagctgctcaccaccatcgccaggaccatcaatgaggtagagaaccagatcctgacccgggatgccaagggcatcagccaggagcagatgaatgagttccgggcctccttcaaccactttgaccgggatcactccggcacactgggtccc

SEQ ID NO: 103974 - DNA, 530 bp, Homo sapiens
  Payload ID: 440
  Gene Symbol: ACTN1
  Gene Name: actinin, alpha 1
  ENST ID: ENST00000553779
  CDS Start-End: 276-530
gctttggagccagcagcactggtgtggaggcaagctctgctgtctgacttgctgtgtccttgagctggtccttattctgagcctcagtttcttcctctgtaaaaagacaatctgtcttgcagagttgttgccgagactaaatgagatgatggatgtaaaccacccaagctggcatcccatacctgacattcacggcatggtgtaactcccacctccggaaggcggggacacagatcgagaacatcgaagaggacttccgggatggcctgaagctcatgctgctgctggaggtcatctcaggtgaacgcttggccaagccagagcgaggcaagatgagagtgcacaagatctccaacgtcaacaaggccctggatttcatagccagcaaaggcgtcaaactggtgtccatcggagccgaagaaatcgtggatgggaatgtgaagatgaccctgggcatgatctggaccatcatcctgcgctttgccatccaggacatctccgtggaagagacttcagccaaggaagggctg

SEQ ID NO: 103975 - DNA, 619 bp, Homo sapiens
  Payload ID: 440
  Gene Symbol: ACTN1
  Gene Name: actinin, alpha 1
  ENST ID: ENST00000553290
  CDS Start-End: 1-619
cgagaaactgctggagaccattgaccagctgtacttggagtatgccaagcgggctgcacccttcaacaactggatggagggggccatggaggacctgcaggacaccttcattgtgcacaccattgaggagatccaggtgcggcagctggtgcctcggagggaccaagctctgacggaggagcatgcccgacagcagcacaatgagaggctacgcaagcagtttggagcccaggccaatgtcatcgggccctggatccagaccaagatggaggagatcgggaggatctccattgagatgcatgggaccctggaggaccagctcagccacctgcggcagtatgagaagagcatcgtcaactacaagccaaagattgatcagctggagggcgaccaccagctcatccaggaggcgctcatcttcgacaacaagcacaccaactacaccatggagcacatccgtgtgggctgggagcagctgctcaccaccatcgccaggaccatcaatgaggtagagaaccagatcctgacccgggatgccaagggcatcagccaggagcagatgaatgagttccgggcctccttcaaccactttgaccgggatcactccggcacactgggt

SEQ ID NO: 103976 - DNA, 1259 bp, Homo sapiens
  Payload ID: 440
  Gene Symbol: ACTN1
  Gene Name: actinin, alpha 1
  ENST ID: ENST00000556433
  CDS Start-End: 478-1259
ggagcgcggggaggtggcgccgctggcgggcaggtctccttgggggtccgtggtccaggccaccctgcggctgttgcaaccatccccgcgtgggctgtgctcgggggcggtggtcttcaggctggggctgagaccccggctcggggctgcttgctccggatcgattttcccttttcttccgcccctggccacctctccatatggcgtgcggtggcagcgccgcttcctgggccgccctgggttcaacctgagcggcgggcctcccgggaccctgctgccccttaggcggaggggagagcgccggagagatcggcggccgcctccggatctgcctggagaaggaccagctggagtgcggctggggacgagaaaactggggggcgtacgcgggctcccccgcgggccctgtgggggcggggtcaggacagcagaccgttttattgcttaactcagtgggttggaagctgtaaccccgacatgggcttgcgctacgtcctgcccctccgacccccgggaaagacattcacggcatggtgtaactcccacctccggaaggcggggacacagatcgagaacatcgaagaggacttccgggatggcctgaagctcatgctgctgctggaggtcatctcaggtgaacgcttggccaagccagagcgaggcaagatgagagtgcacaagatctccaacgtcaacaaggccctggatttcatagccagcaaaggcgtcaaactggtgtccatcggagccgaagaaatcgtggatgggaatgtgaagatgaccctgggcatgatctggaccatcatcctgcgctttgccatccaggacatctccgtggaagagacttcagccaaggaagggctgctcctgtggtgtcagagaaagacagccccttacaaaaatgtcaacatccagaacttccacataagctggaaggatggcctcggcttctgtgctttgatccaccgacaccggcccgagctgattgactacgggaagctgcggaaggatgatccactcacaaatctgaatacggcttttgacgtggcagagaagtacctggacatccccaagatgctggatgccgaagacatcgttggaactgcccgaccggatgagaaagccatcatgacttacgtgtctagcttctaccacgccttctctggagcccagaaggcggagacagcagccaatcgcatctgcaaggtgttggccgtcaaccaggagaacgagcagcttatggaagactacgagaagct

SEQ ID NO: 103977 - DNA, 919 bp, Homo sapiens
  Payload ID: 440
  Gene Symbol: ACTN1
  Gene Name: actinin, alpha 1
  ENST ID: ENST00000555616
  CDS Start-End: 204-919
aactcagtgggttggaagctgtaaccccgacatgggcttgcgctacgtcctgcccctccgacccccgggaaaggtgggcagctcggttcgagttgaggggctgcagaacgaggacattcacggcatggtgtaactcccacctccggaaggcggggacacagatcgagaacatcgaagaggacttccgggatggcctgaagctcatgctgctgctggaggtcatctcaggtgaacgcttggccaagccagagcgaggcaagatgagagtgcacaagatctccaacgtcaacaaggccctggatttcatagccagcaaaggcgtcaaactggtgtccatcggagccgaagaaatcgtggatgggaatgtgaagatgaccctgggcatgatctggaccatcatcctgcgctttgccatccaggacatctccgtggaagagacttcagccaaggaagggctgctcctgtggtgtcagagaaagacagccccttacaaaaatgtcaacatccagaacttccacataagctggaaggatggcctcggcttctgtgctttgatccaccgacaccggcccgagctgattgactacgggaagctgcggaaggatgatccactcacaaatctgaatacggcttttgacgtggcagagaagtacctggacatccccaagatgctggatgccgaagacatcgttggaactgcccgaccggatgagaaagccatcatgacttacgtgtctagcttctaccacgccttctctggagcccagaaggcggagacagcagccaatcgcatctgcaaggtgttggccgtcaaccaggagaacgagcagcttatggaagactacgagaagctggccagtgatctgttggagtggatccgccgcacaatcccgtggctggagaaccgggtgcccgagaa

SEQ ID NO: 103978 - DNA, 605 bp, Homo sapiens
  Payload ID: 440
  Gene Symbol: ACTN1
  Gene Name: actinin, alpha 1
  ENST ID: ENST00000553370
  CDS Start-End: 172-605
aaaggcatcctgtattagctcactcaggaatcctaggccctgaaacggagcccttttactcacttcatcagacaggcagagacattcacggcatggtgtaactcccacctccggaaggcggggacacagatcgagaacatcgaagaggacttccgggatggcctgaagctcatgctgctgctggaggtcatctcaggtgaacgcttggccaagccagagcgaggcaagatgagagtgcacaagatctccaacgtcaacaaggccctggatttcatagccagcaaaggcgtcaaactggtgtccatcggagccgaagaaatcgtggatgggaatgtgaagatgaccctgggcatgatctggaccatcatcctgcgctttgccatccaggacatctccgtggaagagacttcagccaaggaagggctgctcctgtggtgtcagagaaagacagccccttacaaaaatgtcaacatccagaacttccacataagctggaaggatggcctcggcttctgtgctttgatccaccgacaccggcccgagctgattgactacgggaagctgcggaaggatgatccactcacaaatctgaatacggcttttga

SEQ ID NO: 103979 - DNA, 434 bp, Homo sapiens
  Payload ID: 440
  Gene Symbol: ACTN1
  Gene Name: actinin, alpha 1
  ENST ID: ENST00000553659
  CDS Start-End: 219-434
gtaaccccgacatgggcttgcgctacgtcctgcccctccgacccccgggaaaggtgggcagctcggttcgagttgaggggctgcagaacgagggtcagtcttaggggatatttggggccagtcactggggatccctacttagccacggagctgcatcccaggcaggcgcggtgtgccgggtgcgcgccccgccacgggagctgggctcggagctggcgatgggacccgggcacagtggccagtggcaggaagaggtcagaaaccactcgtggtggtggggggagggcgcctcaaccctaccgctgcttcctgcctgcgcgacattcacggcatggtgtaactcccacctccggaaggcggggacacagatcgagaacatcgaagaggacttccgggatggcctgaagctcatgctgctgctggaggtcatctca

SEQ ID NO: 103980 - DNA, 828 bp, Homo sapiens
  Payload ID: 440
  Gene Symbol: ACTN1
  Gene Name: actinin, alpha 1
  ENST ID: ENST00000555075
  CDS Start-End: 1-755
accaagctctgacggaggagcatgcccgacagcagcacaatgagaggctacgcaagcagtttggagcccaggccaatgtcatcgggccctggatccagaccaagatggaggagatcgggaggatctccattgagatgcatgggaccctggaggaccagctcagccacctgcggcagtatgagaagagcatcgtcaactacaagccaaagattgatcagctggagggcgaccaccagctcatccaggaggcgctcatcttcgacaacaagcacaccaactacaccatggagcacatccgtgtgggctgggagcagctgctcaccaccatcgccaggaccatcaatgaggtagagaaccagatcctgacccgggatgccaagggcatcagccaggagcagatgaatgagttccgggcctccttcaaccactttgaccggggagaagcagaatttgcccgcatcatgagcattgtggaccccaaccgcctgggggtagtgacattccaggccttcattgacttcatgtcccgcgagacagccgacacagatacagcagaccaagtcatggcttccttcaagatcctggctggggacaagaactacattaccatggacgagctgcgccgcgagctgccacccgaccaggctgagtactgcatcgcgcggatggccccctacaccggccccgactccgtgccaggtgctctggactacatgtccttctccacggcgctgtacggcgagagtgacctctaatccaccccgcccggccgccctcgtcttgtgcgccgtgccctgccttgcacctccgccgtcgcccatctcctgc

SEQ ID NO: 103981 - DNA, 568 bp, Homo sapiens
  Payload ID: 440
  Gene Symbol: ACTN1
  Gene Name: actinin, alpha 1
  ENST ID: ENST00000556571
  CDS Start-End: 190-568
ctgcccctccgacccccgggaaaggtgggcagctcggttcgagttgaggggctgcagaacgagggtcagtcttaggggatatttggggccagtcactggggatccctacttagccacggagctgcatcccaggcaggcgcggtgtgccgggtgcgcgccccgccacgggagctgggctcggagctggcgatgggacccgggcacagtggccagtggcaggaagagacattcacggcatggtgtaactcccacctccggaaggcggggacacagatcgagaacatcgaagaggacttccgggatggcctgaagctcatgctgctgctggaggtcatctcaggtgaacgcttggccaagccagagcgaggcaagatgagagtgcacaagatctccaacgtcaacaaggccctggatttcatagccagcaaaggcgtcaaactggtgtccatcggagccgaagaaatcgtggatgggaatgtgaagatgaccctgggcatgatctggaccatcatcctgcgctttgccatccaggacatctccgtggaagagacttcagccaaggaagggc

SEQ ID NO: 103982 - DNA, 4863 bp, Homo sapiens
  Payload ID: 441
  Gene Symbol: ACTN2
  Gene Name: actinin, alpha 2
  Uniprot ID: P35609
  ENST ID: ENST00000366578
  CDS Start-End: 167-2851
gcttcgcccgagacccagcgcccaggcgtgtcgccccgagaggagccgcgcgaaggtcaccccgcgcccgccgcccgccgcccgccgcctccgtgggtccgtttgccagtcagcccgtgcgtccgagcccctcgcgccccgccgcagccccggccaaccgagcgccatgaaccagatagagcccggcgtgcagtacaactacgtgtacgacgaggatgagtacatgatccaggaggaggagtgggaccgcgacctgctcctggacccagcctgggagaagcagcagaggaagaccttcactgcctggtgtaactcccacctaaggaaagccggcacccagattgagaacatcgaggaagacttcaggaatggccttaagctcatgctgcttttggaagtcatctcaggggaaaggctgcccaaacctgaccggggaaaaatgcggttccacaaaattgctaatgtcaacaaagctttggattacatagccagcaaaggggtgaaactggtgtccattggcgctgaagaaattgttgatggcaacgtgaaaatgaccctgggtatgatctggaccatcatccttcgctttgctattcaggatatttcggttgaagaaacatctgccaaagaaggtctgctgctttggtgtcagaggaaaactgctccttatagaaatgtgaacattcagaacttccatactagctggaaagatggccttggactctgtgccctcatccaccgacaccggcctgacctcattgactactcaaagcttaacaaggatgaccccataggaaatattaacctggccatggaaatcgctgagaagcacctggatattcctaaaatgttggatgctgaagacatcgtgaacacccctaaacccgatgaaagagccatcatgacgtacgtctcttgcttctaccacgcttttgcgggcgcggagcaggccgagacagcggctaacaggatatgtaaggttcttgctgtgaatcaagagaatgagaggctgatggaagaatatgagaggctagcgagtgagcttttggaatggattcgtcgcacgatcccctggctggagaaccggactcccgagaagaccatgcaagccatgcagaagaagctggaggacttccgggattaccgccggaagcacaagccacccaaggtgcaggagaaatgccagctggagatcaacttcaacacgctgcagaccaagctgcggatcagcaaccgtcctgccttcatgccctccgagggcaagatggtgtcggatattgctggtgcctggcagaggctggagcaggctgagaagggttacgaggagtggttgctcaatgagattcggagactggagcgcttggaacacctggctgagaagttcaggcagaaggcctcaacgcacgagacttgggcttatggcaaagagcagatcttgctgcagaaggattacgagtcggcgtcgctgacagaggtgcgggctctgctgcggaagcacgaggcgttcgagagcgacctggcagcgcaccaggaccgcgtggagcagatcgcagccatcgcgcaggagctcaatgaactggactatcacgacgctgtgaatgtcaatgatcggtgccagaaaatttgtgaccagtgggaccgactgggaacgcttactcagaagaggagagaagccctagagagaatggagaaattgctagaaaccattgatcagcttcacctggagtttgccaagagggctgctcctttcaacaattggatggagggcgctatggaggatctgcaagatatgttcattgtccacagcattgaggagatccagagtctgatcactgcgcatgagcagttcaaggccacgctgcccgaggcggacggagagcggcagtccatcatggccatccagaacgaggtggagaaggtgattcagagctacaacatcagaatcagctcaagcaacccgtacagcactgtcaccatggatgagctccggaccaagtgggacaaggtgaagcaactcgtgcccatccgcgatcaatccctgcaggaggagctggctcgccagcatgctaacgagcgtctgaggcgccagtttgctgcccaagccaatgccattgggccctggatccagaacaagatggaggagattgcccggagctccatccagatcacaggagccctggaagaccagatgaaccagctgaagcagtatgagcacaacatcatcaactataagaacaacatcgacaagctggagggagaccatcagctcatccaggaggcccttgtctttgacaacaagcacacgaactacacgatggagcacattcgtgttggatgggagctgctgctgacaaccatcgccagaaccatcaatgaggtggagactcagatcctgacgagagatgcgaagggcatcacccaggagcagatgaatgagttcagagcctccttcaaccactttgacaggaggaagaatggcctgatggatcatgaggatttcagagcctgcctgatttccatgggttatgacctgggtgaagccgaatttgcccgcattatgaccctggtagatcccaacgggcaaggcaccgtcaccttccaatccttcatcgacttcatgactagagagacggctgacaccgacactgccgagcaggtcatcgcctccttccggatcctggcttctgataagccatacatcctggcggaggagctgcgtcgggagctgcccccggatcaggcccagtactgcatcaagaggatgcccgcctactcgggcccaggcagtgtgcctggtgcactggattacgctgcgttctcttccgcactctacggggagagcgatctgtgatgctgagcttctgtaatcactcatcccatcagaatgcaataaaagcggaagtcacagtttgtttcctggaaactttgacaagctttattaagttgagagagagagaggggaaaaaaaaaagcctttcgtagttcagtaattgccagcaatataacacggctaaaatgaagtttttacagtatatgacatagtgcgcttcataaataggtttatttctgagtttttagcaaaatgtaatgaaatatcaggttgatttctttgattaaacagaacaaattacttgagtaataggaaattaggaggatctagggacagaaggaaagtgaaaaatgtgaaaatacaaaatacccaagatttaagaccggggggaaaaaaccacaaattggtaaataaaggtttgctatttgtaaaaaatttcatttatctctaatatgcttatgtgattgcccctaggggagtatatttgggattctaatgttttattttcatgcttatccaaagattactattgtatcttcaaatgaatttaatattgtgagatggaactgccggggattaaaaagactacccaaaagatttttggcacttacaatttttaaaatagtttatgtcatctcttcattatttagggctggatggtcaactcagtcagtgattttttgatgcttctcttatcctccagaatagagacctaaggacacgtggaagtcagtttaattgccagagagaaggatgcaatcactaggtaaaatgaggtttttaggattatttattgattccaggttcccatgctttttgttagagcttattagtacaggttctcaagagatgaccacataaaagtgctctgtttataaataagcaggtttctgtagtactgactggttcatcacaaggcaagtcagaaaccagtatccttctagctctccagtcaggacttccttatgcctctagttttatgaccggttaaggagaagccagagttagagtaggagaggactaattctcagcagcagtggaggtgagttctttcttttgcggaagctttacatatgttttgtgtagtaggaataactagatattttagctagtgtgcggtgtgtgttcacccctgggattggacagtgtatcctaacaagtcccatgtctggttctgtgtctaaaggcctgctccatgacacaggatgctacatgcactcctgctagcacatcttgatctgttgaatgttcattctttctttttgctcatactgctgtaggctataattcccccctgtttttccatcttgttgacagcttgtagagaataaagcaggaattctttttatatctgagtccttaatgatcaggaaatggattacaaacaaacaaaaacagttgcaaacagcaattaaagcattactagagaagcagtaacatgtctgttacctacagtctgtttgctcagatttttatagatttccaccaacagctggaaatgtaatatttccattccaagctgtctgacagcttgactcttcttcctacactgggccatttagaaccttcaacctttatgaatttcacttaatttgcttcattattaagtaattggtagtttccagattcctgaaatatttgaatccttgagtttaatgccaaacacttttggggtggtttagatgaactctgactctattttatttcaagtaggtgctatatcccggccataaacccctatagaaaagccagaaagttgtgcttcctttgaggctattagggggctctgtggtgttttaggatgggtgtgggtaactcatctacctaaacttttaatttctttacaacattcagcaagagagggggtcagtagtctctatctgctaataaatgaagaaaggaagtaaactctgaaaaataataaacatgtttatactctcattttaggtattatttttatttctgaagctggatgctcaaaaattaaaacgtttataagtttctaaattaaacttaatttataaaagaaaaaa

SEQ ID NO: 103983 - DNA, 5103 bp, Homo sapiens
  Payload ID: 441
  Gene Symbol: ACTN2
  Gene Name: actinin, alpha 2
  ENST ID: ENST00000546208
  CDS Start-End: 1042-3102
gacgggcggcgcggctattaagccgcgcggcagctgctcgcagccggagctggtgcttcgcccgagacccagcgcccaggcgtgtcgccccgagaggagccgcgcgaaggtcaccccgcgcccgccgcccgccgcccgccgcctccgtgggtccgtttgccagtcagcccgtgcgtccgagcccctcgcgccccgccgcagccccggccaaccgagcgccatgaaccagatagagcccggcgtgcagtacaactacgtgtacgacgaggatgagtacatgatccaggaggaggagtgggaccgcgacctgctcctggacccagcctgggagaagcagcagaggaagaccttcactgcctggtgtaactcccacctaaggaaagccggcacccagattgagaacatcgaggaagacttcaggaatggccttaagctcatgctgcttttggaagtcatctcaggggaaaggctgcccaaacctgaccggggaaaaatgcggttccacaaaattgctaatgtcaacaaagctttggattacatagccagcaaaggggtgaaactggtgtccattggcgctgaagaaattgttgatggcaacgtgaaaatgaccctgggtatgatctggaccatcatccttcgctttgctattcaggatatttcggttgaagaaacatctgccaaagaaggtctgctgctttggtgtcagaggaaaactgctccttatagaaatgtgaacattcagaacttccatactagctggaaagatggccttggactctgtgccctcatccaccgacaccggcctgacctcattgactactcaaagcttaacaaggatgaccccataggaaatattaacctggccatggaaatcgctgagaagcacctggatattcctaaaatgttggatgctgaagatttagtatacactgccagacccgatgaaagagccataatgacttatgtttcctgttactatcatgcttttgctggtgcacagaagacatcgtgaacacccctaaacccgatgaaagagccatcatgacgtacgtctcttgcttctaccacgcttttgcgggcgcggagcaggttagacaaagtcttaaagcacactcagctctgtggaaggatccccctccagaaagttctacatgttcatatcaggagatgaggaggtcttcagtgaattcaagtgcaatggccgagacagcggctaacaggatatgtaaggttcttgctgtgaatcaagagaatgagaggctgatggaagaatatgagaggctagcgagtgagcttttggaatggattcgtcgcacgatcccctggctggagaaccggactcccgagaagaccatgcaagccatgcagaagaagctggaggacttccgggattaccgccggaagcacaagccacccaaggtgcaggagaaatgccagctggagatcaacttcaacacgctgcagaccaagctgcggatcagcaaccgtcctgccttcatgccctccgagggcaagatggtgtcggatattgctggtgcctggcagaggctggagcaggctgagaagggttacgaggagtggttgctcaatgagattcggagactggagcgcttggaacacctggctgagaagttcaggcagaaggcctcaacgcacgagacttgggcttatggcaaagagcagatcttgctgcagaaggattacgagtcggcgtcgctgacagaggtgcgggctctgctgcggaagcacgaggcgttcgagagcgacctggcagcgcaccaggaccgcgtggagcagatcgcagccatcgcgcaggagctcaatgaactggactatcacgacgctgtgaatgtcaatgatcggtgccagaaaatttgtgaccagtgggaccgactgggaacgcttactcagaagaggagagaagccctagagagaatggagaaattgctagaaaccattgatcagcttcacctggagtttgccaagagggctgctcctttcaacaattggatggagggcgctatggaggatctgcaagatatgttcattgtccacagcattgaggagatccagagtctgatcactgcgcatgagcagttcaaggccacgctgcccgaggcggacggagagcggcagtccatcatggccatccagaacgaggtggagaaggtgattcagagctacaacatcagaatcagctcaagcaacccgtacagcactgtcaccatggatgagctccggaccaagtgggacaaggtgaagcaactcgtgcccatccgcgatcaatccctgcaggaggagctggctcgccagcatgctaacgagcgtctgaggcgccagtttgctgcccaagccaatgccattgggccctggatccagaacaagatggaggagattgcccggagctccatccagatcacaggagccctggaagaccagatgaaccagctgaagcagtatgagcacaacatcatcaactataagaacaacatcgacaagctggagggagaccatcagctcatccaggaggcccttgtctttgacaacaagcacacgaactacacgatggagcacattcgtgttggatgggagctgctgctgacaaccatcgccagaaccatcaatgaggtggagactcagatcctgacgagagatgcgaagggcatcacccaggagcagatgaatgagttcagagcctccttcaaccactttgacaggaggaagaatggcctgatggatcatgaggatttcagagcctgcctgatttccatgggttatgacctgggtgaagccgaatttgcccgcattatgaccctggtagatcccaacgggcaaggcaccgtcaccttccaatccttcatcgacttcatgactagagagacggctgacaccgacactgccgagcaggtcatcgcctccttccggatcctggcttctgataagccatacatcctggcggaggagctgcgtcgggagctgcccccggatcaggcccagtactgcatcaagaggatgcccgcctactcgggcccaggcagtgtgcctggtgcactggattacgctgcgttctcttccgcactctacggggagagcgatctgtgatgctgagcttctgtaatcactcatcccatcagaatgcaataaaagcggaagtcacagtttgtttcctggaaactttgacaagctttattaagttgagagagagagaggggaaaaaaaaaagcctttcgtagttcagtaattgccagcaatataacacggctaaaatgaagtttttacagtatatgacatagtgcgcttcataaataggtttatttctgagtttttagcaaaatgtaatgaaatatcaggttgatttctttgattaaacagaacaaattacttgagtaataggaaattaggaggatctagggacagaaggaaagtgaaaaatgtgaaaatacaaaatacccaagatttaagaccggggggaaaaaaccacaaattggtaaataaaggtttgctatttgtaaaaaatttcatttatctctaatatgcttatgtgattgcccctaggggagtatatttgggattctaatgttttattttcatgcttatccaaagattactattgtatcttcaaatgaatttaatattgtgagatggaactgccggggattaaaaagactacccaaaagatttttggcacttacaatttttaaaatagtttatgtcatctcttcattatttagggctggatggtcaactcagtcagtgattttttgatgcttctcttatcctccagaatagagacctaaggacacgtggaagtcagtttaattgccagagagaaggatgcaatcactaggtaaaatgaggtttttaggattatttattgattccaggttcccatgctttttgttagagcttattagtacaggttctcaagagatgaccacataaaagtgctctgtttataaataagcaggtttctgtagtactgactggttcatcacaaggcaagtcagaaaccagtatccttctagctctccagtcaggacttccttatgcctctagttttatgaccggttaaggagaagccagagttagagtaggagaggactaattctcagcagcagtggaggtgagttctttcttttgcggaagctttacatatgttttgtgtagtaggaataactagatattttagctagtgtgcggtgtgtgttcacccctgggattggacagtgtatcctaacaagtcccatgtctggttctgtgtctaaaggcctgctccatgacacaggatgctacatgcactcctgctagcacatcttgatctgttgaatgttcattctttctttttgctcatactgctgtaggctataattcccccctgtttttccatcttgttgacagcttgtagagaataaagcaggaattctttttatatctgagtccttaatgatcaggaaatggattacaaacaaacaaaaacagttgcaaacagcaattaaagcattactagagaagcagtaacatgtctgttacctacagtctgtttgctcagatttttatagatttccaccaacagctggaaatgtaatatttccattccaagctgtctgacagcttgactcttcttcctacactgggccatttagaaccttcaacctttatgaatttcacttaatttgcttcattattaagtaattggtagtttccagattcctgaaatatttgaatccttgagtttaatgccaaacacttttggggtggtttagatgaactctgactctattttatttcaagtaggtgctatatcccggccataaacccctatagaaaagccagaaagttgtgcttcctttgaggctattagggggctctgtggtgttttaggatgggtgtgggtaactcatctacctaaacttttaatttctttacaacattcagcaagagagggggtcagtagtctctatctgctaataaatgaagaaaggaagtaaactctgaaaaataataaacatgtttatactctcattttaggtattatttttatttctgaagctggatgctcaaaaattaaaacgtttataagtttctaaattaaacttaatttat

SEQ ID NO: 103984 - DNA, 4906 bp, Homo sapiens
  Payload ID: 441
  Gene Symbol: ACTN2
  Gene Name: actinin, alpha 2
  Uniprot ID: P35609
  ENST ID: ENST00000542672
  CDS Start-End: 221-2905
gacgggcggcgcggctattaagccgcgcggcagctgctcgcagccggagctggtgcttcgcccgagacccagcgcccaggcgtgtcgccccgagaggagccgcgcgaaggtcaccccgcgcccgccgcccgccgcccgccgcctccgtgggtccgtttgccagtcagcccgtgcgtccgagcccctcgcgccccgccgcagccccggccaaccgagcgccatgaaccagatagagcccggcgtgcagtacaactacgtgtacgacgaggatgagtacatgatccaggaggaggagtgggaccgcgacctgctcctggacccagcctgggagaagcagcagaggaagaccttcactgcctggtgtaactcccacctaaggaaagccggcacccagattgagaacatcgaggaagacttcaggaatggccttaagctcatgctgcttttggaagtcatctcaggggaaaggctgcccaaacctgaccggggaaaaatgcggttccacaaaattgctaatgtcaacaaagctttggattacatagccagcaaaggggtgaaactggtgtccattggcgctgaagaaattgttgatggcaacgtgaaaatgaccctgggtatgatctggaccatcatccttcgctttgctattcaggatatttcggttgaagaaacatctgccaaagaaggtctgctgctttggtgtcagaggaaaactgctccttatagaaatgtgaacattcagaacttccatactagctggaaagatggccttggactctgtgccctcatccaccgacaccggcctgacctcattgactactcaaagcttaacaaggatgaccccataggaaatattaacctggccatggaaatcgctgagaagcacctggatattcctaaaatgttggatgctgaagatttagtatacactgccagacccgatgaaagagccataatgacttatgtttcctgttactatcatgcttttgctggtgcacagaaggccgagacagcggctaacaggatatgtaaggttcttgctgtgaatcaagagaatgagaggctgatggaagaatatgagaggctagcgagtgagcttttggaatggattcgtcgcacgatcccctggctggagaaccggactcccgagaagaccatgcaagccatgcagaagaagctggaggacttccgggattaccgccggaagcacaagccacccaaggtgcaggagaaatgccagctggagatcaacttcaacacgctgcagaccaagctgcggatcagcaaccgtcctgccttcatgccctccgagggcaagatggtgtcggatattgctggtgcctggcagaggctggagcaggctgagaagggttacgaggagtggttgctcaatgagattcggagactggagcgcttggaacacctggctgagaagttcaggcagaaggcctcaacgcacgagacttgggcttatggcaaagagcagatcttgctgcagaaggattacgagtcggcgtcgctgacagaggtgcgggctctgctgcggaagcacgaggcgttcgagagcgacctggcagcgcaccaggaccgcgtggagcagatcgcagccatcgcgcaggagctcaatgaactggactatcacgacgctgtgaatgtcaatgatcggtgccagaaaatttgtgaccagtgggaccgactgggaacgcttactcagaagaggagagaagccctagagagaatggagaaattgctagaaaccattgatcagcttcacctggagtttgccaagagggctgctcctttcaacaattggatggagggcgctatggaggatctgcaagatatgttcattgtccacagcattgaggagatccagagtctgatcactgcgcatgagcagttcaaggccacgctgcccgaggcggacggagagcggcagtccatcatggccatccagaacgaggtggagaaggtgattcagagctacaacatcagaatcagctcaagcaacccgtacagcactgtcaccatggatgagctccggaccaagtgggacaaggtgaagcaactcgtgcccatccgcgatcaatccctgcaggaggagctggctcgccagcatgctaacgagcgtctgaggcgccagtttgctgcccaagccaatgccattgggccctggatccagaacaagatggaggagattgcccggagctccatccagatcacaggagccctggaagaccagatgaaccagctgaagcagtatgagcacaacatcatcaactataagaacaacatcgacaagctggagggagaccatcagctcatccaggaggcccttgtctttgacaacaagcacacgaactacacgatggagcacattcgtgttggatgggagctgctgctgacaaccatcgccagaaccatcaatgaggtggagactcagatcctgacgagagatgcgaagggcatcacccaggagcagatgaatgagttcagagcctccttcaaccactttgacaggaggaagaatggcctgatggatcatgaggatttcagagcctgcctgatttccatgggttatgacctgggtgaagccgaatttgcccgcattatgaccctggtagatcccaacgggcaaggcaccgtcaccttccaatccttcatcgacttcatgactagagagacggctgacaccgacactgccgagcaggtcatcgcctccttccggatcctggcttctgataagccatacatcctggcggaggagctgcgtcgggagctgcccccggatcaggcccagtactgcatcaagaggatgcccgcctactcgggcccaggcagtgtgcctggtgcactggattacgctgcgttctcttccgcactctacggggagagcgatctgtgatgctgagcttctgtaatcactcatcccatcagaatgcaataaaagcggaagtcacagtttgtttcctggaaactttgacaagctttattaagttgagagagagagaggggaaaaaaaaaagcctttcgtagttcagtaattgccagcaatataacacggctaaaatgaagtttttacagtatatgacatagtgcgcttcataaataggtttatttctgagtttttagcaaaatgtaatgaaatatcaggttgatttctttgattaaacagaacaaattacttgagtaataggaaattaggaggatctagggacagaaggaaagtgaaaaatgtgaaaatacaaaatacccaagatttaagaccggggggaaaaaaccacaaattggtaaataaaggtttgctatttgtaaaaaatttcatttatctctaatatgcttatgtgattgcccctaggggagtatatttgggattctaatgttttattttcatgcttatccaaagattactattgtatcttcaaatgaatttaatattgtgagatggaactgccggggattaaaaagactacccaaaagatttttggcacttacaatttttaaaatagtttatgtcatctcttcattatttagggctggatggtcaactcagtcagtgattttttgatgcttctcttatcctccagaatagagacctaaggacacgtggaagtcagtttaattgccagagagaaggatgcaatcactaggtaaaatgaggtttttaggattatttattgattccaggttcccatgctttttgttagagcttattagtacaggttctcaagagatgaccacataaaagtgctctgtttataaataagcaggtttctgtagtactgactggttcatcacaaggcaagtcagaaaccagtatccttctagctctccagtcaggacttccttatgcctctagttttatgaccggttaaggagaagccagagttagagtaggagaggactaattctcagcagcagtggaggtgagttctttcttttgcggaagctttacatatgttttgtgtagtaggaataactagatattttagctagtgtgcggtgtgtgttcacccctgggattggacagtgtatcctaacaagtcccatgtctggttctgtgtctaaaggcctgctccatgacacaggatgctacatgcactcctgctagcacatcttgatctgttgaatgttcattctttctttttgctcatactgctgtaggctataattcccccctgtttttccatcttgttgacagcttgtagagaataaagcaggaattctttttatatctgagtccttaatgatcaggaaatggattacaaacaaacaaaaacagttgcaaacagcaattaaagcattactagagaagcagtaacatgtctgttacctacagtctgtttgctcagatttttatagatttccaccaacagctggaaatgtaatatttccattccaagctgtctgacagcttgactcttcttcctacactgggccatttagaaccttcaacctttatgaatttcacttaatttgcttcattattaagtaattggtagtttccagattcctgaaatatttgaatccttgagtttaatgccaaacacttttggggtggtttagatgaactctgactctattttatttcaagtaggtgctatatcccggccataaacccctatagaaaagccagaaagttgtgcttcctttgaggctattagggggctctgtggtgttttaggatgggtgtgggtaactcatctacctaaacttttaatttctttacaacattcagcaagagagggggtcagtagtctctatctgctaataaatgaagaaaggaagtaaactctgaaaaataataaacatgtttatactctcattttaggtattatttttatttctgaagctggatgctcaaaaattaaaacgtttataagtttctaaattaaacttaatttat

SEQ ID NO: 103985 - DNA, 3084 bp, Homo sapiens
  Payload ID: 442
  Gene Symbol: ACTN3
  Gene Name: actinin, alpha 3 (gene/pseudogene)
  ENST ID: ENST00000502692
  CDS Start-End: 117-2951
aatagccctgccgcagcccatccagctggctcagagccgttccccatgcccgggtgtctccatcaccccagaaaacatgcaaaacagctcggcgcctctgtgttcctgactgtgaaatggggatagggctctgtgtcccaccagcgaggtgctggaagaggctcacgaggagctccagagggcagcctctagagcggcccgcggccactattattatcggcctttctattgtggagaggagtaaacagactcagagaggtcccgtggatttctcaaggtcacacagcgccccagcagcggagcaggaatgcaaacccaggatctccgccgcgagatccaccccggcgcccccgagtcccgcagttcccggcttcaggacaaccccttgccagaccttcactgcctggtgcaactcacacctgcgcaaggcaggcacccagatcgagaacatcgaggaagatttccgcaatggcctcaaactcatgctgctcctggaggtcatttcaggtgagaggctgcctaggccagataaaggcaagatgcgcttccacaaaatcgccaacgttaacaaggccctggacttcattgccagcaagggggttaaactggtgtccattggtgctgaagagattgttgacgggaacctgaagatgaccctgggcatgatctggaccatcatccttcgcttcgccatccaggacatctctgtggaagaaacctcagccaaggaaggcttgcttctgtggtgccagaggaagacagcaccgtaccgcaacgtcaacgtgcagaacttccacaccagctggaaggatggcctggccctctgtgccctcatccaccgacaccgccctgacctcatcgactacgccaaactgcgaaaggatgaccccatcggaaacctgaacactgcctttgaggtggcagagaaatacctggacatccccaagatgttggatgcagaagacattgtgaacaccccaaagccggatgagaaggccatcatgacctatgtgtcctgcttctaccatgcctttgccggggctgagcaggcagagacagctgccaacaggatctgcaaggtgctggcagtgaaccaggaaaacgagaagctgatggaggagtatgagaagcttgccagtgagctgctggagtggatccgccgcactgtcccatggctggagaaccgtgtgggtgagcccagcatgagtgccatgcagcgcaaactagaggactttcgggactaccggcgtctgcacaagccgccccgcattcaggaaaagtgccagctggagatcaacttcaacacactgcagaccaagttgcggctcagccaccggcctgccttcatgccctccgagggcaagctggtctcggacatcgccaacgcctggcgggggctggagcaggtggaaaagggctatgaggactggctgctctcggagatccggcgcctgcagcgactccagcacctggctgagaagttccggcagaaggcctccctgcacgaagcctggacccggggaaaggaggagatgctgagccagcgcgactacgattcggctttgctacaggaggtgcgggcgttgctgcggcgccacgaggcctttgagagcgacctggcggcgcaccaggaccgcgtggagcacattgccgcgctggcccaggagctcaatgagctggactaccacgaggcagcctcagtgaatagccgctgccaggccatctgcgatcagtgggacaacctgggcaccctgacccagaagaggcgggatgcgctagagcggatggagaagctcctggagaccattgaccggctgcaactggagtttgcccggcgggccgcgcccttcaacaactggctggatggtgccgtggaggacctgcaggacgtgtggctggtacactctgtggaggagacccagagcctgctgacagcgcacgatcagttcaaggcaacactgcccgaggctgaccgagagcgaggtgccatcatgggcatccagggtgagatccagaagatctgccagacgtatgggctgcggccctgctccaccaatccctacatcaccctcagcccgcaggacatcaacaccaagtgggatatggtccgaaagctggtgcccagctgtgaccagacactgcaggaggagctggcacggcagcaggtaaacgagaggctccggcgacagtttgcggcccaggccaatgccattggaccctggatccaggcgaaggtggaggaagtggggcggctggcagcagggctagctggctctctggaggagcagatggctgggctacggcagcaggagcagaacattatcaactacaagactaacattgaccggctggagggtgaccaccagctgctgcaggagagcctggtgttcgacaataagcacaccgtctacagcatggagcacatccgcgtgggctgggagcagctgctcacctccattgcccgcaccatcaatgaagtggagaaccaggtactgacccgagacgccaagggactgagccaggagcagctcaacgagttccgagcatccttcaaccactttgacaggaagcagaatgggatgatggagcctgatgacttccgagcttgcctcatctccatgggctatgacctgggggaagtggagtttgctcgcatcatgaccatggtggaccccaacgcagctggggtggtgaccttccaggccttcatagacttcatgacccgagagacagccgagactgacacgactgagcaagttgtagcttccttcaagatcttggcaggagacaagaactacatcacccccgaggagctgcggcgcgagctccctgccaagcaggccgagtactgcatccgccgtatggtgccctacaagggatccggggccccggctggagccctggactacgtggccttctccagtgccctctatggggagagcgacctttgaccccaaccactgaggttctctatgcaagatggagagaggatgcaccctgtggctgatcccatccgtccctcggagcaagggcctaagagaaaagccagccaagtgcttctgaataaagatccctctctgggtc

SEQ ID NO: 103986 - DNA, 704 bp, Homo sapiens
  Payload ID: 442
  Gene Symbol: ACTN3
  Gene Name: actinin, alpha 3 (gene/pseudogene)
  ENST ID: ENST00000511191
  CDS Start-End: 24-242
gcgaagccaggagcccgatcgagatgatgatggttatgcagcccgagggtctgggggccggggaggggcgctttgcgggcggcggcgggggcggcgagtacatggaacaggaggaggactgggaccgcgacctgctgctggacccggcctgggagaagcagcagcggaaagaaaacgaaagctcagagagggaaagggactggcccaggatgcacagcaagtcagtggctgagctgagctgagacttgaatccagaaatacaaggctctgagacctaccctgactgaggagacaggactgtgccctacatcccccagagccagtcgtagggtttgagtgctgtcctctgcccctagaccttcactgcctggtgcaactcacacctgcgcaaggcaggcacccagatcgagaacatcgaggaagatttccgcaatggcctcaaactcatgctgctcctggaggtcatttcaggtgagaggctgcctaggccagataaaggcaagatgcgcttccacaaaatcgccaacgttaacaaggccctggacttcattgccagcaagggggttaaactggtgtccattggtgctgaagagattgttgacgggaacctgaagatgaccctgggcatgatctggaccatcatccttcgcttcgccatccaggacatctctgtggaagaaacctcagccaaggaaggcttgctt

SEQ ID NO: 103987 - DNA, 2939 bp, Homo sapiens
  Payload ID: 442
  Gene Symbol: ACTN3
  Gene Name: actinin, alpha 3 (gene/pseudogene)
  Uniprot ID: Q08043
  ENST ID: ENST00000513398
  CDS Start-End: 98-2803
agtgcgaattcgatctggggctgggctgggccctacttaatggggcccgggtgtccgagagcgtgccgagcggagcgaagccaggagcccgatcgagatgatgatggttatgcagcccgagggtctgggggccggggaggggcgctttgcgggcggcggcgggggcggcgagtacatggaacaggaggaggactgggaccgcgacctgctgctggacccggcctgggagaagcagcagcggaaaaccttcactgcctggtgcaactcacacctgcgcaaggcaggcacccagatcgagaacatcgaggaagatttccgcaatggcctcaaactcatgctgctcctggaggtcatttcaggtgagaggctgcctaggccagataaaggcaagatgcgcttccacaaaatcgccaacgttaacaaggccctggacttcattgccagcaagggggttaaactggtgtccattggtgctgaagagattgttgacgggaacctgaagatgaccctgggcatgatctggaccatcatccttcgcttcgccatccaggacatctctgtggaagaaacctcagccaaggaaggcttgcttctgtggtgccagaggaagacagcaccgtaccgcaacgtcaacgtgcagaacttccacaccagctggaaggatggcctggccctctgtgccctcatccaccgacaccgccctgacctcatcgactacgccaaactgcgaaaggatgaccccatcggaaacctgaacactgcctttgaggtggcagagaaatacctggacatccccaagatgttggatgcagaagacattgtgaacaccccaaagccggatgagaaggccatcatgacctatgtgtcctgcttctaccatgcctttgccggggctgagcaggcagagacagctgccaacaggatctgcaaggtgctggcagtgaaccaggaaaacgagaagctgatggaggagtatgagaagcttgccagtgagctgctggagtggatccgccgcactgtcccatggctggagaaccgtgtgggtgagcccagcatgagtgccatgcagcgcaaactagaggactttcgggactaccggcgtctgcacaagccgccccgcattcaggaaaagtgccagctggagatcaacttcaacacactgcagaccaagttgcggctcagccaccggcctgccttcatgccctccgagggcaagctggtctcggacatcgccaacgcctggcgggggctggagcaggtggaaaagggctatgaggactggctgctctcggagatccggcgcctgcagcgactccagcacctggctgagaagttccggcagaaggcctccctgcacgaagcctggacccggggaaaggaggagatgctgagccagcgcgactacgattcggctttgctacaggaggtgcgggcgttgctgcggcgccacgaggcctttgagagcgacctggcggcgcaccaggaccgcgtggagcacattgccgcgctggcccaggagctcaatgagctggactaccacgaggcagcctcagtgaatagccgctgccaggccatctgcgatcagtgggacaacctgggcaccctgacccagaagaggcgggatgcgctagagcggatggagaagctcctggagaccattgaccggctgcaactggagtttgcccggcgggccgcgcccttcaacaactggctggatggtgccgtggaggacctgcaggacgtgtggctggtacactctgtggaggagacccagagcctgctgacagcgcacgatcagttcaaggcaacactgcccgaggctgaccgagagcgaggtgccatcatgggcatccagggtgagatccagaagatctgccagacgtatgggctgcggccctgctccaccaatccctacatcaccctcagcccgcaggacatcaacaccaagtgggatatggtccgaaagctggtgcccagctgtgaccagacactgcaggaggagctggcacggcagcaggtaaacgagaggctccggcgacagtttgcggcccaggccaatgccattggaccctggatccaggcgaaggtggaggaagtggggcggctggcagcagggctagctggctctctggaggagcagatggctgggctacggcagcaggagcagaacattatcaactacaagactaacattgaccggctggagggtgaccaccagctgctgcaggagagcctggtgttcgacaataagcacaccgtctacagcatggagcacatccgcgtgggctgggagcagctgctcacctccattgcccgcaccatcaatgaagtggagaaccaggtactgacccgagacgccaagggactgagccaggagcagctcaacgagttccgagcatccttcaaccactttgacaggaagcagaatgggatgatggagcctgatgacttccgagcttgcctcatctccatgggctatgacctgggggaagtggagtttgctcgcatcatgaccatggtggaccccaacgcagctggggtggtgaccttccaggccttcatagacttcatgacccgagagacagccgagactgacacgactgagcaagttgtagcttccttcaagatcttggcaggagacaagaactacatcacccccgaggagctgcggcgcgagctccctgccaagcaggccgagtactgcatccgccgtatggtgccctacaagggatccggggccccggctggagccctggactacgtggccttctccagtgccctctatggggagagcgacctttgaccccaaccactgaggttctctatgcaagatggagagaggatgcaccctgtggctgatcccatccgtccctcggagcaagggcctaagagaaaagccagccaagtgcttctgaataaagatccctctctgggtctct

SEQ ID NO: 103988 - DNA, 4963 bp, Homo sapiens
  Payload ID: 443
  Gene Symbol: ACTN4
  Gene Name: actinin, alpha 4
  Uniprot ID: O43707
  ENST ID: ENST00000252699
  CDS Start-End: 77-2812
gcggcggcggctcgggcagaggggcgggagctgaggcgggagcggacaggctggtgggcgagcgagaggcggcggaatggtggactaccacgcggcgaaccagtcgtaccagtacggccccagcagcgcgggcaatggcgctggcggcgggggcagcatgggcgactacatggcccaggaggacgactgggaccgggacctgctgctggacccggcctgggagaagcagcagcgcaagaccttcacggcatggtgcaactcccacctgcggaaggcaggcacacagatcgagaacattgatgaggacttccgagacgggctcaagctcatgctgctcctggaggtcatatcaggggagcggttacctaagccggagcgggggaagatgagagtgcacaaaatcaacaatgtgaacaaagcgctggactttattgccagcaaaggcgtcaagctggtctccatcggggcagaagagattgtggacggcaacgcaaagatgaccctgggaatgatctggaccatcatccttaggttcgccatccaggacatctccgtggaagagacctcggccaaggaagggctccttctctggtgccagagaaagacagccccgtataagaacgtcaatgtgcagaacttccacatcagctggaaggatggtcttgccttcaatgccctgatccaccggcacagaccagagctgattgagtatgacaagctgaggaaggacgaccctgtcaccaacctgaacaatgccttcgaagtggctgagaaatacctcgacatccccaagatgctggatgcagaggacatcgtgaacacggcccggcccgacgagaaggccataatgacctatgtgtccagcttctaccatgccttttcaggagcgcagaaggctgaaactgccgccaaccggatctgtaaggtgctggctgtcaaccaagagaacgagcacctgatggaggactacgagaagctggccagcgacctcctggagtggatccggcgcaccatcccctggctggaggaccgtgtgccccaaaagactatccaggagatgcagcagaagctggaggacttccgcgactaccggcgtgtgcacaagccgcccaaggtgcaggagaagtgccagctggagatcaacttcaacacgctgcagaccaagctgcgcctcagcaaccggcccgccttcatgccctccgagggcaagatggtctcggacatcaacaatggctggcagcacttggagcaggctgagaagggctacgaggagtggctgctgaatgagatccgcaggctggagcggctcgaccacctggcagagaagttccggcagaaggcctccatccacgaggcctggactgacgggaaggaagccatgctgaagcaccgggactacgagacggccacactatcggacatcaaagccctcattcgcaagcacgaggccttcgagagcgacctggctgcgcaccaggaccgcgtggagcagatcgccgccattgcccaggagctcaacgagctggattactacgactcccacaatgtcaacacccggtgccagaagatctgtgaccagtgggacgccctcggctctctgacacatagtcgcagggaagccctggagaaaacagagaagcagctggaggccatcgaccagctgcacctggaatacgccaagcgcgcggcccccttcaacaactggatggagagcgccatggaggacctccaggacatgttcatcgtccataccatcgaggagattgagggcctgatctcagcccatgaccagttcaagtccaccctgccggacgccgatagggagcgcgaggccatcctggccatccacaaggaggcccagaggatcgctgagagcaaccacatcaagctgtcgggcagcaacccctacaccaccgtcaccccgcaaatcatcaactccaagtgggagaaggtgcagcagctggtgccaaaacgggaccatgccctcctggaggagcagagcaagcagcagtccaacgagcacctgcgccgccagttcgccagccaggccaatgttgtggggccctggatccagaccaagatggaggagatcgggcgcatctccattgagatgaacgggaccctggaggaccagctgagccacctgaagcagtatgaacgcagcatcgtggactacaagcccaacctggacctgctggagcagcagcaccagctcatccaggaggccctcatcttcgacaacaagcacaccaactataccatggagcacatccgcgtgggctgggagcagctgctcaccaccattgcccgcaccatcaacgaggtggagaaccagatcctcacccgcgacgccaagggcatcagccaggagcagatgcaggagttccgggcgtccttcaaccacttcgacaaggatcatggcggggcgctggggcccgaggagttcaaggcctgcctcatcagcctgggctacgacgtggagaacgaccggcagggtgaggccgagttcaaccgcatcatgagcctggtcgaccccaaccatagcggccttgtgaccttccaagccttcatcgacttcatgtcgcgggagaccaccgacacggacacggctgaccaggtcatcgcttccttcaaggtcttagcaggggacaagaacttcatcacagctgaggagctgcggagagagctgccccccgaccaggccgagtactgcatcgcccgcatggcgccataccagggccctgacgccgtgcccggtgccctcgactacaagtccttctccacggccttgtatggcgagagcgacctgtgaggccccagagacctgacccaacacccccgacggcctccaggaggggcctgggcagccccacagtcccattcctccactctgtatctatgcaaagcactctctgcagtcctccggggtgggtgggtgggcagggaggggctggggcaggctctctcctctctctctttgtgggttggccaggaggttcccccgaccaggttggggagacttggggccagcgcttctggtctggtaaatatgtatgatgtgttgtgcttttttaaccaaggaggggccagtggattcccacagcacaaccggtcccttccatgccctgggatgcctcaccacacccaggtctcttcctttgctctgaggtcccttcaaggcctccccaatccaggccaaagccccatgtgccttgtccaggaactgcctgggccatgcgaggggccagcagagggcgccaccaccacctgacggctggggacccacccagcccctctcccctctctgctccagactcacttgccattgccaggagatggccccaacaagcaccccgcttttgcagcagaggagctgagttggcagaccgggcccccctgaaccgcaccccatcccaccagccccggccttgctttgtctggcctcacgtgtctcagattttctaagaaccaaaaaaaaaaaaggaaaaaaaacacaaaacaacaaaaaccaaaaaaaaaaaaaatcacaaaaacaaaaaaactataaaaaagaaagaattaaaaactttcagagaattactatttactttattaacttacggatttattatataaatatatattcacctagcaacatatctctgccgtctctcctgctctcataatgaagacatagccgattctctgcccgggccccttgctgatgctcctccgggtctgcgtcgggcgtgggtctctggggaccctccagaggtggaggtgggctgatggcctggctgcctggtggttgatggttttgctccccctaccttttttttttgagtttattctgattgattttttttcttggtttctggataaaccaccctctggggacaggataataaaacatgtaatatttttaagaaggattcctgcagcatcatctttttttatttctcctgtgtctgtcctccaccttctaggagagccagggcagagctagcactgtcttaagctgtcaacgtggactagctcgtgtcatctgctcgagaagggctgtcgctgttcttgtttctgagtgaggagtacgcaggccagagtggtcacccggccgtgagcagtgagggccagagactagccccagacaggtggatgccagagagagtggcacccatgccaggcaaggcctagggaggtggtcttgctcagcaaccctgccctgagcagcaggtgcgcccatccggagatcctaggagaaggtggccacctccatccactaaggaagagaaggaagacagtggcttgaggcagggagctcgcaggacagagcctgagccaccctgtccctcccacctggctcacctgtctgtgggtcaggcagatgaccccctcacccccatccaggtgctggctgcagtggcctgtgcagagaggggcagggtgagtgcccaccagtccccgtaccccttccccccatgccccaccatgccggggtggtactcacagaagatgcaggtgaggtgggccacacaggacacgaaccgctcgaagtccacacgcagacggctatcccggtagcggctggtgagggtctgggtcagctggttgttcaggtggaagcctagggggaggctgcttctgagcccagtggcccacagggaacccaccttggcattgcatccccaccccacctcctcagggaggacatgaatgccacagggtgtcacaccccaactctgccccatcccggcagggtgagtacaggctgatcccttcaatcctctgggcctgtttcctcatccatcaaacggactaagacagccccgaccccatagggtgtgtgaagacagaacgctcaggacagcgtctgacacgtgactcgatgtgtgggtactgttactccttaaatcctgtggggctttctccttgccagtgggcactggaggatatttctgtgcagcaaaaaatatagtcaatccca

SEQ ID NO: 103989 - DNA, 3180 bp, Homo sapiens
  Payload ID: 443
  Gene Symbol: ACTN4
  Gene Name: actinin, alpha 4
  ENST ID: ENST00000440400
  CDS Start-End: 1-1029
ggcctgatctcagcccatgaccagttcaagtccaccctgccggacgccgatagggagcgcgaggccatcctggccatccacaaggaggcccagaggatcgctgagagcaaccacatcaagctgtcgggcagcaacccctacaccaccgtcaccccgcaaatcatcaactccaagtgggagaaggtgcagcagctggtgccaaaacgggaccatgccctcctggaggagcagagcaagcagcagtccaacgagcacctgcgccgccagttcgccagccaggccaatgttgtggggccctggatccagaccaagatggaggagatcgggcgcatctccattgagatgaacgggaccctggaggaccagctgagccacctgaagcagtatgaacgcagcatcgtggactacaagcccaacctggacctgctggagcagcagcaccagctcatccaggaggccctcatcttcgacaacaagcacaccaactataccatggagcacatccgcgtgggctgggagcagctgctcaccaccattgcccgcaccatcaacgaggtggagaaccagatcctcacccgcgacgccaagggcatcagccaggagcagatgcaggagttccgggcgtccttcaaccacttcgacaagaagcagacaggcagcatggactccgatgacttcagggctctgcttatctccacaggatacagcctgggtgaggccgagttcaaccgcatcatgagcctggtcgaccccaaccatagcggccttgtgaccttccaagccttcatcgacttcatgtcgcgggagaccaccgacacggacacggctgaccaggtcatcgcttccttcaaggtcttagcaggggacaagaacttcatcacagctgaggagctgcggagagagctgccccccgaccaggccgagtactgcatcgcccgcatggcgccataccagggccctgacgccgtgcccggtgccctcgactacaagtccttctccacggccttgtatggcgagagcgacctgtgaggccccagagacctgacccaacacccccgacggcctccaggaggggcctgggcagccccacagtcccattcctccactctgtatctatgcaaagcactctctgcagtcctccggggtgggtgggtgggcagggaggggctggggcaggctctctcctctctctctttgtgggttggccaggaggttcccccgaccaggttggggagacttggggccagcgcttctggtctggtaaatatgtatgatgtgttgtgcttttttaaccaaggaggggccagtggattcccacagcacaaccggtcccttccatgccctgggatgcctcaccacacccaggtctcttcctttgctctgaggtcccttcaaggcctccccaatccaggccaaagccccatgtgccttgtccaggaactgcctgggccatgcgaggggccagcagagggcgccaccaccacctgacggctggggacccacccagcccctctcccctctctgctccagactcacttgccattgccaggagatggccccaacaagcaccccgcttttgcagcagaggagctgagttggcagaccgggcccccctgaaccgcaccccatcccaccagccccggccttgctttgtctggcctcacgtgtctcagattttctaagaaccaaaaaaaaaaaaggaaaaaaaacacaaaacaacaaaaaccaaaaaaaaaaaaaatcacaaaaacaaaaaaactataaaaaagaaagaattaaaaactttcagagaattactatttactttattaacttacggatttattatataaatatatattcacctagcaacatatctctgccgtctctcctgctctcataatgaagacatagccgattctctgcccgggccccttgctgatgctcctccgggtctgcgtcgggcgtgggtctctggggaccctccagaggtggaggtgggctgatggcctggctgcctggtggttgatggttttgctccccctaccttttttttttgagtttattctgattgattttttttcttggtttctggataaaccaccctctggggacaggataataaaacatgtaatatttttaagaaggattcctgcagcatcatctttttttatttctcctgtgtctgtcctccaccttctaggagagccagggcagagctagcactgtcttaagctgtcaacgtggactagctcgtgtcatctgctcgagaagggctgtcgctgttcttgtttctgagtgaggagtacgcaggccagagtggtcacccggccgtgagcagtgagggccagagactagccccagacaggtggatgccagagagagtggcacccatgccaggcaaggcctagggaggtggtcttgctcagcaaccctgccctgagcagcaggtgcgcccatccggagatcctaggagaaggtggccacctccatccactaaggaagagaaggaagacagtggcttgaggcagggagctcgcaggacagagcctgagccaccctgtccctcccacctggctcacctgtctgtgggtcaggcagatgaccccctcacccccatccaggtgctggctgcagtggcctgtgcagagaggggcagggtgagtgcccaccagtccccgtaccccttccccccatgccccaccatgccggggtggtactcacagaagatgcaggtgaggtgggccacacaggacacgaaccgctcgaagtccacacgcagacggctatcccggtagcggctggtgagggtctgggtcagctggttgttcaggtggaagcctagggggaggctgcttctgagcccagtggcccacagggaacccaccttggcattgcatccccaccccacctcctcagggaggacatgaatgccacagggtgtcacaccccaactctgccccatcccggcagggtgagtacaggctgatcccttcaatcctctgggcctgtttcctcatccatcaaacggactaagacagccccgaccccatagggtgtgtgaagacagaacgctcaggacagcgtctgacacgtgactcgatgtgtgggtactgttactccttaaatcctgtggggctttctccttgccagtgggcactggaggatatttctgtgcagcaaaaaatatagtcaatccca

SEQ ID NO: 103990 - DNA, 1566 bp, Homo sapiens
  Payload ID: 443
  Gene Symbol: ACTN4
  Gene Name: actinin, alpha 4
  ENST ID: ENST00000424234
  CDS Start-End: 1-1566
atggtggactaccacgcggcgaaccagtcgtaccagtacggccccagcagcgcgggcaatggcgctggcggcgggggcagcatgggcgactacatggcccaggaggacgactgggaccgggacctgctgctggacccggcctgggagaagcagcagcgcaagaccttcacggcatggtgcaactcccacctgcggaaggcaggcacacagatcgagaacattgatgaggacttccgagacgggctcaagctcatgctgctcctggaggtcatcgagctggattactacgactcccacaatgtcaacacccggtgccagaagatctgtgaccagtgggacgccctcggctctctgacacatagtcgcagggaagccctggagaaaacagagaagcagctggaggccatcgaccagctgcacctggaatacgccaagcgcgcggcccccttcaacaactggatggagagcgccatggaggacctccaggacatgttcatcgtccataccatcgaggagattgagggcctgatctcagcccatgaccagttcaagtccaccctgccggacgccgatagggagcgcgaggccatcctggccatccacaaggaggcccagaggatcgctgagagcaaccacatcaagctgtcgggcagcaacccctacaccaccgtcaccccgcaaatcatcaactccaagtgggagaaggtgcagcagctggtgccaaaacgggaccatgccctcctggaggagcagagcaagcagcagtccaacgagcacctgcgccgccagttcgccagccaggccaatgttgtggggccctggatccagaccaagatggaggagatcgggcgcatctccattgagatgaacgggaccctggaggaccagctgagccacctgaagcagtatgaacgcagcatcgtggactacaagcccaacctggacctgctggagcagcagcaccagctcatccaggaggccctcatcttcgacaacaagcacaccaactataccatggagcacatccgcgtgggctgggagcagctgctcaccaccattgcccgcaccatcaacgaggtggagaaccagatcctcacccgcgacgccaagggcatcagccaggagcagatgcaggagttccgggcgtccttcaaccacttcgacaaggatcatggcggggcgctggggcccgaggagttcaaggcctgcctcatcagcctgggctacgacgtggagaacgaccggcagggtgaggccgagttcaaccgcatcatgagcctggtcgaccccaaccatagcggccttgtgaccttccaagccttcatcgacttcatgtcgcgggagaccaccgacacggacacggctgaccaggtcatcgcttccttcaaggtcttagcaggggacaagaacttcatcacagctgaggagctgcggagagagctgccccccgaccaggccgagtactgcatcgcccgcatggcgccataccagggccctgacgccgtgcccggtgccctcgactacaagtccttctccacggccttgtatggcgagagcgacctgtga

SEQ ID NO: 103991 - DNA, 2102 bp, Homo sapiens
  Payload ID: 443
  Gene Symbol: ACTN4
  Gene Name: actinin, alpha 4
  Uniprot ID: O43707
  ENST ID: ENST00000390009
  CDS Start-End: 9-2087
gcggcggaatggtggactaccacgcggcgaaccagtcgtaccagtacggccccagcagcgcgggcaatggcgctggcggcgggggcagcatgggcgactacatggcccaggaggacgactgggaccgggacctgctgctggacccggcctgggagaagcagcagcgcaaggctgaaactgccgccaaccggatctgtaaggtgctggctgtcaaccaagagaacgagcacctgatggaggactacgagaagctggccagcgacctcctggagtggatccggcgcaccatcccctggctggaggaccgtgtgccccaaaagactatccaggagatgcagcagaagctggaggacttccgcgactaccggcgtgtgcacaagccgcccaaggtgcaggagaagtgccagctggagatcaacttcaacacgctgcagaccaagctgcgcctcagcaaccggcccgccttcatgccctccgagggcaagatggtctcggacatcaacaatggctggcagcacttggagcaggctgagaagggctacgaggagtggctgctgaatgagatccgcaggctggagcggctcgaccacctggcagagaagttccggcagaaggcctccatccacgaggcctggactgacgggaaggaagccatgctgaagcaccgggactacgagacggccacactatcggacatcaaagccctcattcgcaagcacgaggccttcgagagcgacctggctgcgcaccaggaccgcgtggagcagatcgccgccattgcccaggagctcaacgagctggattactacgactcccacaatgtcaacacccggtgccagaagatctgtgaccagtgggacgccctcggctctctgacacatagtcgcagggaagccctggagaaaacagagaagcagctggaggccatcgaccagctgcacctggaatacgccaagcgcgcggcccccttcaacaactggatggagagcgccatggaggacctccaggacatgttcatcgtccataccatcgaggagattgagggcctgatctcagcccatgaccagttcaagtccaccctgccggacgccgatagggagcgcgaggccatcctggccatccacaaggaggcccagaggatcgctgagagcaaccacatcaagctgtcgggcagcaacccctacaccaccgtcaccccgcaaatcatcaactccaagtgggagaaggtgcagcagctggtgccaaaacgggaccatgccctcctggaggagcagagcaagcagcagtccaacgagcacctgcgccgccagttcgccagccaggccaatgttgtggggccctggatccagaccaagatggaggagatcgggcgcatctccattgagatgaacgggaccctggaggaccagctgagccacctgaagcagtatgaacgcagcatcgtggactacaagcccaacctggacctgctggagcagcagcaccagctcatccaggaggccctcatcttcgacaacaagcacaccaactataccatggagcacatccgcgtgggctgggagcagctgctcaccaccattgcccgcaccatcaacgaggtggagaaccagatcctcacccgcgacgccaagggcatcagccaggagcagatgcaggagttccgggcgtccttcaaccacttcgacaaggatcatggcggggcgctggggcccgaggagttcaaggcctgcctcatcagcctgggctacgacgtggagaacgaccggcagggtgaggccgagttcaaccgcatcatgagcctggtcgaccccaaccatagcggccttgtgaccttccaagccttcatcgacttcatgtcgcgggagaccaccgacacggacacggctgaccaggtcatcgcttccttcaaggtcttagcaggggacaagaacttcatcacagctgaggagctgcggagagagctgccccccgaccaggccgagtactgcatcgcccgcatggcgccataccagggccctgacgccgtgcccggtgccctcgactacaagtccttctccacggccttgtatggcgagagcgacctgtgaggccccagagacctg

SEQ ID NO: 103992 - DNA, 546 bp, Homo sapiens
  Payload ID: 443
  Gene Symbol: ACTN4
  Gene Name: actinin, alpha 4
  ENST ID: ENST00000586538
  CDS Start-End: 1-546
gccctgatccaccggcacagaccagagctgattgagtatgacaagctgaggaaggacgaccctgtcaccaacctgaacaatgccttcgaagtggctgagaaatacctcgacatccccaagatgctggatgcagaggatattgtgggcactctgaggccagatgagaaggccatcatgacttacgtgtcctgcttctaccacgctttctcgggggctcagaaggctgaaactgccgccaaccggatctgtaaggtgctggctgtcaaccaagagaacgagcacctgatggaggactacgagaagctggccagcgacctcctggagtggatccggcgcaccatcccctggctggaggaccgtgtgccccaaaagactatccaggagatgcagcagaagctggaggacttccgcgactaccggcgtgtgcacaagccgcccaaggtgcaggagaagtgccagctggagatcaacttcaacacgctgcagaccaagctgcgcctcagcaaccggcccgccttcatgccctccgagggcaagatggtctcg

SEQ ID NO: 103993 - DNA, 441 bp, Homo sapiens
  Payload ID: 443
  Gene Symbol: ACTN4
  Gene Name: actinin, alpha 4
  ENST ID: ENST00000589528
  CDS Start-End: 1-317
gcggcggaatggtggactaccacgcggcgaaccagtcgtaccagtacggccccagcagcgcgggcaatggcgctggcggcgggggcagcatgggcgactacatggcccaggaggacgactgggaccgggacctgctgctggacccggcctgggagaagcagcagcgcaagaccttcacggcatggtgcaactcccacctgcggaaggcaggcacacagatcgagaacattgatgaggacttccgagacgggctcaagctcatgctgctcctggaggtcatatcagaggagctgagttggcagaccgggcccccctgaaccgcaccccatcccaccagccccggccttgctttgtctggcctcacgtgtctcagattttctaagaaccaaaaaaaaaaaaggaaaaaaaacacaaaacaacaaaaaccaaaaaaaaaaaaaa

SEQ ID NO: 103994 - DNA, 2102 bp, Homo sapiens; identical to SEQ ID NO: 103991
  Payload ID: 443
  Gene Symbol: ACTN4
  Gene Name: actinin, alpha 4
  ENST ID: ENST00000634692
  CDS Start-End: 9-2087

SEQ ID NO: 103995 - DNA, 441 bp, Homo sapiens; identical to SEQ ID NO: 103993
  Payload ID: 443
  Gene Symbol: ACTN4
  Gene Name: actinin, alpha 4
  ENST ID: ENST00000634682
  CDS Start-End: 1-317

SEQ ID NO: 103996 - DNA, 4963 bp, Homo sapiens; identical to SEQ ID NO: 103988
  Payload ID: 443
  Gene Symbol: ACTN4
  Gene Name: actinin, alpha 4
  ENST ID: ENST00000634960
  CDS Start-End: 77-2812

SEQ ID NO: 103997 - DNA, 3180 bp, Homo sapiens; identical to SEQ ID NO: 103989
  Payload ID: 443
  Gene Symbol: ACTN4
  Gene Name: actinin, alpha 4
  ENST ID: ENST00000635719
  CDS Start-End: 1-1029

SEQ ID NO: 103998 - DNA, 1566 bp, Homo sapiens; identical to SEQ ID NO: 103990
  Payload ID: 443
  Gene Symbol: ACTN4
  Gene Name: actinin, alpha 4
  ENST ID: ENST00000634514
  CDS Start-End: 1-1566

SEQ ID NO: 103999 - DNA, 546 bp, Homo sapiens; identical to SEQ ID NO: 103992
  Payload ID: 443
  Gene Symbol: ACTN4
  Gene Name: actinin, alpha 4
  ENST ID: ENST00000635153
  CDS Start-End: 1-546

SEQ ID NO: 104000 - DNA, 2028 bp, Homo sapiens
  Payload ID: 444
  Gene Symbol: ACTL10
  Gene Name: actin-like 10
  Uniprot ID: Q5JWF8
  ENST ID: ENST00000330271
  CDS Start-End: 1001-1738
caggaacttccgtcaagcccaggtgagaggtgccaggaggctgcctgggtcctcaagggggatatatgtccaaatggccttaccacaaggccccttcgccctcaaagttctgctcctcccgggggcttcttaggatctaaaaggatcagtcctagccatctcgtcagccatctcagcaagggctgacggggcggaacagcaaagcagaggcgggtcctgagagcgtggagcctgaagcccggcgccagagggagaccaagagggtgagatgcggctggaacccagccagagcggagactgaagcctgaactaggggccgggcctcaggcctaggaactagccacgagctgaaaaggaggcggatggcccggacagaagaggcggggctttcagaccagagggcggagccaagagctgaaaagggtggtgatttggtccagaagaggaagaacttaggctccggaggcagagccaaaggctgaaggggactactccctaggacagaggccgggaggtatcgggccgacgaagccgagtggcgcggaggagcggagccttcagccccgcggctgggccgagcccgaaggtggcgtcggtgtcggggagccgccgcgtgcaccggccgtcctccctgggccgcatcgcggtggtggtggaccagggctcgggcttcaccaaggcgggcttcgcgggcgagaaccagccgcgcatagtgctgaagagctctagcttggtgcccagctgggaccggccggtgctgcccggagcgccgggctgcgagctggcgggcggcgtggcgcgggcgcaccccatcaagcacggcgtggtggcggactgggaggcgctggaagggctgtgggagcgcctgctggtgggcggcctgcgggtgtgcccagagcagtggcccgtgctggtgagcgactcgccgttggcgccgcccgcgggccgcgaaagggtggcggagctgctgttcgagaccctggcagtgcccgcgtgccacatggctagcaccgcgttgctggcgctctgctccaccggcgcgttcagcgggctggccgtggaggcgggcgcgggcgtgtgccacgccacgcccatctacgcgggtcactcgtggcaccaggccaccttccgactgaacgtggcaggcagcaccctgtcgcgctacctgcgggatctgctggtggcggcgaaccctgacctcttgcagcaggccctgccccgcaaggccatcacacatctcaagaagcgcagctgctacgtgtccctggacttcgagggcgacctccgcgaccccgcccgccaccatccggccagtttcagcgtgggtaacgggtgctgcgtctgcctcagcagtgagcgcttccgctgccccgaacccatcttccagccgggcctgctgggccaggctgagcaggggctgcccgcgctggccttccgggcgctgcagaagatgcccaaaacgctgcggacacgcctggcagacaccgtggtgctagccggcggctccacactgtttcctggcttcgccgagcgcctggacaaggagctggaggcgcagtgccggcggcacggctacgcggccctgcggccccacctggtggccaagcatgggcgtggcatggctgtgtggaccggcggctccatggtggcctccctgcactccttccagcgccgctggataactcgggccatgtaccaggagtgtggctccaggctgctgtacgatgtgttcaactgagtcaggctggactggggggggtggcactgcgttgggggacagctctctatctaaagagtcaagtgtttggagctggcagggtcctcctggaggttggagctgactggatgggtcacccccataccctttctgggccaggagaaggtatttgggacccatgggaccctcattttgaactgcagtttgaatctccccaaccactgccagttcagagaatgccagtccagctgcctacccacagggccctactttatggcaataaaggtgatgccccacttgtgtccatgcca

SEQ ID NO: 104001 - DNA, 1899 bp, Homo sapiens
  Payload ID: 445
  Gene Symbol: ACTL6A
  Gene Name: actin-like 6A
  Uniprot ID: O96019
  ENST ID: ENST00000392662
  CDS Start-End: 348-1511
gccagcaagtgtggctgagctccggggtgtgtggacgccgctttgttgcctgaggtgggtggcggtggaagttaagggagtcaggggctatcgctcctcgagactcgcagtcgcggccactgcagtcacttcgccagttagcccttagggtaggagtcgcgccggcagcagccatgagcggcggcgtgtacgggggaggtgagtgagtgcggccggacgagagagcgcgccttttcggcgtgtgggatgaagttggagcccttgtttttgacattggatcctatactgtgagagctggttatgctggtgaggactgccccaaggtggattttcctacagctattggtatggtggtagaaagagatgacggaagcacattaatggaaatagatggcgataaaggcaaacaaggcggtcccacctactacatagatactaatgctctgcgtgttccgagggagaatatggaggccatttcacctctaaaaaatgggatggttgaagactgggatagtttccaagctattttggatcatacctacaaaatgcatgtcaaatcagaagccagtctccatcctgttctcatgtcagaggcaccgtggaatactagagcaaagagagagaaactgacagagttaatgtttgaacactacaacatccctgccttcttcctttgcaaaactgcagttttgacagcatttgctaatggtcgttctactgggctgattttggacagtggagccactcataccactgcaattccagtccacgatggctatgtccttcaacaaggcattgtgaaatcccctcttgctggagactttattactatgcagtgcagagaactcttccaagaaatgaatattgaattggttcctccatatatgattgcatcaaaagaagctgttcgtgaaggatctccagcaaactggaaaagaaaagagaagttgcctcaggttacgaggtcttggcacaattatatgtgtaattgtgttatccaggattttcaagcttcggtacttcaagtgtcagattcaacttatgatgaacaagtggctgcacagatgccaactgttcattatgaattccccaatggctacaattgtgattttggtgcagagcggctaaagattccagaaggattatttgacccttccaatgtaaaggggttatcaggaaacacaatgttaggagtcagtcatgttgtcaccacaagtgttgggatgtgtgatattgacatcagaccaggtctctatggcagtgtaatagtggcaggaggaaacacactaatacagagttttactgacaggttgaatagagagctgtctcagaaaactcctccaagtatgcggttgaaattgattgcaaataatacaacagtggaacggaggtttagctcatggattggcggctccattctagcctctttgggtacctttcaacagatgtggatttccaagcaagaatatgaagaaggagggaagcagtgtgtagaaagaaaatgcccttgagaaagagttcccaagcttctaccttccttttgtcaccttacgtttcatagctttagtatactcaggaaaagaatgaccatcttttgtagaatgtttatacatttttgcatatttcaatttccacttaaattttttaaagctttaactggctctataaattaagtttgtgctttccttgaaatgcacttattcttattacaagcattttataattttgtataaatgtctattttctctaaatattttgctttcagtaaaatgctttccaactctgtttagtgtattaattaccagtggattggtagaactgctttttattgactagtaaaagttactgcctatgctttttaccttaggcttacagaattaaataaaaattagccattcc

SEQ ID NO: 104002 - DNA, 1750 bp, Homo sapiens
  Payload ID: 445
  Gene Symbol: ACTL6A
  Gene Name: actin-like 6A
  Uniprot ID: O96019
  ENST ID: ENST00000450518
  CDS Start-End: 190-1353
aggcctggaccctagtgattggctgataggaggagccagcaagtgtggctgagctccggggtgtgtggacgccgctttgttgcctgagatgaagttggagcccttgtttttgacattggatcctatactgtgagagctggttatgctggtgaggactgccccaaggtggattttcctacagctattggtatggtggtagaaagagatgacggaagcacattaatggaaatagatggcgataaaggcaaacaaggcggtcccacctactacatagatactaatgctctgcgtgttccgagggagaatatggaggccatttcacctctaaaaaatgggatggttgaagactgggatagtttccaagctattttggatcatacctacaaaatgcatgtcaaatcagaagccagtctccatcctgttctcatgtcagaggcaccgtggaatactagagcaaagagagagaaactgacagagttaatgtttgaacactacaacatccctgccttcttcctttgcaaaactgcagttttgacagcatttgctaatggtcgttctactgggctgattttggacagtggagccactcataccactgcaattccagtccacgatggctatgtccttcaacaaggcattgtgaaatcccctcttgctggagactttattactatgcagtgcagagaactcttccaagaaatgaatattgaattggttcctccatatatgattgcatcaaaagaagctgttcgtgaaggatctccagcaaactggaaaagaaaagagaagttgcctcaggttacgaggtcttggcacaattatatgtgtaattgtgttatccaggattttcaagcttcggtacttcaagtgtcagattcaacttatgatgaacaagtggctgcacagatgccaactgttcattatgaattccccaatggctacaattgtgattttggtgcagagcggctaaagattccagaaggattatttgacccttccaatgtaaaggggttatcaggaaacacaatgttaggagtcagtcatgttgtcaccacaagtgttgggatgtgtgatattgacatcagaccaggtctctatggcagtgtaatagtggcaggaggaaacacactaatacagagttttactgacaggttgaatagagagctgtctcagaaaactcctccaagtatgcggttgaaattgattgcaaataatacaacagtggaacggaggtttagctcatggattggcggctccattctagcctctttgggtacctttcaacagatgtggatttccaagcaagaatatgaagaaggagggaagcagtgtgtagaaagaaaatgcccttgagaaagagttcccaagcttctaccttccttttgtcaccttacgtttcatagctttagtatactcaggaaaagaatgaccatcttttgtagaatgtttatacatttttgcatatttcaatttccacttaaattttttaaagctttaactggctctataaattaagtttgtgctttccttgaaatgcacttattcttattacaagcattttataattttgtataaatgtctattttctctaaatattttgctttcagtaaaatgctttccaactctgtttagtgtattaattaccagtggattggtagaactgctttttattgactagtaaaagttactgcctatgctttttaccttaggcttacagaattaaataaaaattagccattccagaaatata

SEQ ID NO: 104003 - DNA, 1901 bp, Homo sapiens
  Payload ID: 445
  Gene Symbol: ACTL6A
  Gene Name: actin-like 6A
  Uniprot ID: O96019
  ENST ID: ENST00000429709
  CDS Start-End: 214-1503
agacttaggcctggaccctagtgattggctgataggaggagccagcaagtgtggctgagctccggggtgtgtggacgccgctttgttgcctgaggtgggtggcggtggaagttaagggagtcaggggctatcgctcctcgagactcgcagtcgcggccactgcagtcacttcgccagttagcccttagggtaggagtcgcgccggcagcagccatgagcggcggcgtgtacgggggagatgaagttggagcccttgtttttgacattggatcctatactgtgagagctggttatgctggtgaggactgccccaaggtggattttcctacagctattggtatggtggtagaaagagatgacggaagcacattaatggaaatagatggcgataaaggcaaacaaggcggtcccacctactacatagatactaatgctctgcgtgttccgagggagaatatggaggccatttcacctctaaaaaatgggatggttgaagactgggatagtttccaagctattttggatcatacctacaaaatgcatgtcaaatcagaagccagtctccatcctgttctcatgtcagaggcaccgtggaatactagagcaaagagagagaaactgacagagttaatgtttgaacactacaacatccctgccttcttcctttgcaaaactgcagttttgacagcatttgctaatggtcgttctactgggctgattttggacagtggagccactcataccactgcaattccagtccacgatggctatgtccttcaacaaggcattgtgaaatcccctcttgctggagactttattactatgcagtgcagagaactcttccaagaaatgaatattgaattggttcctccatatatgattgcatcaaaagaagctgttcgtgaaggatctccagcaaactggaaaagaaaagagaagttgcctcaggttacgaggtcttggcacaattatatgtgtaattgtgttatccaggattttcaagcttcggtacttcaagtgtcagattcaacttatgatgaacaagtggctgcacagatgccaactgttcattatgaattccccaatggctacaattgtgattttggtgcagagcggctaaagattccagaaggattatttgacccttccaatgtaaaggggttatcaggaaacacaatgttaggagtcagtcatgttgtcaccacaagtgttgggatgtgtgatattgacatcagaccaggtctctatggcagtgtaatagtggcaggaggaaacacactaatacagagttttactgacaggttgaatagagagctgtctcagaaaactcctccaagtatgcggttgaaattgattgcaaataatacaacagtggaacggaggtttagctcatggattggcggctccattctagcctctttgggtacctttcaacagatgtggatttccaagcaagaatatgaagaaggagggaagcagtgtgtagaaagaaaatgcccttgagaaagagttcccaagcttctaccttccttttgtcaccttacgtttcatagctttagtatactcaggaaaagaatgaccatcttttgtagaatgtttatacatttttgcatatttcaatttccacttaaattttttaaagctttaactggctctataaattaagtttgtgctttccttgaaatgcacttattcttattacaagcattttataattttgtataaatgtctattttctctaaatattttgctttcagtaaaatgctttccaactctgtttagtgtattaattaccagtggattggtagaactgctttttattgactagtaaaagttactgcctatgctttttaccttaggcttacagaattaaataaaaattagccattccagaaatatat

SEQ ID NO: 104004 - DNA, 459 bp, Homo sapiens
  Payload ID: 445
  Gene Symbol: ACTL6A
  Gene Name: actin-like 6A
  ENST ID: ENST00000490364
  CDS Start-End: 309-459
gctttgttgcctgaggtgggtggcggtggaagttaagggagtcaggggctatcgctcctcgagactcgcagtcgcggccactgcagtcacttcgccagttagcccttagggtaggagtcgcgccggcagcagccatgagcggcggcgtgtacgggggaggtgagtgagtgcggccggacgagagagcgcgccttttcggcgtgtgggatgaagttggagcccttgtttttgacattggatcctatactgtgagagctggttatgctggtgaggactgccccaaggtggattttcctacagctattggtatggtggtagaaagagatgacggaagcacattaatggaaatagatggcgataaaggcaaacaaggcggtcccacctactacatagatactaatgctctgcgtgttccgagggagaatatggaggccatttcacctctaaaaaatgggatgg

SEQ ID NO: 104005 - DNA, 916 bp, Homo sapiens
  Payload ID: 445
  Gene Symbol: ACTL6A
  Gene Name: actin-like 6A
  ENST ID: ENST00000487978
  CDS Start-End: 1-485
tcttttcagatgaagttggagcccttgtttttgacattggatcctatactgtgagagctggttatgctggtgaggactgccccaaggtggattttcctacagctattggtatggtggtagaaagagatgacggaagcacattaatggaaatagatggcgataaaggcaaacaaggcggtcccacctactacatagatactaatgctctgcgtgttccgagggagaatatggaggccatttcacctctaaaaaatgggatggttgaagactgggatagtttccaagctattttggatcatacctacaaaatgcatgtcaaatcagaagccagtctccatcctgttctcatgtcagaggcaccgtggaatactagagcaaagagagagaaactgacagagttaatgtttgaacactacaacatccctgccttcttcctttgcaaaactgcagttttgacagcctttattcatcatctacttcactaaacaggataaccttcagggaaaaggcagttttggtgcaccattgtgtgtctactgtgttaaaggaattttagtgccagatttgctaatggtcgttctactgggctgattttggacagtggagccactcataccactgcaattccagtccacgatggctatgtccttcaacaaggcattgtgaaatcccctcttgctggagactttattactatgcagtgcagagaactcttccaagaaatgaatattgaattggttcctccatatatgattgcatcaaaagaagctgttcgtgaaggatctccagcaaactggaaaagaaaagagaagttgcctcaggttacgaggtcttggcacaattatatgtgtaattgtgttatccaggattttcaagcttcggtacttcaagtgtcagattcaacttatgatgaaca

SEQ ID NO: 104006 - DNA, 1537 bp, Homo sapiens
  Payload ID: 446
  Gene Symbol: ACTL6B
  Gene Name: actin-like 6B
  Uniprot ID: O94805
  ENST ID: ENST00000160382
  CDS Start-End: 108-1388
aattggccgctgagagtcccgccccgccagggatcccgggagctgtccggccgcctcggtgctgatcccgccaccgcccacgggccgctagcagcgcagcgggcactatgagcgggggcgtctacggcggagatgaggtgggggcgctggtctttgacattggctccttctcagtccgcgctgggtacgctggggaggactgtcccaaggctgacttccccaccacagtggggctgctggccgcggaggaggggggcgggctggagctggagggggacaaagagaagaaagggaagatcttccacatcgacaccaatgccctgcacgtgcctcgggatggagcggaggtcatgtcgcccctcaagaatggcatgatcgaggactgggagtgcttccgagccatcctggatcacacctacagcaaacacgtcaagtctgagccaaacctgcacccagtgctcatgtccgaggctccgtggaacacacgggccaagcgggagaagctgacagagctgatgttcgagcagtacaacattcctgccttcttcttatgcaagacggctgtgctcaccgcctttgcaaacgggcggtccactggcctcgtgctggacagtggagccacccacaccacggccattccagtacatgacggctacgttctgcagcaaggcatcgtcaagtcccctctggcaggggacttcatctccatgcagtgccgggagctgttccaggagatggccattgacatcatcccaccttacatgatcgcagccaaggagcctgtccgggagggtgcccccccaaactggaagaagaaggagaagctaccccaggtctccaagtcctggcataactacatgtgtaatgaggtgatccaggacttccaggcctccgtgctgcaggtctcagactccccctacgatgaacaggtggctgcacaaatgcccacagtgcactacgagatgcccaatggctacaatacagactacggcgccgagcgactccgcatccctgagggcctgtttgatccctcgaacgtcaagggcctgtcggggaacaccatgttgggtgtgggccacgtggtgaccaccagcatcggcatgtgtgacattgatattcgcccgggcctgtacgggagtgtcattgtcaccggcgggaacacactgctgcagggcttcactgacaggctcaatcgagagctttcccagaagaccccaccgagcatgcgactgaaactcattgccagcaacagcaccatggagcgcaagttcagcccctggatcgggggttccatcctggcctcactgggcactttccagcagatgtggatctccaagcaggaatatgaggagggcgggaagcagtgcgtggagcgaaagtgcccctgatggcactcctccccacacacctgctcccaagctcagatggaagtcccttaacccccatgccacattgcccccctcctcctttccctcttgtcctcattaatggtgatgtttctgggttgaaagaagtaaaaatgttttaagaaaaaaaa

SEQ ID NO: 104007 - DNA, 444 bp, Homo sapiens
  Payload ID: 446
  Gene Symbol: ACTL6B
  Gene Name: actin-like 6B
  ENST ID: ENST00000461605
  CDS Start-End: 246-444
agggatcccgggagctgtccggccgcctcggtgctgatcccgccaccgcccacgggccgctagcagcgcagcgggcactatgagcgggggcgtctacggcggaggctgacttccccaccacagtggggctgctggccgcggaggaggggggcgggctggagctggagggggacaaagagaagaaagggaagatcttccacatcgacaccaatgccctgcacgtgcctcgggatggagcggaggtcatgtcgcccctcaagaatggcatgatcgaggactgggagtgcttccgagccatcctggatcacacctacagcaaacacgtcaagtctgagccaaacctgcacccagtgctcatgtccgaggctccgtggaacacacgggccaagcgggagaagctgacagagctgatgttcgagcagtacaacattcctgccttcttct

SEQ ID NO: 104008 - DNA, 1494 bp, Homo sapiens
  Payload ID: 447
  Gene Symbol: ACTL7A
  Gene Name: actin-like 7A
  Uniprot ID: Q9Y615
  ENST ID: ENST00000333999
  CDS Start-End: 58-1365
aggccttgaatccagtgggattgagaactttctaagagtggtgcggctcttgacaacatgtgggctccaccagcagcaatcatgggggatgggcccaccaagaaggtgggcaaccaggcccccctgcagacacaggccctccagactgcctctttaagggatggcccggcgaagcgggccgtgtgggtccgccatacgagttcagagccacaagaacctactgaatcaaaggcagccaaggagaggcccaagcaggaggtgaccaaagcagtggtcgtggacctgggcactggctactgtaaatgtggctttgccggcctgccaagacccacccacaagatctcaacaacggtgggcaagccctacatggagaccgccaagactggggataatcgcaaggagacattcgtggggcaggaactcaacaacacaaacgttcatctcaagctggttaaccctctgcgacatggcatcatcgtggactgggatacagtgcaggatatctgggaatatctcttccgacaagagatgaagatcgccccggaggagcatgcggtcttggtttcagacccgccactgagcccacacaccaacagagagaaatatgctgaaatgctgtttgaagccttcaacacccctgcaatgcacatcgcctaccagtcgcgcctgtccatgtactcctatggaaggacctccggcctggtggtggaggtgggccatggcgtgtcctacgtggtccccatctacgagggttatcctttgcccagcatcaccggaaggctggactacgcgggctctgacctgacagcctacctgctgggcctgctgaacagtgcggggaacgaattcacccaggaccagatgggcatcgtggaggacatcaagaagaaatgctgctttgtggccctggatcccattgaggagaagaaagtccctctcagtgagcatacgatccgctacgtgctgccggatgggaaggagattcagctgtgccaggaacggttcctctgctcggagatgttcttcaagccatctctcatcaagtccatgcagctgggcctccacacccaaaccgtgtcctgccttaacaagtgtgacatcgccctcaaacgggacctcatggggaacatcctgctctgcgggggcagcacgatgctcagtggcttccctaaccgtctgcagaaggagctaagcagcatgtgtcccaatgacaccccgcaggtaaacgtgctgcctgaaagagacagtgccgtgtggaccggtggctccatcctggcctcacttcagggtttccaaccattgtgggtccaccgctttgagtacgaggaacacgggcctttcttcctctacagaaggtgcttctgaacagcgacgaggatggacactgcactggcagtgcctaccctcgacagggtgagcgcactcctacacacagggggtggagccggcgcttattcctgtagcattaaacacccctcatatgcccctccacag

SEQ ID NO: 104009 - DNA, 2379 bp, Homo sapiens
  Payload ID: 448
  Gene Symbol: ACTL7B
  Gene Name: actin-like 7B
  Uniprot ID: Q9Y614
  ENST ID: ENST00000374667
  CDS Start-End: 1038-2285
atttttctagagggcaaatctgatcattcccctgcttaaagtcttcatagcttccctggctctcctcagtttagtctaaacctactcctgccatttgatgccctttctatttggctctgtgacttctctagcttcatctgtttttccaaacactttgactgtgggaagttcttcaccgtgcctccatttgagcctttgctcaagctgtgctctctgcctgggatgtcttcccctcctcttaactacttgacaaatacctacacctcttccaggattcaacttaagcatcacctcctctctagagcaccttctgactgcctgtctcaaatgagttctccaagtagacttcttcctgcaaacccatcggcacccattccattttcttgtctagactgggcactgctggtggcctgggtttttaatcatctatcactggcaggctgcactgggcgggacctactatatactccagtaaatgtggagtgaagggaggaaagaactcttggggcggttaaggaggcctggtgcattggagtttgatgaatttgggttaaggtacaaacaccccaagtgctgtttgctcttgggcaagtccttagaattctgagcctcatttcctcagctctgcctacctgcagaacaacataagtgaagtaactagtacagtgcctgccttactggaggggctcaaataggccctctccaccaagaagcagaagaggaaaggtgtccagtagtgaacaggttaggcatggaaatgcaagggggctgagcagaaacctctgagaccctagtgtgcttggatttctaaaactgccggccacctgctctgtccgggagcaaacttgagttagagaggtgggggtgacacaccaagaaccgaccaaagccaggccctcccctgctgcctgaatggaccagccccgagtgacatcacaatcccgggtggttgtcatggcactgctggaggtgggggatctcatttctccccagggggctctaggctgtggatgtgagaaggggagcaagggaggcagatggcgacaaggaacagccccatgcccctgggcacggctcagggtgaccctggagaggcaggaacacggcccggccctgacgccagcctccgggacacaggtgcggccactcagctcaagatgaagcccaggaaggtgcacaagatcaaggcggtcatcatcgacctgggctcccagtactgcaagtgcggctacgcgggagagccgaggcccacctacttcatctcctccaccgtgggcaaacgctgccccgaggcggccgacgctggcgacacccgcaagtggactttagtgggccatgagctgctcaacacggaggcgcctctcaagctggtgaacccgctgaagcacggcatcgtggtggactgggactgcgtgcaggacatctgggagtacatcttccgcaccgccatgaagatcctccccgaggagcacgctgtgctggtctccgaccctccgctcagccccagcagcaaccgggagaagtacgcggagctcatgtttgagaccttcggcatcccagccatgcacgtgacgtcccagtcgttgctgtccatctactcctacggcaagacctcggggctggtggtggagagcgggcacggcgtctcgcacgtggtgcccatatccgagggcgacgtgctgccgggcctgaccagccgcgccgactacgctgggggtgacctcaccaactacctgatgcagctgctcaatgaggcgggccacgcattcacggacgaccacctgcacatcatagagcacatcaagaagaagtgctgctatgcggccttcctgcccgaggaggagctgggcctggtcccggaggagctgcgcgtggactacgagctcccggacggcaaactcatcactattggccaggagcgcttccgttgctctgagatgctcttccagccctccctggcaggcagcacccagccgggcctcccggagctcacagctgcctgcctgggccgctgccaggacacgggcttcaaggaggagatggccgccaacgtgctactgtgtggcggctgcactatgctggatggcttccccgagcgcttccagagggagctgagcctcctctgccccggggacagccctgcagtggctgccgctcctgagaggaagacctccgtgtggaccggcggttccatcctggcctccctgcaggccttccaacagctctgggtcagcaaggaagagtttgaggagcggggcagcgtggccatctacagcaagtgctgagcctcggcatttccacagacaaggcctccagcacagatggccacaggcctctctatacacatttacagaatttcacataaaggtttactctgaa

SEQ ID NO: 104010 - DNA, 1861 bp, Homo sapiens
  Payload ID: 449
  Gene Symbol: ACTL8
  Gene Name: actin-like 8
  Uniprot ID: Q9H568
  ENST ID: ENST00000375406
  CDS Start-End: 217-1317
ttcctgcttgccacgtgctcacagagtaggctgcggcaccacgtgcagccgctctcgtgcaggcgtttgcagtgtgcagctgagttcggcagctcacacagcacccctttcaagttgttttgcagtgggtgcctcttgtgagacactgtttctgagagcagcttttgtggcatcttacagggcagatttctggtcccacccacctctgcctccgccatggctgcaagaaccgttatcattgaccacgggtctggctttttgaaggctggcacggccggctggaatgagcctcagatggtcttcccgaacatcgtgaactacctaccgtgcaaggagaaccctggccccagctatgcccgtaggcgtgtgagcctgggcatcgacatttgccatcctgacacctttagctaccccatcgagcggggccgcatcctcaactgggagggtgtgcagtacctctggtcatttgtgttggagaaccacagacgggagcaagaggtcccccctgtgatcatcacggagacacccttgagggagcctgcggaccgaaagaagatgctggagatcctgtttgagttgctgcatgtcccatcggtcctcctggccgaccagctgcagatgtccctgtatgcctctggcctcctgaccggagtggtggttgattctggctatggcctgacccgcgtgcagcctttccaccagggccgccccttgcccgccagcggcaagacgctggagttcgccggccaggatctctccgcctatctcctcaagagtctctttaaggaagattgcgatagacgctgcctgtttcagctggagacagtcgccgtgactcagatgaacaagtgctacgtgccgcagaatctgggggaggccctggactttcgtgagaggcagcagagtgccttggatgagagcaacacctatcagctcccagacggctcccgcgtggagctgacccccatgcagcgggtggctcctgagatgttctttagcccgcaggtgttcgagcagccggggcccagcatcccacgggccattgtggaatccgtggagtcctgcgagatctccctgcgccccctgctggtctcccacgtgatggcctgcgggggcaacaccctctatcccgggttcacaaagcgcctgttcagggagctgatgggggatcacgtctcctccaccaaggccacagtctgggagggttccaatagaaactttagtgtctggctaggagcgtccgtggtggctcacctttctacctaccagtctgagtggatgtcccgagaggagtatggtgagcatatgaggatgtgaccctactggctcactcctgagaatgggctcctgttagatgggcacgggcggattaattttagcaaaatgttctgggtgggggtagaatgaggtggggtggggtgagctggctttggaattctaggggcatgagggtattttttaggttctaaggttttatcttgttgcaagagtgggacctacccaagggggaagacaagatgtcatccttggaaaccctgcaggggacagtttttccagggtggcctatcattggggtatgagtggctgactgccatctccatgcctgagagccactgatttttcattggcatttcccctggtttgtctcattcttcttggttgagtaggttttaactggggtagcactcctgctaggagtcccaattatttttgactaggggatgggggacagttgacatttctggtcctacaggccctttctggccagggaggcattgctgcaggtgagcctgggatgcccttgccacccgtggttggatcttgttttatatctgcaaataaatagcttgtttggaagcaa

SEQ ID NO: 104011 - DNA, 1670 bp, Homo sapiens
  Payload ID: 449
  Gene Symbol: ACTL8
  Gene Name: actin-like 8
  Uniprot ID: Q9H568
  ENST ID: ENST00000617065
  CDS Start-End: 28-1128
caggtcccacccacctctgcctccgccatggctgcaagaaccgttatcattgaccacgggtctggctttttgaaggctggcacggccggctggaatgagcctcagatggtcttcccgaacatcgtgaactacctaccgtgcaaggagaaccctggccccagctatgcccgtaggcgtgtgagcctgggcatcgacatttgccatcctgacacctttagctaccccatcgagcggggccgcatcctcaactgggagggtgtgcagtacctctggtcatttgtgttggagaaccacagacgggagcaagaggtcccccctgtgatcatcacggagacacccttgagggagcctgcggaccgaaagaagatgctggagatcctgtttgagttgctgcatgtcccatcggtcctcctggccgaccagctgcagatgtccctgtatgcctctggcctcctgaccggagtggtggttgattctggctatggcctgacccgcgtgcagcctttccaccagggccgccccttgcccgccagcggcaagacgctggagttcgccggccaggatctctccgcctatctcctcaagagtctctttaaggaagattgcgatagacgctgcctgtttcagctggagacagtcgccgtgactcagatgaacaagtgctacgtgccgcagaatctgggggaggccctggactttcgtgagaggcagcagagtgccttggatgagagcaacacctatcagctcccagacggctcccgcgtggagctgacccccatgcagcgggtggctcctgagatgttctttagcccgcaggtgttcgagcagccggggcccagcatcccacgggccattgtggaatccgtggagtcctgcgagatctccctgcgccccctgctggtctcccacgtgatggcctgcgggggcaacaccctctatcccgggttcacaaagcgcctgttcagggagctgatgggggatcacgtctcctccaccaaggccacagtctgggagggttccaatagaaactttagtgtctggctaggagcgtccgtggtggctcacctttctacctaccagtctgagtggatgtcccgagaggagtatggtgagcatatgaggatgtgaccctactggctcactcctgagaatgggctcctgttagatgggcacgggcggattaattttagcaaaatgttctgggtgggggtagaatgaggtggggtggggtgagctggctttggaattctaggggcatgagggtattttttaggttctaaggttttatcttgttgcaagagtgggacctacccaagggggaagacaagatgtcatccttggaaaccctgcaggggacagtttttccagggtggcctatcattggggtatgagtggctgactgccatctccatgcctgagagccactgatttttcattggcatttcccctggtttgtctcattcttcttggttgagtaggttttaactggggtagcactcctgctaggagtcccaattatttttgactaggggatgggggacagttgacatttctggtcctacaggccctttctggccagggaggcattgctgcaggtgagcctgggatgcccttgccacccgtggttggatcttgttttatatctgcaaataaatagcttgtttggaagc

SEQ ID NO: 104012 - DNA, 1426 bp, Homo sapiens
  Payload ID: 450
  Gene Symbol: ACTL9
  Gene Name: actin-like 9
  Uniprot ID: Q8TC94
  ENST ID: ENST00000324436
  CDS Start-End: 122-1372
atagattgcgggcccacccctccccctgtctgcctgccctccccactggccgggcctcaacctcttctccccgcaaccccaaccccagaggaaaagccccctcacctggcgtcccgcaaccatggatgcaagtcgccccaagtcctcggaatcccagtcctccctggaggcccccaggcccggcccaaaccccagtcccaacgtggtgaacaagcccctgcagcgggactcccccggcatggtggccgacaggctgccaccaaagaccggcgcggtggttattgacatgggcacaggcacctgtaaggtaggttttgctgggcaggccagccccacctacaccgtggccaccatcctgggctgccagcccaagaaacccgccacctcggggcagtccgggctgcagacgttcatcggcgaggcagcccgcgtgctcccagagctgacgctggtgcaacccctgcgcagcggcatcgtcgtggactgggatgccgccgagctcatctggcgccacctgctggagcacgacctccgagtggccacccacgaccacccgctgctgttctccgacccacccttcagcccggccaccaaccgcgagaagctagtggaggtggccttcgagtcgctgcgctccccagccatgtacgtggcatcgcagtcggtgctgtctgtctacgcccacggtcgtgtcagcgggctggtggtggacacgggacacggggtcacctacacagtgcccgtcttccagggctacaacctgctccacgccacggagcgtctggacctggcgggcaacaacctgaccgccttcctggcggagatgctgctccaggccggcctgcccctgggacagcaggacctggacctagtggagaacattaagcaccactattgctacgtggcctccgacttccagaaggagcaggcccggccggagcaggagtacaagcggactctgaagctgcccgatgggcgcacggtcaccctgggcaaggagctgttccagtgtccggagctgctgttcaaccccccagaggtcccggggctgtcacccgtcggcctctccaccatggccaagcagagtctccgcaagttgtcactggagatgcgcgcggacttggcccaaaacgtgcttctctgcggtgggtcctcgctcttcaccggcttcgagggtcgcttccgggcagagctgctgcgcgctctgccagccgagacccacgtggtggtggctgcccagcccaccaggaatttctccgtatggatcgggggctccatcctggcctccctgcgcgccttccagtcctgctgggtcctgcgggagcagtacgaggaacagggtccctatatcgtgtaccgcaaatgctactgaccagggcagagctggggagggcgtgggggcagtaaagcctctgctacagccggc

SEQ ID NO: 104013 - DNA, 1252 bp, Homo sapiens
  Payload ID: 450
  Gene Symbol: ACTL9
  Gene Name: actin-like 9
  Uniprot ID: Q8TC94
  ENST ID: ENST00000612068
  CDS Start-End: 5-1252
aaccatggatgcaagtcgccccaagtcctcggaatcccagtcctccctggaggcccccaggcccggcccaaaccccagtcccaacgtggtgaacaagcccctgcagcgggactcccccggcatggtggccgacaggctgccaccaaagaccggcgcggtggttattgacatgggcacaggcacctgtaaggtaggttttgctgggcaggccagccccacctacaccgtggccaccatcctgggctgccagcccaagaaacccgccacctcggggcagtccgggctgcagacgttcatcggcgaggcagcccgcgtgctcccagagctgacgctggtgcaacccctgcgcagcggcatcgtcgtggactgggatgccgccgagctcatctggcgccacctgctggagcacgacctccgagtggccacccacgaccacccgctgctgttctccgacccacccttcagcccggccaccaaccgcgagaagctagtggaggtggccttcgagtcgctgcgctccccagccatgtacgtggcatcgcagtcggtgctgtctgtctacgcccacggtcgtgtcagcgggctggtggtggacacgggacacggggtcacctacacagtgcccgtcttccagggctacaacctgctccacgccacggagcgtctggacctggcgggcaacaacctgaccgccttcctggcggagatgctgctccaggccggcctgcccctgggacagcaggacctggacctagtggagaacattaagcaccactattgctacgtggcctccgacttccagaaggagcaggcccggccggagcaggagtacaagcggactctgaagctgcccgatgggcgcacggtcaccctgggcaaggagctgttccagtgtccggagctgctgttcaaccccccagaggtcccggggctgtcacccgtcggcctctccaccatggccaagcagagtctccgcaagttgtcactggagatgcgcgcggacttggcccaaaacgtgcttctctgcggtgggtcctcgctcttcaccggcttcgagggtcgcttccgggcagagctgctgcgcgctctgccagccgagacccacgtggtggtggctgcccagcccaccaggaatttctccgtatggatcgggggctccatcctggcctccctgcgcgccttccagtcctgctgggtcctgcgggagcagtacgaggaacagggtccctatatcgtgtaccgcaaatgctac

SEQ ID NO: 104014 - DNA, 2419 bp, Homo sapiens
  Payload ID: 451
  Gene Symbol: ACTR10
  Gene Name: actin-related protein 10 homolog (S. cerevisiae)
  Uniprot ID: Q9NZ32
  ENST ID: ENST00000254286
  CDS Start-End: 81-1334
gccccggccccgccccgcgagcgccgagacttgttggccgcggagactgcgaccctcttctctcagtctgccttactaccatgccgctctacgagggcctggggagcggcggggagaagacggcggtcgtgatcgacctgggagaggcctttaccaagtgtggatttgctggagaaactggtccaagatgtataattcctagtgtgataaaaagagctgggatgcctaagcctgtcagagttgttcagtataatatcaatacagaagaattatattcctacctaaaggaattcatccacatactatatttcaggcatctattggtgaatcccagagaccgccgagttgtgattatcgaatcggtattatgtccttctcacttcagagagacactcactcgtgttcttttcaaatattttgaggttccatctgtcttgcttgctccaagtcatctaatggctcttctgacgcttggaattaattctgccatggtcctagattgtggatatagggaaagcctggtgttacccatatatgaaggaatcccagttctaaattgttggggagcactacccctaggaggaaaagctcttcacaaagagttggaaactcaactattggaacaatgtactgttgacacaagtgttgctaaagaacagagccttccctcagtgatgggttcagttccggaaggtgtcttagaggacattaaagcgcgtacttgctttgtaagtgatctgaagcgaggactaaaaatccaagcagcaaaatttaatattgatgggaataatgagcgtccctccccacccccaaatgttgactatccattagatggagagaagattttacatatccttggatcaatcagagattcagttgtggaaattctttttgaacaagataatgaagagcaatcagttgccactttaatattggattcccttatacagtgtccgatagacaccaggaagcaactagcagagaatttggtagtcataggtggcacttctatgttgccaggatttctccacagattgcttgcagaaataaggtatttggtagaaaaaccaaaatataaaaaagcacttggcactaagacatttcgaattcatactccacctgcaaaagctaattgtgtggcctggttgggaggggctatttttggagcattacaagatatacttgggagccgttctgtttcaaaggaatattataatcagacgggccgtatacctgattggtgttctctcaataacccacctttggaaatgatgtttgatgtcgggaaaactcaaccacctctgatgaagagagcattttccactgagaaatagaagtttgattaaaaatcaaccttgcttcatatcaaatatttaaccaattataagcaaattgtacaaagtatgtaggatgttttgttatagaggactatagtggaagtgaaagcattctgtgtttactctttgcattaatatataattcttttgactttgtttctcttgtgtagtggtaaaatggtagctggtgcttattgagatttgctgtatttatatcaataaagtatagtaaagcagtttgattttggaagtttgttatgtggctttttttttttttttttttttgagacggagtctcgctctgtcacttaggctggagtgcagtggcacaatctctactcattgcaagctccgcctcccgggtttacgccattctgtctcagcctcctgagtagctgggactataggcatacgccaccccgcccggctaattttttgtatatttagtagagacggggtttcaccatgttagccaggatggtctcaatttcctgacctcgtgatccaccctcctcggcctcccaaagtgttgggattacaggcgtgaaccactgtaccagcctatgttgcttgtctttcaaaaagaacagtatttctccacagttcacataacctgttctgggctcattaattgtgtttccagcagttactccatttaaagcataaatagtgttaaccattaccagttatttcaaatactaacatgggtccatttaaaaaaaatatttattttggtacttgggtgtccatattataataatgttgtttttccagaaatatatttgatctttggactgagaatgtttggtaacatagtcaagcatttgttaagccaagtgtggaaatgttcactttttaactttacagtttttttaatgagcaattctacatttctaagaaaaaagatacttcatttttatataaggttacaactgctttataaaaatgtattcacaatgtcattaatctttgcgtttgtgctttatatcttctcagggcagaggttcttgaaatatgtactcaatcatttaacttttattttattttttcatttgtttttaatgaactacctcttgttgaaa

SEQ ID NO: 104015 - DNA, 1602 bp, Homo sapiens
  Payload ID: 451
  Gene Symbol: ACTR10
  Gene Name: actin-related protein 10 homolog (S. cerevisiae)
  ENST ID: ENST00000545307
  CDS Start-End: 139-696
ggcccggcgcgccgcggccgcgcgaggcccccgccgtcgccgacgcccgagcgccggagccccggccccgccccgcgagcgccgagacttgttggccgcggagactgcgaccctcttctctcagtctgccttactaccatgccgctctacgagggcctggggagcggcggggagaagacggcggtcgtgatcgacctgggagaggcctttaccaagtgtggatttgctggagaaactggtccaagatgtataattcctagtgtgataaaaagagctgggatgcctaagcctgtcagagttgttcagtataatatcaatacagaagaattatattcctacctaaaggaattcatccacatactatatttcaggcatctattggtgaatcccagagaccgccgagttgtgattatcgaatcggtattatgtccttctcacttcagagagacactcactcgtgttcttttcaaatattttgaggttccatctgtcttgcttgctccaagtcatctaatggctcttctgacgcttggaattaattctgccatggtcctagattgtggatatagggaaagcctggtgttacccatatcttttttgaatcccagttctaaattgttggggagcactacccctaggaggaaaagctcttcacaaagagttggaaactcaactattggaacaatgtactgttgacacaagtgttgctaaagaacagagccttccctcagtgatgggttcagttccggaaggtgtcttagaggacattaaagcgcgtacttgctttgtaagtgatctgaagcgaggactaaaaatccaagcagcaaaatttaatattgatgggaataatgagcgtccctccccacccccaaatgttgactatccattagatggagagaagattttacatatccttggatcaatcagagattcagttgtggaaattctttttgaacaagataatgaagagcaatcagttgccactttaatattggattcccttatacagtgtccgatagacaccaggaagcaactagcagagaatttggtagtcataggtggcacttctatgttgccaggatttctccacagattgcttgcagaaataaggtatttggtagaaaaaccaaaatataaaaaagcacttggcactaagacatttcgaattcatactccacctgcaaaagctaattgtgtggcctggttgggaggggctatttttggagcattacaagatatacttgggagccgttctgtttcaaaggaatattataatcagacgggccgtatacctgattggtgttctctcaataacccacctttggaaatgatgtttgatgtcgggaaaactcaaccacctctgatgaagagagcattttccactgagaaatagaagtttgattaaaaatcaaccttgcttcatatcaaatatttaaccaattataagcaaattgtacaaagtatgtaggatgttttgttatagaggactatagtggaagtgaaagcattctgtgtttactctttgcattaatatataattcttttgactttgtttctcttgtgtagtggtaaaatggtagctggtgcttattgagatttgct

SEQ ID NO: 104016 - DNA, 705 bp, Homo sapiens
  Payload ID: 451
  Gene Symbol: ACTR10
  Gene Name: actin-related protein 10 homolog (S. cerevisiae)
  ENST ID: ENST00000555337
  CDS Start-End: 70-450
gccccgcgagcgccgagacttgttggccgcggagactgcgaccctcttctctcagtctgccttactaccatgccgctctacgagggcctggggagcggcggggagaagacggcggtcgtgatcgacctgggagaggcctttaccaagtgtggatttgctggagaaactggtccaagatgtataattcctagtgtgataaaaagagctgggatgcctaagcctgtcagagttgttcagtataatatcaatacagaagaattatattcctacctaaaggaattcatccacatactatatttcaggcatctattggtgaatcccagagaccgccgagttgtgattatcgaatcggtattatgtccttctcacttcagagagacactcactcgtgttcttttcaaatattttgagagagttggaaactcaactattggaacaatgtactgttgacacaagtgttgctaaagaacagagccttccctcagtgatgggttcagttccggaaggtgtcttagaggacattaaagagattcagttgtggaaattctttttgaacaagataatgaagagcaatcagttgccactttaatattggattcccttatacagtgtccgatagacaccaggaagcaactagcagagaatttggtagtcataggtggcacttctatgttgccaggatttctccacagattgcttgcagaa

SEQ ID NO: 104017 - DNA, 687 bp, Homo sapiens
  Payload ID: 451
  Gene Symbol: ACTR10
  Gene Name: actin-related protein 10 homolog (S. cerevisiae)
  ENST ID: ENST00000554642
  CDS Start-End: 1-448
aagtgatctgaagcgaggactaaaaatccaagcagcaaaatttaatattgatgggaataatgagtgtccgatagacaccaggaagcaactagcagagaatttggtagtcataggtggcacttctatgttgccaggatttctccacagattgcttgcagaaataaggtatttggtagaaaaaccaaaatataaaaaagcacttggcactaagacatttcgaattcatactccacctgcaaaagctaattgtgtggcctggttgggaggggctatttttggagcattacaagatatacttgggagccgttctgtttcaaaggaatattataatcagacgggccgtatacctgattggtgttctctcaataacccacctttggaaatgatgtttgatgtcgggaaaactcaaccacctctgatgaagagagcattttccactgagaaatagaagtttgattaaaaatcaaccttgcttcatatcaaatatttaaccaattataagcaaattgtacaaagtatgtaggatgttttgttatagaggactatagtggaagtgaaagcattctgtgtttactctttgcattaatatataattcttttgactttgtttctcttgtgtagtggtaaaatggtagctggtgcttattgagatttgctgtatttatatcaataaagtatagtaaagca

SEQ ID NO: 104018 - DNA, 780 bp, Homo sapiens
  Payload ID: 451
  Gene Symbol: ACTR10
  Gene Name: actin-related protein 10 homolog (S. cerevisiae)
  ENST ID: ENST00000553907
  CDS Start-End: 1-106
gcgtacttgctttgtaagtgatctgaagcgaggactaaaaatccaagcagcaaaatttaatattgatgggaataatgagagattcagttgtggaaattctttttgaacaagataatgaagagcaatcagttgccactttaatattggattcccttatacagtgtccgatagacaccaggaagcaactagcagagaatttggtagtcataggtggcacttctatgttgccaggatttctccacagattgcttgcagaaataaggtatttggtagaaaaaccaaaatataaaaaagcacttggcactaagacatttcgaattcatactccacctgcaaaagctaattgtgtggcctggttgggaggggctatttttggagcattacaagatatacttgggagccgttctgtttcaaaggaatattataatcagacgggccgtatacctgattggtgttctctcaataacccacctttggaaatgatgtttgatgtcgggaaaactcaaccacctctgatgaagagagcattttccactgagaaatagaagtttgattaaaaatcaaccttgcttcatatcaaatatttaaccaattataagcaaattgtacaaagtatgtaggatgttttgttatagaggactatagtggaagtgaaagcattctgtgtttactctttgcattaatatataattcttttgactttgtttctcttgtgtagtggtaaaatggtagctggtgcttattgagatttgctgtatttatatcaataaagtatagtaa

SEQ ID NO: 104019 - DNA, 603 bp, Homo sapiens
  Payload ID: 451
  Gene Symbol: ACTR10
  Gene Name: actin-related protein 10 homolog (S. cerevisiae)
  ENST ID: ENST00000556748
  CDS Start-End: 65-196
gcgagcgccgagacttgttggccgcggagactgcgaccctcttctctcagtctgccttactaccatgccgctctacgagggcctggggagcggcggggagaagacggcggtcgtgatcgacctgggagaggcctttaccaacctgtcagagttgttcagtataatatcaatacagaagaattatattcctacctaaaggaattcatccacatactatatttcaggcatctattggtgaatcccagagaccgccgagttgtgattatcgaatcggtattatgtccttctcacttcagagagacactcactcgtgttcttttcaaatattttgagagagttggaaactcaactattggaacaatgtactgttgacacaagtgttgctaaagaacagagccttccctcagtgatgggttcagttccggaaggtgtcttagaggacattaaagcgcgtacttgctttgtaagtgatctgaagcgaggactaaaaatccaagcagcaaaatttaatattgatgggaataatgagcgtccctccccacccccaaatgttgactatccattagatggagagaagattttacatatccttggatcaatcag

SEQ ID NO: 104020 - DNA, 484 bp, Homo sapiens
  Payload ID: 451
  Gene Symbol: ACTR10
  Gene Name: actin-related protein 10 homolog (S. cerevisiae)
  ENST ID: ENST00000556243
  CDS Start-End: 8-280
tactaccatgccgctctacgagggcctggggagcggcggggagaagacggcggtcgtgatcgacctgggagaggcctttaccaagtgtggatttgctggagaaactggtccaagatgtataattcctagtgtgataaaaagagctgggatgcctaaggttctcactctgtcacccaggctggagtgcagtggcacgatcttggctcactgcaacctctgcctccctgcaacctccacctcctgggttcaagcagttctcccacttcagcctcctgagtagctgggactacagcctgtcagagttgttcagtataatatcaatacagaagaattatattcctacctaaaggaattcatccacatactatatttcaggcatctattggtgaatcccagagaccgccgagttgtgattatcgaatcggtattatgtccttctcacttcagagagacactcactcgtgttcttttcaaatattttgag

SEQ ID NO: 104021 - DNA, 1517 bp, Homo sapiens
  Payload ID: 451
  Gene Symbol: ACTR10
  Gene Name: actin-related protein 10 homolog (S. cerevisiae)
  ENST ID: ENST00000555229
  CDS Start-End: 77-616
cggccccgccccgcgagcgccgagacttgttggccgcggagactgcgaccctcttctctcagtctgccttactaccatgccgctctacgagggcctggggagcggcggggagaagacggcggtcgtgatcgacctgggagaggcctttaccaagtgtggatttgctggagaaactggtccaagatgtataattcctagtgtgataaaaagagctgggatgcctaagcctgtcagagttgttcagtataatatcaatacagaagaattatattcctacctaaaggaattcatccacatactatatttcaggcatctattggtgaatcccagagaccgccgagttgtgattatcgaatcggtattatgtccttctcacttcagagagacactcactcgtgttcttttcaaatattttgaggttccatctgtcttgcttgctccaagtcatctaatggctcttctgacgcttggaattaattctgccatggtcctagattgtggatatagggaaagcctggtgaatcccagttctaaattgttggggagcactacccctaggaggaaaagctcttcacaaagagttggaaactcaactattggaacaatgtactgttgacacaagtgttgctaaagaacagagccttccctcagtgatgggttcagttccggaaggtgtcttagaggacattaaagcgcgtacttgctttgtaagtgatctgaagcgaggactaaaaatccaagcagcaaaatttaatattgatgggaataatgagcgtccctccccacccccaaatgttgactatccattagatggagagaagattttacatatccttggatcaatcagagattcagttgtggaaattctttttgaacaagataatgaagagcaatcagttgccactttaatattggattcccttatacagtgtccgatagacaccaggaagcaactagcagagaatttggtagtcataggtggcacttctatgttgccaggatttctccacagattgcttgcagaaataaggtatttggtagaaaaaccaaaatataaaaaagcacttggcactaagacatttcgaattcatactccacctgcaaaagctaattgtgtggcctggttgggaggggctatttttggagcattacaagatatacttgggagccgttctgtttcaaaggaatattataatcagacgggccgtatacctgattggtgttctctcaataacccacctttggaaatgatgtttgatgtcgggaaaactcaaccacctctgatgaagagagcattttccactgagaaatagaagtttgattaaaaatcaaccttgcttcatatcaaatatttaaccaattataagcaaattgtacaaagtatgtaggatgttttgttatagaggactatagtggaagtgaaagcattctgtgtttactctttgcattaatatataattcttttgactttgtttctcttgtgtagtggtaaaatggtagctggtgcttattgagat

SEQ ID NO: 104022 - DNA, 1544 bp, Homo sapiens
  Payload ID: 451
  Gene Symbol: ACTR10
  Gene Name: actin-related protein 10 homolog (S. cerevisiae)
  ENST ID: ENST00000554402
  CDS Start-End: 1-908
tgccgctctacgagggcctggggagcggcggggagaagacggcggtcgtgatcgacctgggagaggcctttaccaagtgtggatttgctggagaaactggtccaagatgtataattcctagtgtgataaaaagagctgggatgcctaagcctgtcagagttgttcagtataatatcaatacagaagaattatattcctacctaaaggaattcatccacatactatatttcaggcatctattggtgaatcccagagaccgccgagttgtgattatcgaatcggtattatgtccttctcacttcagagagacactcactcgtgttcttttcaaatattttgaggttccatctgtcttgcttgctccaagtcatctaatggctcttctgacgcttggaattaattctgccatggtcctagattgtggatatagggaaagcctggtgttacccatatatgaaggaatcccagttctaaattgttggggagcactacccctaggaggaaaagctcttcacaaagagttggaaactcaactattggaacaatgtactgttgacacaagtgttgctaaagaacagagccttccctcagtgatgggttcagttccggaaggtgtcttagaggacattaaagcgcgtacttgctttgtaagtgatctgaagcgaggactaaaaatccaagcagcaaaatttaatattgatgggaataatgagcgtccctccccacccccaaatgttgactatccattagatggagagaagattttacatatccttggatcaatcagagattcagttgtggaaattctttttgaacaagataatgaagagcaatcagttgccactttaatattggattcccttatacagtgttgctcttgttgcccaggctggagtgcaatggcatgatctcagctcagcacaacctccgcccccgggttcaatgtccgatagacaccaggaagcaactagcagagaatttggtagtcataggtggcacttctatgttgccaggatttctccacagattgcttgcagaaataaggtatttggtagaaaaaccaaaatataaaaaagcacttggcactaagacatttcgaattcatactccacctgcaaaagctaattgtgtggcctggttgggaggggctatttttggagcattacaagatatacttgggagccgttctgtttcaaaggaatattataatcagacgggccgtatacctgattggtgttctctcaataacccacctttggaaatgatgtttgatgtcgggaaaactcaaccacctctgatgaagagagcattttccactgagaaatagaagtttgattaaaaatcaaccttgcttcatatcaaatatttaaccaattataagcaaattgtacaaagtatgtaggatgttttgttatagaggactatagtggaagtgaaagcattctgtgtttactctttgcattaatatataattcttttgactttgtttctcttgtgtagtggtaaaatggtagctggtgcttattgagatttgctgtatttat

SEQ ID NO: 104023 - DNA, 7591 bp, Homo sapiens
  Payload ID: 452
  Gene Symbol: ARPIN
  Gene Name: actin-related protein 2/3 complex inhibitor
  Uniprot ID: Q7Z6K5
  ENST ID: ENST00000357484
  CDS Start-End: 122-802
cgccattcccggatccgccggctgggaatcgcgggtccccgcgcgtcctgcagcacttcccgcgccgcgcccccagcccagtgcgccggctctgtgccggggtgcccgggcggtcgggagaatgagccgcatctaccacgacggcgcgctccggaacaaggcggtgcagagcgtccggctgccaggggcctgggaccccgccgcccaccaggggggaaatggtgtcctgctggagggagaactgatcgatgtatctcggcacagcatcttggacactcatggcaggaaggagcgctactacgtgctgtatatccggcccagtcacatccatcgccgtaaattcgacgccaagggaaatgaaatcgagcccaacttcagcgccaccaggaaggtgaacacgggcttcctcatgtcgtcctacaaggtggaagccaagggggacactgacaggctcacgcccgaggcgctgaaggggctggtcaacaagccagagctgctcgcgctgacagagagcctcacccccgaccacacagtggcgttctggatgcccgagtcagagatggaggtgatggaactcgagctgggggccggggtacggctgaagactcggggcgatggtcccttcctggattcattggccaaacttgaggctggaacagtgaccaagtgtaatttcactggtgatggaaagacaggggcatcctggacagacaacatcatggcccaaaagtgttcgaagggggctgcagcggagatccgagagcagggggatggggcagaggacgaggagtgggatgactgagggacgtggctgcctctgggggcaccagcaccttctgtagcattgtggaacatttcttccatgaacttctactctggagctggagagaacagtctgccaagtcttacctggttcttccccatagccaccttggaatactctttgaacaagctctgctaaaaccaaacccatgaccactgtgttggtggtggggcctcatgctgtggctcagggagggcccctccctgcatgtgagtctagccttcctagacattacatgatgaccctttaaaaaaaaattagagatggaggtctcactatgttgcccaggctgatctcaaactcctggactcaagcgatccacccccctccacctcccaaggtgttgggattacaggcgtgagccactgcacccagcctcatgttgaccctggccctggatagcagctttgtttgtagaggcaggtggtgggagagaccctaggacagcctgagagtaactggacctggtattggtgcggagtggggaatatcccttgtctaaatgcagagcagctgagagaagttagcggggctcttcctccgttctcattgtttcctgctttccttccccacccaccccttcctcagcactctgtgttgtagcctgtactatcctgcttcaagcctccgtgtcccttgtaccttccccctaccttgagttgccagttctttactccctcaaatgttcccatgccacctctggggtttctgttatctgacatccctggctgctttcctggtagatgccattcccagagaggccaacagcgttcccaggcgtggctggctggtccgcatctctcagactcactctgccaggctacagttttgagaataccttttttgttgttgttttgtacctggagaactttttatgaatgagtaaatcttcagaaaggaattcctccacccttactgggttattgtcaggtgtaaacggcctttcagctgagcaatgttcctatgagaaggaagccatttctcttggctcatgaacactgccttttgggtagtatacccacacccagatctgtgaagagacctggaattgaagtctccatgtcgtcaggacttggtggcatgtggatcttgcttgacttgggaaaagagagggtggtggtgaactaataattatggagtccccctaatgtgtcgaacacaatgctagatgatttccatgataataattactcatacttgtgctaagcacttgcgatatcgtacttctcacaacagtccatgaggtactgattattattcccattttctcatgagactaaagctcagagctctaggatagtatacagtggcaagaggaatttacatccaagcactcagatttcaaagcccacattcttaactaccggactattcatattacagagcaggaaaagggtctcagacaggttaagcaacctgcccagagtcacacagctaatgagtagcagaatcaggattcaaacccagagctgtcaaaagcaaaccttatgttccttccactgtcccctgcttccttgcccttcagaaaggtcttggaaacaggggccagaggatgtggtagccacttcactggtgttctgtgtctgaatgggactttctcacaggcaggccatgctgggacctcagccatgggggtggccagggaggtggttgagcagaaggatagctggggacactgactgggggtagagtcacccagtgtctttagacatcctgctgtctaaagcactgtgtccaaagggtatggcacacttatatggacaggtcaccattccaaacaaggaggcccagtgtgtcaataggagaggtcctaaagcaacaaaaagggcggggtgtcttggatgggcttcaggaagggaaagaccattgtgtctggagctcagagaatgggggctggtgtttgagatgaggctggagattgggcatggcatcctcacgcatgttaaggaattggggactttatccttaacatcctggaagccagtgatcccatggagagtgagaagatctgatctgtgtttcaaaggtcacttgactgccgagcagctggaggcgagttgctcctttaggagactgctgcagttgcctgggtgagaggctagaggggtctggtctatagcagtggcaggggagatggaaagaagagaatgatttgaggggcattcggggggcaaaatcaacaggacctggggggagacgaagggatcaagaatgatgcccagattctgggtgagtggcagtgctgtggtgcacaagtagtgatgttatgtttccgggtgacctgctgtttagcaggagcccagcctgtggctaagaagtatagagaactgaaactagctccctagggatgggaaaaccaagtgggctgaggataagaacagggccccagggctgggtgcagtcgctcacgcctgtaatcttagcactttgggaggccgaggtgggcggatcacttgaggtcaggagttcgaaaccagcctgatcaacacagtgaaaccccgtctctaccaaaaaatacaaaaattacccggacatggtggcacatgcctgtagttccagcgccttgggaggctgaggcatgagaatttcttgaacccgggaggtggaggttgcagtgagctgagattgccactgcactccagcctgggcaacacagtgagaccctgtctcaaaaaaaaaaaaaaaaaaaagaatagggtcccaggctcagcaggtagggacactgaggtaaaatcctattccctaggactagggactaggaagggagaaaataggaagctgctgtggcataggcatctgcatgggcagatggtgaggccaaagcccctgattttgccatacctcctgccctggtcaggactggttcaggcattagggcaggcccagccagggcagaagccttcctagatacacctgtggggagttgaggaactacagcagggctgaaaccctgctttcaggggcccccatgtggctggtaggggcagcttttggaagctagactggatcctattactccccagatgaaaagttcaaattccttaatacaactcagagctcatcacaatgtcacaaccctcctttctcggctcgcttcctccttaagagctctggggcgattctttcagaccagcctgagggatcttccacaggttgttaatagggctagaaacaaaaagtggtggtgtttctatgatctaatttgttggaacaaacgtagtgttaaactcaaacatttctgtaggatttcttggagctttaactatactaacatttactgtaactcttcaggacagggtatgattacgtatttcccacatttctttggtcagagaacccgtttttgtgaggagcatttcatgggacagctgttgtgagaaacagtttgggaagggctgtgttggtcccatggaggggctggctgttcccagagcaggtcactcccccacttgcattgccttgcctggactcttttcttggagggaggtccctttcctctacccatctgaatttttttttcttccaccagtgtccagcttgcctttcaccatgggcctaatgatggaaattacagttattttgtatcttcaaacagaaccaagcaaatcctctgagcttcattcatatgggaaattttctttctttcttttttttttttttgagatggaatttcgctcttgttgcccaggctggagtgcaatggctcaatctcggctcactgcaacctccacctcccaggttcaagagtttctcctgcctcagcaggaggattactgtaatcccaagtagctgggattacaggcctgcgccaccacgactagctaattttgtacttttagtagagatgcgatttcaccatgttggctaggctggtctcgaactcctgacctcaggtgatccaccctcctcagcctcccaaagtgctgggattacaggcatgagccacagtgccggacattatgggaaaattttttgagggactaaactaatctccacaaatagcaatgcatttaggaaatatatttaaaggggaaaaaaagactcatagtttcactcagtcatgttcataatttttagtatttgggttttttagcatgtaatttgtgtacatagttttggtttttgtaaacttgcataggggttttctggtacaaactggaaaacctgctagacaaattctgaaacatctgtaatgcttgtaggtagttgttgtaacactatgcccacacataatcactttccatattgctgcatagtctttgtaaccatttttcttcttcttttttttgagatggagttttgctcttgttgcccaggctggagtgcaatggcgcgatcttggcccactgcaacctctgcctcccgggttcaagctattctgctgccttagcctcccgagtagctgggattacaggcacacgccaccacgcccggctagtttttgtatttttagtagagacggggtttcaccatgtcagccaggcttttcttgaacttctgatctcaagtgatcctcactcctcagcctcccaaattgctgggattacaggcgtgagccaccacgcccacctgtaaccattatttttaagattgctaccattggatagttctgtcatggtccaacttttggatatttaaaattgatccctgtgtggctaacagaattaatgtttccaaaaatgttgaaaattatatagttctcttaattccccacctctaactatatttttgggttatttctttaggaacagatgcccaggagtcatattactgagaatctagaaatcttttgcaaagttcttgttatattgccaaattgcttcccaaaagggttgttctaaaccataatttcaccagcaatgtaggggagaaccatttttatgctgcccttgtgagaattgggtatgaaaacatttttaaaatgatttttgatgaggtgaaaataatatttgaatatattttaatttgcctttcccccacttatagtgagcttaaacattttttccttttcctagctgtatttctccctttgttattcgttctttcgtccatttatctactggggagatggggagtgttatctttttagtttatcagttatttgcattttaaatataaccatttgccatattttaacaacgatttttccattaaataattctttttataaaaaaactttatatatctgttgatgttttgtgatttttattgcttctaagctaatacagatttttggatcttattcaatttcgctttcttctgtttaggttattatctggttttatacctaactacttattttcaaattgctaaccagttatcctaatagtatttactgaattccttcccactcctacatcacatattaaaattattttatgcctaaattatttataatatttcagttattcttcctataattacaatttgaaccatcaaagtaggttttcatagttggcagagctagttcttcttcataattctgtttcagaattttctttgatattcttcctcaacattttaaacattttgtcaagtttcagtgcaactgacttttggtttttatttatttaaaaactgggccatgccgggcgcagtggctcacgcctgtaatcccagcacttcgggagactgagatgggtgaatcacttgaggtcaggagtttgagaccagactggccaatgtggtgaaaccccatctctactaaaaatacaaaaatttgctgggcatggtggcatgtgcctgtaatcccagctactggggaggctgaagcaggagaattgtttgaacccgggagacggaggttgcagtgagccaagattgtgccactgcactccagcctgggcaacagagtgagactccatctcaaacaaacaaacaaacaaacaaacaaaaaactggactaggcgtggtggcggtttgggagactgaggctggaggattgcctgaggccagcagtttgaggttacagtgaggtatgactgtgccactgcactccaacctgggtaagaccctatctctgaaaaacaaacaagcaaaccccagaactctggctgcaaaagtagtacatatttctttgaaggaaaaaaaggaaaacttgataatcctaccacccaaagatgtttttaaatcacttatgtggtactcagttatgtgccatgcactgtccaagtgcttacaaatattatactaactccctttgtgtttataacaactgtctgaagtcagtagactcattttccagttttccagtttaggaaactgatattacaccttttctacagatggggaaacttgcccagggtgcccaggcagtccgcagaaccatgctttgaatcagggcagtgtggttccagggtcctgtacagatcaaacaccctgactctgccattccatcagatacatgattcatattttggtgtatttgcctccaatcttgagcaaagtgggttgtccctgtacatactttgtgtaatcttttagcttaacaggtgtcatgaacacttccgtatcataaatctttcccagcatgatttttattatctatttaatatttctcatattcaatgtagaacaatgcacttaaccaatttctcatttttgtaataattttcttcccattttcccctgtaataacactgctgagatatatatttttttcttcttttttttactgttctgaagatactctggcagaaatgtatgttcctcaggctaaatcttttcacacatccacaatcattttatcataaattctagagctggaaa

SEQ ID NO: 104024 - DNA, 698 bp, Homo sapiens
  Payload ID: 452
  Gene Symbol: ARPIN
  Gene Name: actin-related protein 2/3 complex inhibitor
  ENST ID: ENST00000560096
  CDS Start-End: 1-409
ggcgctgaaggggctggtcaacaagccagagctgctcgcgctgacagagagcctcacccccgaccacacagtggcgttctggatgcccgagtcagagatggaggtgatggaactcgagctgggggccggggtacggctgaagactcggggcgatggtcccttcctggattcattggccaaacttgaggctggaacagtgaccaagtgtaatttcactggtgatggaaagacaggggcatcctggacagacaacatcatggcccaaaagtgttcgaagggggctgcagcggagatccgagagcagggggatggggcagaggacgaggagtgggtaggtacctggtgttggtgcagttgtatctcctggcaggagcatggtacatactggttgaggttgtgggtaggatgagaagacgacaggatgaatcttaccccccagctttagtggaattctgtgaaacacctgggaatgtgttagcatcaggagaattcctctaaggtatgaagaatgacaacctgggacctttcttgtaggtggctctgaacctaactattccccaaagattcccaagtggtaggaaggagggggtgcagagggatattaatcatggtcattaagtctcaaaacatttctacttcaagtgaatacattaaccatgctgaggcagttgaacaactgaatgcgtagtttttcctcc

SEQ ID NO: 104025 - DNA, 2145 bp, Homo sapiens
  Payload ID: 452
  Gene Symbol: ARPIN
  Gene Name: actin-related protein 2/3 complex inhibitor
  ENST ID: ENST00000460685
  CDS Start-End: 833-1225
aacaggatcgggtgggggggtgggatgcgggtgggggaaaactggggttgccaaagccgcctctccgccttcagtccgcccctccagtccgccgctcccggcgcccctgccgccgcgcccgcccagcgaccccatgacacagatcggcttaaagctccccgcctgtccgcctgccctcgagagagggtcccgacccccagacaggtctccgaaggctgggcttcgcctcacgccgacctccggccccaccccacccgcgtaactataaactccagctacttgccgcgctgcttttgcacagactcatgccctgccccagaagggacagtggccgtgctgtggcgggaacagcgggcgggctggtccagagcagggcctgcctgggtgaggaggatttggagggccaggccctgtcgtcacagggttatgaggccgaagggaccattccatttacaactgcgctgaagaattgtgctaagtgaaataagccagatacagaaagacaaatactgtgtgatctcgtatatggaacctataaaagcgttgaaccatagaaacggcagaacagaccaggcgctgtggttcacgcctgtaatcccagcactttgggaggccgaggcgggtggatcacttgaggggaaatggtgtcctgctggagggagaactgatcgatgtatctcggcacagcatcttggacactcatggcaggaaggagcgctactacgtgctgtatatccggcccagtcacatccatcgccgtaaattcgacgccaagggaaatgaaatcgagcccaacttcagcgccaccaggaaggtgaacacgggcttcctcatgtcgtcctacaaggtggaagccaagggggacactgacaggctcacgcccgaggcgctgaaggggctggtcaacaagccagagctgctcgcgctgacagagagcctcacccccgaccacacagtggcgttctggatgcccgagtcagagatggaggtgatggaactcgagctgggggccggggtacggctgaagactcggggcgatggtcccttcctggattcattggccaaacttgaggctggaacagtgaccaagtgtaatttcactggtgatggaaagacaggggcatcctggacagacaacatcatggcccaaaagtgttcgaagggggctgcagcggagatccgagagcagggggatggggcagaggacgaggagtgggatgactgagggacgtggctgcctctgggggcaccagcaccttctgtagcattgtggaacatttcttccatgaacttctactctggagctggagagaacagtctgccaagtcttacctggttcttccccatagccaccttggaatactctttgaacaagctctgctaaaaccaaacccatgaccactgtgttggtggtggggcctcatgctgtggctcagggagggcccctccctgcatgtgagtctagccttcctagacattacatgatgaccctttaaaaaaaaattagagatggaggtctcactatgttgcccaggctgatctcaaactcctggactcaagcgatccacccccctccacctcccaaggtgttgggattacaggcgtgagccactgcacccagcctcatgttgaccctggccctggatagcagctttgtttgtagaggcaggtggtgggagagaccctaggacagcctgagagtaactggacctggtattggtgcggagtggggaatatcccttgtctaaatgcagagcagctgagagaagttagcggggctcttcctccgttctcattgtttcctgctttccttccccacccaccccttcctcagcactctgtgttgtagcctgtactatcctgcttcaagcctccgtgtcccttgtaccttccccctaccttgagttgccagttctttactccctcaaatgttcccatgccacctctggggtttctgttatctgacatccctggctgctttcctggtagatgccattcccagagaggccaacagcgttcccaggcgtggctggctggtccgcatctctcagactcactctgccaggctacagttttgagaataccttttttgttgttgttttgtacctggagaactttttatgaatgagtaaatcttcagaaagg

SEQ ID NO: 104026 - DNA, 1437 bp, Homo sapiens
  Payload ID: 453
  Gene Symbol: ACTRT1
  Gene Name: actin-related protein T1
  Uniprot ID: Q8TDG2
  ENST ID: ENST00000371124
  CDS Start-End: 193-1323
ggagataagattcagaggttgaggatggggtgtcctggtggactgaaggtagcctactagctgtacatgggtgacaacttgaaacttcagaaccctgaagtttaaaaaattctaaaggtgcctgtcatctcagagagtgacgtaagtgttctttctttatttgggggaagtccaggagaacatattacagacatgtttaatccacatgcattagatgttcctgctgtaatttttgacaatggttcaggactctgcaaagcaggcctgtctggagagattggaccccgccatgtcatcagctccgtcttgggacattgtaaattcaatgtgcctttagcaagacttaatcagaagtacttcgtggggcaagaagccctgtacaagtatgaggccctacatttgcactaccccattgagcgtggactggtaacaggatgggatgacatggagaaactctggaaacatctctttgagcgggagcttggagtaaaacccagccaacagcctgtacttatgaccgagccctctttgaatcctagggaaattcgagaaaagctagcagaaatgatgtttgagaccttcagtgtgcctggtttctacctgtctaatcatgcggtggcagcgctctatgcctctgcctgtgtcacaggcctggtggtggacagtggagatggggtcacttgcactgtccccatctttgagggttactccctgcctcacgcagtcaccaaactctgtatggcagggagggacatcacagagcacctcacccggctcctctttgctagcgggtttaacttcccttgcatactcaacaaggccgtggtaaataacatcaaagagaagttgtgctacatcgccttggagccagagaaagagctacgcaagagccggggagaggtcctgggagcatacagactgccagatggacatgtcatccactttggggatgagctgtaccaagtgcccgaggttctttttgcacctgaccagctgggcatccacagcccaggactctcaaaaatggtctccagcagcatcatgaagtgtgacactgacatccagaataaactttatgcagacattgtactctccgggggcaccactctcctccctgggctggaggaaaggctcatgaaggaagtggaacagctggcttccaaaggtactcccatcaagatcacagcttctcctgatagatgcttctctgcatggattggtgcatccatcatgacctctatgagcagtttcaagcagatgtgggtcacctcggcagacttcaaggagtatgggacatctgtggttcaaagaaggtgcttttaaagatccttgagcagaggagacatcttgaagtgtcagattacaggagtaccagtgggagatggcattttcttctgggcttcagcatgatgttcaataaaagttttgccatttcaa

SEQ ID NO: 104027 - DNA, 1421 bp, Homo sapiens
  Payload ID: 454
  Gene Symbol: ACTRT2
  Gene Name: actin-related protein T2
  Uniprot ID: Q8TDY3
  ENST ID: ENST00000378404
  CDS Start-End: 205-1338
ggaagaggcctcagcaggcccaggccacctggagggagagcagacctgcggctgaggatgcagggctcccgggcacggtgctagccctgccttgagacaccccgagagctgtgggaagagctgtgggatcccctattgcatcacaaagcggccctggagggctggtctttattttgatgaggctgagaagggaaggctgcgggcatgtttaatccgcacgctttagactccccggctgtgatttttgacaatggctcggggttctgcaaagcgggcctgtctggggagtttggaccccggcacatggtcagctccatcgtggggcacctgaaattccaggctccctcagcagaggccaaccagaagaagtactttgtgggggaggaggccctgtacaagcaggaggccctgcagctgcactcccctttcgagcgtggcctgatcacagggtgggatgacgtggagagactctggaagcacctctttgagtgggagctaggcgtgaaacccagcgaccagcccctgcttgcaacggagccctccctgaaccccagggagaaccgtgagaagatggcagaagtcatgttcgagaacttcggcgtgcccgctttctacctgtcggaccaggcggtgctggctctctacgcctctgcctgtgtcacgggcctggtggtggacagcggggatgcggtcacctgcactgtccccatctttgagggttactccctgccccacgcagtcaccaagctccacgtggcgggcagggacatcacggagctcctcatgcagctgctcctggccagcggccacaccttcccctgccagctggacaagggtctcgtggacgacatcaaaaagaagctgtgctacgtggccttggagcccgagaaggagctttcccggaggccggaggaggtcctgagggagtacaagctgcccgacgggaacatcatcagcctcggggacccgctgcaccaggcgcccgaggccctgttcgtgccccagcagctgggcagccagagccccgggctctcgaatatggtctccagcagcatcaccaagtgtgataccgacatccagaagatcctctttggggagattgtgctgtcggggggcactaccctgttccacgggctggatgaccggcttctcaaggagctggagcagctggcctccaaggacacccccatcaagatcacggctccccccgaccggtggttctccacctggattggagcctccatcgtcacctctctgagtagcttcaagcagatgtgggtcaccgccgcagacttcaaggagtttgggacctccgtggtgcagagaagatgcttctgaaggccgcttctcgttgggtaccgtggggggtgaaccctagccccagctttgggaggatgttcaataaaggaccaatgccggaa

SEQ ID NO: 104028 - DNA, 2005 bp, Homo sapiens
  Payload ID: 455
  Gene Symbol: ACTRT3
  Gene Name: actin-related protein T3
  Uniprot ID: Q9BYD9
  ENST ID: ENST00000330368
  CDS Start-End: 376-1494
agaattccgtggctttggaaaataaaactgctgttatagctcttctgggtatttgagaaatgcacttgtgaagggttagagttgaatcttttgatgcgaaagtcgggttttcctgatactgggattccgggattccaggtgttggggtggcccaattcctgcgagaagcaatagcgggcggtaacatgaggagcacggtgcgtccagcgagtccttccgcctggggccctgccgaccccctgcctgcgcccccaggactctggcctcacccggccgtgccggggcctctgtgacgcggcgttccaggcactcggccccggccgagcccgtagctagagcggctcagagacaggaggcggcggcagcagcggcggcatgaaccactgccagctaccggtggtgatcgacaacggctcgggaatgatcaaggcgggcgtggctgggtgccgggagccccagtttatctacccgaacattatcggccgcgccaagggccagagccgcgcggcccagggcgggctagaactctgcgtgggcgaccaagctcaggactggaggagctcgctgttcatcagttacccagtggagcgtggtctcattacttcatgggaggacatggagatcatgtggaagcatatctatgactataacctaaagctgaagccgtgtgatggcccagtcttgattactgagccagcgctgaacccactggccaaccggcaacagatcacggaaatgttttttgagcatctgggtgttcctgccttctatatgtccatccaggctgtgctggctctctttgctgctggcttcactactggccttgtgctgaattcaggtgctggggttacccagagtgtgcccatctttgagggttactgtctgcctcatggtgtgcagcaactggatctggcaggccttgacctcaccaactacctcatggtgctaatgaagaaccatggtatcatgttgctcagtgcttcagacagaaagattgttgaagacatcaaggagagcttttgttatgtggcaatgaactacgaagaggaaatggccaagaaacccgattgtctagagaaagtttaccaactacctgatgggaaggtcatccagctccatgaccagctcttttcttgtccagaggccctcttctctccgtgtcatatgaaccttgaggcccctggcattgataagatatgcttcagcagcataatgaaatgtgatacaggcctgaggaattccttcttttccaatattatccttgccgggggatcaacctctttccctggtttagacaagcggttagttaaggatatagcaaaggtggctcctgccaacaccgctgtgcaagttatagctcctccagaaaggaaaatatcagtgtggatgggaggttctattcttgcatccttgtctgccttccaggacatgtggatcactgctgcagaatttaaagaagttggacccaacatagtacaccaaagatgcttctgaaatacagataaaatggttggaagaaaatgttttgagtatatgtgacagaaaactttggatattatatgtttctgggagaagagaaaatacttcacctattgggatgccaatatttctgttgtatttctataatgggtttgggggataataatggtgaagctcaagaacagatgtctattgagtagaaccaagttaaaataatgtttcccatagtgtttcttctataacttgacgttggtgagcttatatttcccttggaagagagcatttgtggtacaatatgctatgtgccaaatgagtgataagatttaagcttattgaagtttagggaaagaaggttgctgtggtgaggaacgagactccatagcagaggtatgccatcatggaaggggtggcattgggatggagcgcagatatccaggcaagcatactaaaatgaacaagttgctaaagatgagaatgaacaaagcatattcagggcatgtttaatagactgattttgtttttaaaa

SEQ ID NO: 104029 - DNA, 4701 bp, Homo sapiens
  Payload ID: 456
  Gene Symbol: ALCAM
  Gene Name: activated leukocyte cell adhesion molecule
  Uniprot ID: Q13740
  ENST ID: ENST00000306107
  CDS Start-End: 501-2252
agagcagcccggagaccgctgccgccgctgccgctgctaccaccgctgccacctgaggagacccgccgcccccccgtcgccgcctcctgcgagtccttcttagcacctggcgtttcatgcacattgccactgccattattattatcattccaatacaaggaaaataaaagaagataccagcgaaaagaaccgcttacacctttccgaattactcaagtgtctcctggaaacagagggtcgttgtccccggaggagcagccgaagggcccgtgggctggtgttgaccgggagggaggaggagttgggggcattgcgtggtggaaagttgcgtgcggcagagaaccgaaggtgcagcgccacagcccaggggacggtgtgtctgggagaagacgctgcccctgcgtcgggacccgccagcgcgcgggcaccgcggggcccgggacgacgccccctcctgcggcgtggactccgtcagtggcccaccaagaaggaggaggaatatggaatccaagggggccagttcctgccgtctgctcttctgcctcttgatctccgccaccgtcttcaggccaggccttggatggtatactgtaaattcagcatatggagataccattatcataccttgccgacttgacgtacctcagaatctcatgtttggcaaatggaaatatgaaaagcccgatggctccccagtatttattgccttcagatcctctacaaagaaaagtgtgcagtacgacgatgtaccagaatacaaagacagattgaacctctcagaaaactacactttgtctatcagtaatgcaaggatcagtgatgaaaagagatttgtgtgcatgctagtaactgaggacaacgtgtttgaggcacctacaatagtcaaggtgttcaagcaaccatctaaacctgaaattgtaagcaaagcactgtttctcgaaacagagcagctaaaaaagttgggtgactgcatttcagaagacagttatccagatggcaatatcacatggtacaggaatggaaaagtgctacatccccttgaaggagcggtggtcataatttttaaaaaggaaatggacccagtgactcagctctataccatgacttccaccctggagtacaagacaaccaaggctgacatacaaatgccattcacctgctcggtgacatattatggaccatctggccagaaaacaattcattctgaacaggcagtatttgatatttactatcctacagagcaggtgacaatacaagtgctgccaccaaaaaatgccatcaaagaaggggataacatcactcttaaatgcttagggaatggcaaccctcccccagaggaatttttgttttacttaccaggacagcccgaaggaataagaagctcaaatacttacacactgacggatgtgaggcgcaatgcaacaggagactacaagtgttccctgatagacaaaaaaagcatgattgcttcaacagctatcacagttcactatttggatttgtccttaaacccaagtggagaagtgactagacagattggtgatgccctacccgtgtcatgcacaatatctgctagcaggaatgcaactgtggtatggatgaaagataacatcaggcttcgatctagcccgtcattttctagtcttcattatcaggatgctggaaactatgtctgcgaaactgctctgcaggaggttgaaggactaaagaaaagagagtcattgactctcattgtagaaggcaaacctcaaataaaaatgacaaagaaaactgatcccagtggactatctaaaacaataatctgccatgtggaaggttttccaaagccagccattcaatggacaattactggcagtggaagcgtcataaaccaaacagaggaatctccttatattaatggcaggtattatagtaaaattatcatttcccctgaagagaatgttacattaacttgcacagcagaaaaccaactggagagaacagtaaactccttgaatgtctctgctataagtattccagaacacgatgaggcagacgagataagtgatgaaaacagagaaaaggtgaatgaccaggcaaaactaattgtgggaatcgttgttggtctcctccttgctgcccttgttgctggtgtcgtctactggctgtacatgaagaagtcaaagactgcatcaaaacatgtaaacaaggacctcggtaatatggaagaaaacaaaaagttagaagaaaacaatcacaaaactgaagcctaagagagaaactgtcctagttgtccagagataaaaatcatatagaccaattgaagcatgaacgtggattgtatttaagacataaacaaagacattgacagcaattcatggttcaagtattaagcagttcattctaccaagctgtcacaggttttcagagaattatctcaagtaaaacaaatgaaatttaattacaaacaataagaacaagttttggcagccatgataataggtcatatgttgtgtttggttcaattttttttccgtaaatgtctgcactgaggatttctttttggtttgccttttatgtaaattttttacgtagctatttttatacactgtaagctttgttctgggagttgctgttaatctgatgtataatgtaatgtttttatttcaattgtttatatggataatctgagcaggtacatttctgattctgattgctatcagcaatgccccaaactttctcataagcacctaaaacccaaaggtggcagcttgtgaagattggggacactcatattgccctaattaaaaactgtgatttttatcacaagggaggggaggccgagagtcagactgatagacaccataggagccgactctttgatatgccaccagcgaactctcagaaataaatcacagatgcatatagacacacatacataatggtactcccaaactgacaattttacctattctgaaaaagacataaaacagaatttggtagcacttacctctacagacacctgctaataaattattttctgtcaaaagaaaaaacacaagcatgtgtgagagacagtttggaaaaatcatggtcaacattcccattttcatagatcacaatgtaaatcactataattacaaattggtgttaaatcctttgggttatccactgccttaaaattatacctatttcatgtttaaaaagatatcaatcagaattggagtttttaacagtggtcattatcaaagctgtgttattttccacagaatatagaatatatatttttttcgtgtgtgtttttgttaactaccctacagatattgaatgcaccttgagataatttagtgtttttaactgatacataatttatcaagcagtacatgaaagtgtaataataaaatgtctatgtatctttagttacattcaaatttgtaactttataaacatgttttatgcttgaggaaatttttaaggtggtagtataaatggaaactttttgaagtagaccagatatgggctacttgtgactagacttttaaactttgctctttcaagcagaagcctggtttctgggagaacactgcacagcgatttctttcccaggatttacacaactttaaagggaagataaatgaacatcagatttctaggtatagaactatgttattgaaaggaaaaggaaaactggtgtttgtttcttagactcatgaaataaaaaattatgaaggcaatgaaaaataaattgaaaattaaagtcagatgagaataggaataatactttgccacttctgcattatttagaaacatacgttattgtacatttgtaaaccatttactgtctgggcaatagtgactccgtttaataaaagcttccgtagtgcattggtatggattaaatgcataaaatattcttagactcgatgctgtataaaatattatgggaaaaaaagaaaatacgttattttgcctctaaacttttattgaagttttatttggcaggaaaaaaaattgaatcttggtcaacatttaaaccaaagtaaaaggggaaaaaccaaagttatttgttttgcatggctaagccattctgttatctctgtaaatactgtgatttcttttttattttctctttagaattttgttaaagaaattctaaaatttttaaacacctgctctccacaataaatcacaaacactaaaataaaattacttccatataaatattattttctcttttggtgtgggagatcaaaggtttaaagtctaacttctaagatatatttgcagaaagaagcaacatgacaatagagagagttatgctacaattatttcttggtttccacttgcaatggttaattaagtccaaaaacagctgtcagaacctcgagagcagaacatgagaaactcagagctctggaccgaaagcagaaagtttgccgggaaaaaaaaagacaacattattaccatcgattcagtgcctggataaagaggaaagcttacttgtttaatggcagccacatgcacgaagatgctaagaagaaaaagaattccaaatcctcaacttttgaggtttcggctctccaatttaactctttggcaacaggaaacaggttttgcaagttcaaggttcactccctatatgtgattataggaattgtttgtggaaatggattaacatacccgtctatgcctaaaagataataaaactgaaatatgtcttca

SEQ ID NO: 104030 - DNA, 1818 bp, Homo sapiens
  Payload ID: 456
  Gene Symbol: ALCAM
  Gene Name: activated leukocyte cell adhesion molecule
  ENST ID: ENST00000486979
  CDS Start-End: 119-1717
aaaccctaaagcccagtgcttttagtgacatttcaaatgccttggatggtatactgtaaattcagcatatggagataccattatcataccttgccgacttgacgtacctcagaatctcatgtttggcaaatggaaatatgaaaagcccgatggctccccagtatttattgccttcagatcctctacaaagaaaagtgtgcagtacgacgatgtaccagaatacaaagacagattgaacctctcagaaaactacactttgtctatcagtaatgcaaggatcagtgatgaaaagagatttgtgtgcatgctagtaactgaggacaacgtgtttgaggcacctacaatagtcaaggtgttcaagcaaccatctaaacctgaaattgtaagcaaagcactgtttctcgaaacagagcagctaaaaaagttgggtgactgcatttcagaagacagttatccagatggcaatatcacatggtacaggaatggaaaagtgctacatccccttgaaggagcggtggtcataatttttaaaaaggaaatggacccagtgactcagctctataccatgacttccaccctggagtacaagacaaccaaggctgacatacaaatgccattcacctgctcggtgacatattatggaccatctggccagaaaacaattcattctgaacaggcagtatttgatatttactatcctacagagcaggtgacaatacaagtgctgccaccaaaaaatgccatcaaagaaggggataacatcactcttaaatgcttagggaatggcaaccctcccccagaggaatttttgttttacttaccaggacagcccgaaggaataagaagctcaaatacttacacactgacggatgtgaggcgcaatgcaacaggagactacaagtgttccctgatagacaaaaaaagcatgattgcttcaacagctatcacagttcactatttggatttgtccttaaacccaagtggagaagtgactagacagattggtgatgccctacccgtgtcatgcacaatatctgctagcaggaatgcaactgtggtatggatgaaagataacatcaggcttcgatctagcccgtcattttctagtcttcattatcaggatgctggaaactatgtctgcgaaactgctctgcaggaggttgaaggactaaagaaaagagagtcattgactctcattgtagaaggcaaacctcaaataaaaatgacaaagaaaactgatcccagtggactatctaaaacaataatctgccatgtggaaggttttccaaagccagccattcaatggacaattactggcagtggaagcgtcataaaccaaacagaggaatctccttatattaatggcaggtattatagtaaaattatcatttcccctgaagagaatgttacattaacttgcacagcagaaaaccaactggagagaacagtaaactccttgaatgtctctgctataagtattccagaacacgatgaggcagacgagataagtgatgaaaacagagaaaaggtgaatgaccaggcaaaactaattgtgggaatcgttgttggtctcctccttgctgcccttgttgctggtgtcgtctactggctgtacatgaagaagtcaaagactgcatcaaaacatgtaaacaaggacctcggtaatatggaagaaaacaaaaagttagaagaaaacaatcacaaaactgaagcctaagagagaaactgtcctagttgtccagagataaaaatcatatagaccaattgaagcatgaacgtggattgtatttaagacataaacaaagacattgacagcaa

SEQ ID NO: 104031 - DNA, 2496 bp, Homo sapiens
  Payload ID: 456
  Gene Symbol: ALCAM
  Gene Name: activated leukocyte cell adhesion molecule
  ENST ID: ENST00000465413
  CDS Start-End: 1-1033
gttgggtgactgcatttcagaagacagttatccagatggcaatatcacatggtacaggaatggaaaagtgctacatccccttgaaggagcggtggtcataatttttaaaaaggaaatggacccagtgactcagctctataccatgacttccaccctggagtacaagacaaccaaggctgacatacaaatgccattcacctgctcggtgacatattatggaccatctggccagaaaacaattcattctgaacaggcagtatttgatatttactatttggatttgtccttaaacccaagtggagaagtgactagacagattggtgatgccctacccgtgtcatgcacaatatctgctagcaggaatgcaactgtggtatggatgaaagataacatcaggcttcgatctagcccgtcattttctagtcttcattatcaggatgctggaaactatgtctgcgaaactgctctgcaggaggttgaaggactaaagaaaagagagtcattgactctcattgtagaaggcaaacctcaaataaaaatgacaaagaaaactgatcccagtggactatctaaaacaataatctgccatgtggaaggttttccaaagccagccattcaatggacaattactggcagtggaagcgtcataaaccaaacagaggaatctccttatattaatggcaggtattatagtaaaattatcatttcccctgaagagaatgttacattaacttgcacagcagaaaaccaactggagagaacagtaaactccttgaatgtctctgctataagtattccagaacacgatgaggcagacgagataagtgatgaaaacagagaaaaggtgaatgaccaggcaaaactaattgtgggaatcgttgttggtctcctccttgctgcccttgttgctggtgtcgtctactggctgtacatgaagaagtcaaagactgcatcaaaacatgtaaacaaggacctcggtaatatggaagaaaacaaaaagttagaagaaaacaatcacaaaactgaagcctaagagagaaactgtcctagttgtccagagataaaaatcatatagaccaattgaagcatgaacgtggattgtatttaagacataaacaaagacattgacagcaattcatggttcaagtattaagcagttcattctaccaagctgtcacaggttttcagagaattatctcaagtaaaacaaatgaaatttaattacaaacaataagaacaagttttggcagccatgataataggtcatatgttgtgtttggttcaattttttttccgtaaatgtctgcactgaggatttctttttggtttgccttttatgtaaattttttacgtagctatttttatacactgtaagctttgttctgggagttgctgttaatctgatgtataatgtaatgtttttatttcaattgtttatatggataatctgagcaggtacatttctgattctgattgctatcagcaatgccccaaactttctcataagcacctaaaacccaaaggtggcagcttgtgaagattggggacactcatattgccctaattaaaaactgtgatttttatcacaagggaggggaggccgagagtcagactgatagacaccataggagccgactctttgatatgccaccagcgaactctcagaaataaatcacagatgcatatagacacacatacataatggtactcccaaactgacaattttacctattctgaaaaagacataaaacagaatttggtagcacttacctctacagacacctgctaataaattattttctgtcaaaagaaaaaacacaagcatgtgtgagagacagtttggaaaaatcatggtcaacattcccattttcatagatcacaatgtaaatcactataattacaaattggtgttaaatcctttgggttatccactgccttaaaattatacctatttcatgtttaaaaagatatcaatcagaattggagtttttaacagtggtcattatcaaagctgtgttattttccacagaatatagaatatatatttttttcgtgtgtgtttttgttaactaccctacagatattgaatgcaccttgagataatttagtgtttttaactgatacataatttatcaagcagtacatgaaagtgtaataataaaatgtctatgtatctttagttacattcaaatttgtaactttataaacatgttttatgcttgaggaaatttttaaggtggtagtataaatggaaactttttgaagtagaccagatatgggctacttgtgactagacttttaaactttgctctttcaagcagaagcctggtttctgggagaacactgcacagcgatttctttcccaggatttacacaactttaaagggaagataaatgaacatcagatttctaggtatagaactatgttattgaaaggaaaaggaaaactggtgtttgtttcttagactcatgaaataaaaaattatgaaggcaatg

SEQ ID NO: 104032 - DNA, 4189 bp, Homo sapiens
  Payload ID: 456
  Gene Symbol: ALCAM
  Gene Name: activated leukocyte cell adhesion molecule
  Uniprot ID: Q13740
  ENST ID: ENST00000472644
  CDS Start-End: 67-1779
gcccgggacgacgccccctcctgcggcgtggactccgtcagtggcccaccaagaaggaggaggaatatggaatccaagggggccagttcctgccgtctgctcttctgcctcttgatctccgccaccgtcttcaggccaggccttggatggtatactgtaaattcagcatatggagataccattatcataccttgccgacttgacgtacctcagaatctcatgtttggcaaatggaaatatgaaaagcccgatggctccccagtatttattgccttcagatcctctacaaagaaaagtgtgcagtacgacgatgtaccagaatacaaagacagattgaacctctcagaaaactacactttgtctatcagtaatgcaaggatcagtgatgaaaagagatttgtgtgcatgctagtaactgaggacaacgtgtttgaggcacctacaatagtcaaggtgttcaagcaaccatctaaacctgaaattgtaagcaaagcactgtttctcgaaacagagcagctaaaaaagttgggtgactgcatttcagaagacagttatccagatggcaatatcacatggtacaggaatggaaaagtgctacatccccttgaaggagcggtggtcataatttttaaaaaggaaatggacccagtgactcagctctataccatgacttccaccctggagtacaagacaaccaaggctgacatacaaatgccattcacctgctcggtgacatattatggaccatctggccagaaaacaattcattctgaacaggcagtatttgatatttactatcctacagagcaggtgacaatacaagtgctgccaccaaaaaatgccatcaaagaaggggataacatcactcttaaatgcttagggaatggcaaccctcccccagaggaatttttgttttacttaccaggacagcccgaaggaataagaagctcaaatacttacacactgacggatgtgaggcgcaatgcaacaggagactacaagtgttccctgatagacaaaaaaagcatgattgcttcaacagctatcacagttcactatttggatttgtccttaaacccaagtggagaagtgactagacagattggtgatgccctacccgtgtcatgcacaatatctgctagcaggaatgcaactgtggtatggatgaaagataacatcaggcttcgatctagcccgtcattttctagtcttcattatcaggatgctggaaactatgtctgcgaaactgctctgcaggaggttgaaggactaaagaaaagagagtcattgactctcattgtagaaggcaaacctcaaataaaaatgacaaagaaaactgatcccagtggactatctaaaacaataatctgccatgtggaaggttttccaaagccagccattcaatggacaattactggcagtggaagcgtcataaaccaaacagaggaatctccttatattaatggcaggtattatagtaaaattatcatttcccctgaagagaatgttacattaacttgcacagcagaaaaccaactggagagaacagtaaactccttgaatgtctctgctaatgaaaacagagaaaaggtgaatgaccaggcaaaactaattgtgggaatcgttgttggtctcctccttgctgcccttgttgctggtgtcgtctactggctgtacatgaagaagtcaaagactgcatcaaaacatgtaaacaaggacctcggtaatatggaagaaaacaaaaagttagaagaaaacaatcacaaaactgaagcctaagagagaaactgtcctagttgtccagagataaaaatcatatagaccaattgaagcatgaacgtggattgtatttaagacataaacaaagacattgacagcaattcatggttcaagtattaagcagttcattctaccaagctgtcacaggttttcagagaattatctcaagtaaaacaaatgaaatttaattacaaacaataagaacaagttttggcagccatgataataggtcatatgttgtgtttggttcaattttttttccgtaaatgtctgcactgaggatttctttttggtttgccttttatgtaaattttttacgtagctatttttatacactgtaagctttgttctgggagttgctgttaatctgatgtataatgtaatgtttttatttcaattgtttatatggataatctgagcaggtacatttctgattctgattgctatcagcaatgccccaaactttctcataagcacctaaaacccaaaggtggcagcttgtgaagattggggacactcatattgccctaattaaaaactgtgatttttatcacaagggaggggaggccgagagtcagactgatagacaccataggagccgactctttgatatgccaccagcgaactctcagaaataaatcacagatgcatatagacacacatacataatggtactcccaaactgacaattttacctattctgaaaaagacataaaacagaatttggtagcacttacctctacagacacctgctaataaattattttctgtcaaaagaaaaaacacaagcatgtgtgagagacagtttggaaaaatcatggtcaacattcccattttcatagatcacaatgtaaatcactataattacaaattggtgttaaatcctttgggttatccactgccttaaaattatacctatttcatgtttaaaaagatatcaatcagaattggagtttttaacagtggtcattatcaaagctgtgttattttccacagaatatagaatatatatttttttcgtgtgtgtttttgttaactaccctacagatattgaatgcaccttgagataatttagtgtttttaactgatacataatttatcaagcagtacatgaaagtgtaataataaaatgtctatgtatctttagttacattcaaatttgtaactttataaacatgttttatgcttgaggaaatttttaaggtggtagtataaatggaaactttttgaagtagaccagatatgggctacttgtgactagacttttaaactttgctctttcaagcagaagcctggtttctgggagaacactgcacagcgatttctttcccaggatttacacaactttaaagggaagataaatgaacatcagatttctaggtatagaactatgttattgaaaggaaaaggaaaactggtgtttgtttcttagactcatgaaataaaaaattatgaaggcaatgaaaaataaattgaaaattaaagtcagatgagaataggaataatactttgccacttctgcattatttagaaacatacgttattgtacatttgtaaaccatttactgtctgggcaatagtgactccgtttaataaaagcttccgtagtgcattggtatggattaaatgcataaaatattcttagactcgatgctgtataaaatattatgggaaaaaaagaaaatacgttattttgcctctaaacttttattgaagttttatttggcaggaaaaaaaattgaatcttggtcaacatttaaaccaaagtaaaaggggaaaaaccaaagttatttgttttgcatggctaagccattctgttatctctgtaaatactgtgatttcttttttattttctctttagaattttgttaaagaaattctaaaatttttaaacacctgctctccacaataaatcacaaacactaaaataaaattacttccatataaatattattttctcttttggtgtgggagatcaaaggtttaaagtctaacttctaagatatatttgcagaaagaagcaacatgacaatagagagagttatgctacaattatttcttggtttccacttgcaatggttaattaagtccaaaaacagctgtcagaacctcgagagcagaacatgagaaactcagagctctggaccgaaagcagaaagtttgccgggaaaaaaaaagacaacattattaccatcgattcagtgcctggataaagaggaaagcttacttgtttaatggcagccacatgcacgaagatgctaagaagaaaaagaattccaaatcctcaacttttgaggtttcggctctccaatttaactctttggcaacaggaaacaggttttgcaagttcaaggttcactccctatatgtgattataggaattgtttgtggaaatggattaacatacccg

SEQ ID NO: 104033 - DNA, 1501 bp, Homo sapiens
  Payload ID: 457
  Gene Symbol: ASCC1
  Gene Name: activating signal cointegrator 1 complex subunit 1
  Uniprot ID: Q8N9N2
  ENST ID: ENST00000317126
  CDS Start-End: 348-1421
ctttctaccctcaatgccgagcacagaacctggggcagtgtttccactgtgcttccagtcccgagcatttcggatgaatgaatgatgaacaaacgacagaacgcagggcgagcagctcagcaaaggtcatgcaggagatagagaagcgctgtgtcatgagtattggatcattatggatttttttctttctcattgtgcagatctattcgcacaactctatcttcaaccagtttgccaggcccaccggaggtgcccagtaaaattttgtcaaacaaatactgatgatgaagtatcctgggacttggccctgtcagggcataattggaatatcatttggagaaagtgtcatggaagttctgcgtccacagcttataagaattgatggccggaattacaggaagaatccagtccaagaacagacctatcaacatgaagaagatgaagaggacttctatcaaggctccatggagtgtgctgatgagccctgtgatgcctacgaggtggagcagaccccacaaggattccggtctactttgagggcccccagcttgctctataagcatatagttggaaagagaggggacactaggaagaaaatagaaatggagaccaaaacttctattagcattcctaaacctggacaagacggggaaattgtaatcactggccagcatcgaaatggtgtaatttcagcccgaacacggattgatgttcttttggacacttttcgaagaaagcagcccttcactcacttccttgcctttttcctcaatgaagttgaggttcaggaaggattcctgagattccaggaggaagtactggcgaagtgctccatggatcatggggttgacagcagcattttccagaatcctaaaaagcttcatctaactattgggatgttggtgcttttgagtgaggaagagatccagcagacatgtgagatgctacagcagtgtaaagaggaattcattaatgatatttctgggggtaaacccctagaagtggagatggcagggatagaatacatgaatgatgatcctggcatggtggatgttctttacgccaaagtccatatgaaagatggctccaacaggctacaagaattagttgatcgagtgctggaacgttttcaggcatctggactaatagtgaaagagtggaatagtgtgaaactgcatgctacagttatgaatacactattcaggaaagaccccaatgctgaaggcaggtacaatctctacacagcggaaggcaaatatatcttcaaggaaagagaatcatttgatggccgaaatattttaaagttgtttgagaacttctactttggctccctaaagctgaattcaattcacatctctcagaggttcaccgtagacagctttggaaactacgcttcctgtggacaaattgacttctcctgaggtggatcttggaaagcactagaaactaaacatcttcaccaggtgctgaagaaaagtgtcttcgttttaattgccaagca

SEQ ID NO: 104034 - DNA, 2002 bp, Homo sapiens
  Payload ID: 457
  Gene Symbol: ASCC1
  Gene Name: activating signal cointegrator 1 complex subunit 1
  Uniprot ID: Q8N9N2
  ENST ID: ENST00000317168
  CDS Start-End: 116-1189
ctggggaaatttcctatcgcacgtctgctgcagcagtctcctgtttctcctcctaccttctccatttttctagtccctgcagggcataattggaatatcatttggagaaagtgtcatggaagttctgcgtccacagcttataagaattgatggccggaattacaggaagaatccagtccaagaacagacctatcaacatgaagaagatgaagaggacttctatcaaggctccatggagtgtgctgatgagccctgtgatgcctacgaggtggagcagaccccacaaggattccggtctactttgagggcccccagcttgctctataagcatatagttggaaagagaggggacactaggaagaaaatagaaatggagaccaaaacttctattagcattcctaaacctggacaagacggggaaattgtaatcactggccagcatcgaaatggtgtaatttcagcccgaacacggattgatgttcttttggacacttttcgaagaaagcagcccttcactcacttccttgcctttttcctcaatgaagttgaggttcaggaaggattcctgagattccaggaggaagtactggcgaagtgctccatggatcatggggttgacagcagcattttccagaatcctaaaaagcttcatctaactattgggatgttggtgcttttgagtgaggaagagatccagcagacatgtgagatgctacagcagtgtaaagaggaattcattaatgatatttctgggggtaaacccctagaagtggagatggcagggatagaatacatgaatgatgatcctggcatggtggatgttctttacgccaaagtccatatgaaagatggctccaacaggctacaagaattagttgatcgagtgctggaacgttttcaggcatctggactaatagtgaaagagtggaatagtgtgaaactgcatgctacagttatgaatacactattcaggaaagaccccaatgctgaaggcaggtacaatctctacacagcggaaggcaaatatatcttcaaggaaagagaatcatttgatggccgaaatattttaaagttgtttgagaacttctactttggctccctaaagctgaattcaattcacatctctcagaggttcaccgtagacagctttggaaactacgcttcctgtggacaaattgacttctcctgaggtggatcttggaaagcactagaaactaaacatcttcaccaggtgctgaagaaaagtgtcttcgttttaattgccaagcagggatgtggacatttggatggtgactttcctgggtggttccccatagattcaccattgcctctaatggtgtctacacccgtcatactaccagctgagatggtggtgggcataaggagaatttgtgcctataacccttagtgtgttctggttttttttcttttaatttttaaattgtcgtaaaatactcataaaacatactgtcttcaccatttttaagtgcacagttcagtaacgttaactgttaatacattcataatgctgtgtggccgtcaccgccgtccatctccataggcttctcagcttgtaaaatggaaactgtacccattaaacagtaattcccactcctcccagcccccgcagccaccattctgctttctgtctctctggttttgactattctcagtatctcatataagtggaatcatacagtgacttgtctttttgtgactggcttatttcacttagcataatgtcctcaaggttcatccatgttgtgtcaggtgacaggatttccttcctgtattatacatataatggaatgttccgttacatgtgcgtaccacactctgttcctccatcagtgaacacttggcttgcttcctcttgactattgggagtagtgctaatacagacacgggggtgcaaatatctctttgagactctgcctttaattcctttaccacccagagttttatctttagcaaaataaccattaaagttgtttgcctttta

SEQ ID NO: 104035 - DNA, 2270 bp, Homo sapiens
  Payload ID: 457
  Gene Symbol: ASCC1
  Gene Name: activating signal cointegrator 1 complex subunit 1
  Uniprot ID: Q8N9N2
  ENST ID: ENST00000342444
  CDS Start-End: 103-1305
ctatcgcacgtctgctgcagcagtctcctgtttctcctcctaccttctccatttttctagtccctgcagggcataattggaatatcatttggagaaagtgtcatggaagttctgcgtccacagcttataagaattgatggccggaattacaggaagaatccagtccaagaacagacctatcaacatgaagaagatgaagaggacttctatcaaggctccatggagtgtgctgatgagccctgtgatgcctacgaggtggagcagaccccacaaggattccggtctactttgagggcccccagcttgctctataatctcattcacttgaacacatcaaacgactgtgggttccagaagataactttggattgtcagaatatttatacttggaagtccaggcatatagttggaaagagaggggacactaggaagaaaatagaaatggagaccaaaacttctattagcattcctaaacctggacaagacggggaaattgtaatcactggccagcatcgaaatggtgtaatttcagcccgaacacggattgatgttcttttggacacttttcgaagaaagcagcccttcactcacttccttgcctttttcctcaatgaagttgaggttcaggaaggattcctgagattccaggaggaagtactggcgaagtgctccatggatcatggggttgacagcagcattttccagaatcctaaaaagcttcatctaactattgggatgttggtgcttttgagtgaggaagagatccagcagacatgtgagatgctacagcagtgtaaagaggaattcattaatgatatttctgggggtaaacccctagaagtggagatggcagggatagaatacatgaatgatgatcctggcatggtggatgttctttacgccaaagtccatatgaaagatggctccaacaggctacaagaattagttgatcgagtgctggaacgttttcaggcatctggactaatagtgaaagagtggaatagtgtgaaactgcatgctacagttatgaatacactattcaggaaagaccccaatgctgaaggcaggtacaatctctacacagcggaaggcaaatatatcttcaaggaaagagaatcatttgatggccgaaatattttaaagagctttgccttgttgcccaggctggagtacaatgatgcaatctccgctcactgcaacctgtgcctcccgggttcaagtgattctcctgcctcagcctcccaagtagctgggattacaggtgtctctgatgcatattctcagagcctaccaggaaaatcctagaatcgagaagggcttgggacacagagagctagtggttgtttgagaacttctactttggctccctaaagctgaattcaattcacatctctcagaggttcaccgtagacagctttggaaactacgcttcctgtggacaaattgacttctcctgaggtggatcttggaaagcactagaaactaaacatcttcaccaggtgctgaagaaaagtgtcttcgttttaattgccaagcagggatgtggacatttggatggtgactttcctgggtggttccccatagattcaccattgcctctaatggtgtctacacccgtcatactaccagctgagatggtggtgggcataaggagaatttgtgcctataacccttagtgtgttctggttttttttcttttaatttttaaattgtcgtaaaatactcataaaacatactgtcttcaccatttttaagtgcacagttcagtaacgttaactgttaatacattcataatgctgtgtggccgtcaccgccgtccatctccataggcttctcagcttgtaaaatggaaactgtacccattaaacagtaattcccactcctcccagcccccgcagccaccattctgctttctgtctctctggttttgactattctcagtatctcatataagtggaatcatacagtgacttgtctttttgtgactggcttatttcacttagcataatgtcctcaaggttcatccatgttgtgtcaggtgacaggatttccttcctgtattatacatataatggaatgttccgttacatgtgcgtaccacactctgttcctccatcagtgaacacttggcttgcttcctcttgactattgggagtagtgctaatacagacacgggggtgcaaatatctctttgagactctgcctttaattcctttaccacccagagttttatctttagcaaaataaccattaaagttgtttgcctttta

SEQ ID NO: 104036 - DNA, 1510 bp, Homo sapiens
  Payload ID: 457
  Gene Symbol: ASCC1
  Gene Name: activating signal cointegrator 1 complex subunit 1
  Uniprot ID: Q8N9N2
  ENST ID: ENST00000394915
  CDS Start-End: 308-1510
ccccacccccaggaccagcctgagtggctgcgctcaccacgacgaggaccgcggcgtgttcgccccccaacagacggagccagcggcgaaggcggcgtgcgcgcgcccgtgccgtggtgggcgtggccggggcggagacgcgaggaggggagcagagaacgcgctcgcgtagaggaattccgggtcctcctcctcgccctaccttggtttacctgcagccgcctagtcctcttctccttctctttgatgattcagggcctcggcttccctcacgggcataattggaatatcatttggagaaagtgtcatggaagttctgcgtccacagcttataagaattgatggccggaattacaggaagaatccagtccaagaacagacctatcaacatgaagaagatgaagaggacttctatcaaggctccatggagtgtgctgatgagccctgtgatgcctacgaggtggagcagaccccacaaggattccggtctactttgagggcccccagcttgctctataatctcattcacttgaacacatcaaacgactgtgggttccagaagataactttggattgtcagaatatttatacttggaagtccaggcatatagttggaaagagaggggacactaggaagaaaatagaaatggagaccaaaacttctattagcattcctaaacctggacaagacggggaaattgtaatcactggccagcatcgaaatggtgtaatttcagcccgaacacggattgatgttcttttggacacttttcgaagaaagcagcccttcactcacttccttgcctttttcctcaatgaagttgaggttcaggaaggattcctgagattccaggaggaagtactggcgaagtgctccatggatcatggggttgacagcagcattttccagaatcctaaaaagcttcatctaactattgggatgttggtgcttttgagtgaggaagagatccagcagacatgtgagatgctacagcagtgtaaagaggaattcattaatgatatttctgggggtaaacccctagaagtggagatggcagggatagaatacatgaatgatgatcctggcatggtggatgttctttacgccaaagtccatatgaaagatggctccaacaggctacaagaattagttgatcgagtgctggaacgttttcaggcatctggactaatagtgaaagagtggaatagtgtgaaactgcatgctacagttatgaatacactattcaggaaagaccccaatgctgaaggcaggtacaatctctacacagcggaaggcaaatatatcttcaaggaaagagaatcatttgatggccgaaatattttaaagagctttgccttgttgcccaggctggagtacaatgatgcaatctccgctcactgcaacctgtgcctcccgggttcaagtgattctcctgcctcagcctcccaagtagctgggattacaggtgtctctgatgcatattctcagagcctaccaggaaaatcctag

SEQ ID NO: 104037 - DNA, 2683 bp, Homo sapiens
  Payload ID: 457
  Gene Symbol: ASCC1
  Gene Name: activating signal cointegrator 1 complex subunit 1
  Uniprot ID: Q8N9N2
  ENST ID: ENST00000394919
  CDS Start-End: 308-1381
ccccacccccaggaccagcctgagtggctgcgctcaccacgacgaggaccgcggcgtgttcgccccccaacagacggagccagcggcgaaggcggcgtgcgcgcgcccgtgccgtggtgggcgtggccggggcggagacgcgaggaggggagcagagaacgcgctcgcgtagaggaattccgggtcctcctcctcgccctaccttggtttacctgcagccgcctagtcctcttctccttctctttgatgattcagggcctcggcttccctcacgggcataattggaatatcatttggagaaagtgtcatggaagttctgcgtccacagcttataagaattgatggccggaattacaggaagaatccagtccaagaacagacctatcaacatgaagaagatgaagaggacttctatcaaggctccatggagtgtgctgatgagccctgtgatgcctacgaggtggagcagaccccacaaggattccggtctactttgagggcccccagcttgctctataagcatatagttggaaagagaggggacactaggaagaaaatagaaatggagaccaaaacttctattagcattcctaaacctggacaagacggggaaattgtaatcactggccagcatcgaaatggtgtaatttcagcccgaacacggattgatgttcttttggacacttttcgaagaaagcagcccttcactcacttccttgcctttttcctcaatgaagttgaggttcaggaaggattcctgagattccaggaggaagtactggcgaagtgctccatggatcatggggttgacagcagcattttccagaatcctaaaaagcttcatctaactattgggatgttggtgcttttgagtgaggaagagatccagcagacatgtgagatgctacagcagtgtaaagaggaattcattaatgatatttctgggggtaaacccctagaagtggagatggcagggatagaatacatgaatgatgatcctggcatggtggatgttctttacgccaaagtccatatgaaagatggctccaacaggctacaagaattagttgatcgagtgctggaacgttttcaggcatctggactaatagtgaaagagtggaatagtgtgaaactgcatgctacagttatgaatacactattcaggaaagaccccaatgctgaaggcaggtacaatctctacacagcggaaggcaaatatatcttcaaggaaagagaatcatttgatggccgaaatattttaaagttgtttgagaacttctactttggctccctaaagctgaattcaattcacatctctcagaggttcaccgtagacagctttggaaactacgcttcctgtggacaaattgacttctcctgaggtggatcttggaaagcactagaaactaaacatcttcaccaggtgctgaagaaaagtgtcttcgttttaattgccaagcagggatgtggacatttggatggtgactttcctgggtggttccccatagattcaccattgcctctaatggtgtctacacccgtcatactaccagctgagatggtggtgggcataaggagaatttgtgcctataacccttagtgtgttctggttttttttcttttaatttttaaattgtcgtaaaatactcataaaacatactgtcttcaccatttttaagtgcacagttcagtaacgttaactgttaatacattcataatgctgtgtggccgtcaccgccgtccatctccataggcttctcagcttgtaaaatggaaactgtacccattaaacagtaattcccactcctcccagcccccgcagccaccattctgctttctgtctctctggttttgactattctcagtatctcatataagtggaatcatacagtgacttgtctttttgtgactggcttatttcacttagcataatgtcctcaaggttcatccatgttgtgtcaggtgacaggatttccttcctgtattatacatataatggaatgttccgttacatgtgcgtaccacactctgttcctccatcagtgaacacttggcttgcttcctcttgactattgggagtagtgctaatacagacacgggggtgcaaatatctctttgagactctgcctttaattcctttaccacccagagttttatctttagcaaaataaccattaaagttgtttgccttttactttgcttggtctatcattttcctaccaaagtttgtcctcttaatatttgttggattcctgttccttcaccccatccccaccctcatcttcccatgcccctgatggagttgcagtgttgcagcccttttttgtttacttttcaaggcagcagcaaaagaaactgatgatatcagcaggactgtgcagagttccctggaagaatgtcagccacaggaggccctcactcctccctcaccacggaccagcagagggaggcgggaatgctggggagccccagcctcccacccctgcctcctcacattcttcctccctccatgtcctctccttcttctccttccttattcttgccttgattctttctctctttatattctttaactgcacttctgaactctgtgttaagttgctacattgtgaggactgtgtctaacagtgagatttattattgggactgcacaaatcacttgtgaataaaatgtttaacggtg

SEQ ID NO: 104038 - DNA, 548 bp, Homo sapiens
  Payload ID: 457
  Gene Symbol: ASCC1
  Gene Name: activating signal cointegrator 1 complex subunit 1
  ENST ID: ENST00000530461
  CDS Start-End: 177-548
ggggaaatttcctatcgcacgtctgctgcagcagtctcctgtttctcctcctaccttctccatttttctagtccctgcagcttataagaattgatggccggaattacaggaagaatccagtccaagaacagacctatcaacatgaagaagatgaagaggacttctatcaaggctccatggagtgtgctgatgagccctgtgatgcctacgaggtggagcagaccccacaaggattccggtctactttgagggcccccagcttgctctataagcatatagttggaaagagaggggacactaggaagaaaatagaaatggagaccaaaacttctattagcattcctaaacctggacaagacggggaaattgtaatcactggccagcatcgaaatggtgtaatttcagcccgaacacggattgatgttcttttggacacttttcgaagaaagcagcccttcactcacttccttgcctttttcctcaatgaagttgaggttcaggaaggattcctgagattccaggaggaagtactggcgaagtgctccatg

SEQ ID NO: 104039 - DNA, 1798 bp, Homo sapiens
  Payload ID: 457
  Gene Symbol: ASCC1
  Gene Name: activating signal cointegrator 1 complex subunit 1
  ENST ID: ENST00000486689
  CDS Start-End: 1-877
ctataagcatatagttggaaagagaggggacactaggaagaaaatagaaatggagaccaaaacttctattagcattcctaaacctggacaagacggggaaattgtaatcactggccagcatcgaaatggtgtaatttcagcccgaacacggattgatgttcttttggacacttttcgaagaaagcagcccttcactcacttccttgcctttttcctcaatgaagttgaggttcaggaaggattcctgagattccaggaggaagtactggcgaagtgctccatggatcatggggttgacagcagcattttccagaatcctaaaaagcttcatctaactattgggatgttggtgcttttgagtgaggaagagatccagcagacatgtgagatgctacagcagtgtaaagaggaattcattaatgatatttctgggggtaaacccctagaagtggagatggcagggatagaatacatgaatgatgatcctggcatggtggatgttctttacgccaaagtccatatgaaagatggctccaacaggctacaagaattagttgatcgagtgctggaacgttttcaggcatctggactaatagtgaaagagtggaatagtgtgaaactgcatgctacagttatgaatacactattcaggaaagaccccaatgctgaaggcaggtacaatctctacacagcggaaggcaaatatatcttcaaggaaagagaatcatttgatggccgaaatattttaaagagctttgccttgttgcccaggctggagtacaatgatgcaatctccgctcactgcaacctgtgcctcccgggttcaagtgattctcctgcctcagcctcccaagtagctgggattacagttgtttgagaacttctactttggctccctaaagctgaattcaattcacatctctcagaggttcaccgtagacagctttggaaactacgcttcctgtggacaaattgacttctcctgaggtggatcttggaaagcactagaaactaaacatcttcaccaggtgctgaagaaaagtgtcttcgttttaattgccaagcagggatgtggacatttggatggtgactttcctgggtggttccccatagattcaccattgcctctaatggtgtctacacccgtcatactaccagctgagatggtggtgggcataaggagaatttgtgcctataacccttagtgtgttctggttttttttcttttaatttttaaattgtcgtaaaatactcataaaacatactgtcttcaccatttttaagtgcacagttcagtaacgttaactgttaatacattcataatgctgtgtggccgtcaccgccgtccatctccataggcttctcagcttgtaaaatggaaactgtacccattaaacagtaattcccactcctcccagcccccgcagccaccattctgctttctgtctctctggttttgactattctcagtatctcatataagtggaatcatacagtgacttgtctttttgtgactggcttatttcacttagcataatgtcctcaaggttcatccatgttgtgtcaggtgacaggatttccttcctgtattatacatataatggaatgttccgttacatgtgcgtaccacactctgttcctccatcagtgaacacttggcttgcttcctcttgactattgggagtagtgctaatacagacacgggggtgcaaatatctctttgagactctgcctttaattcctttaccacccagagttttatctttagcaaaataaccattaaagttgtttgcctttt

SEQ ID NO: 104040 - DNA, 540 bp, Homo sapiens
  Payload ID: 457
  Gene Symbol: ASCC1
  Gene Name: activating signal cointegrator 1 complex subunit 1
  ENST ID: ENST00000526751
  CDS Start-End: 231-540
gacgcgaggaggggagcagagaacgcgctcgcgtagaggaattccgggtcctcctcctcgccctaccttggtttacctgcagccgcctagtcctcttctccttctctttgatgattcagggcctcggcttccctcacgatattgcagaaagacacagctttcctcttcctctccaaaccacctcgaagcagggttaaggcataattggaatatcatttggagaaagtgtcatggaagttctgcgtccacagcttataagaattgatggccggaattacaggaagaatccagtccaagaacagacctatcaacatgaagaagatgaagaggacttctatcaaggctccatggagtgtgctgatgagccctgtgatgcctacgaggtggagcagaccccacaaggattccggtctactttgagggcccccagcttgctctataagcatatagttggaaagagaggggacactaggaagaaaatagaaatggagaccaaaacttctattagcattcctaaacctggacaagacggggaaattg

SEQ ID NO: 104041 - DNA, 581 bp, Homo sapiens
  Payload ID: 457
  Gene Symbol: ASCC1
  Gene Name: activating signal cointegrator 1 complex subunit 1
  ENST ID: ENST00000524829
  CDS Start-End: 212-581
atgcgcactcggtcaaacccggcctggggaaatttcctatcgcacgtctgctgcagcagtctcctgtttctcctcctaccttctccatttttctagtccctgcagggcctcggcttccctcacgatattgcagaaagacacagctttcctcttcctctccaaaccacctcgaagcaggggcataattggaatatcatttggagaaagtgtcatggaagttctgcgtccacagcttataagaattgatggccggaattacaggaagaatccagtccaagaacagacctatcaacatgaagaagatgaagaggacttctatcaaggctccatggagtgtgctgatgagccctgtgatgcctacgaggtggagcagaccccacaaggattccggtctactttgagggcccccagcttgctctataagcatatagttggaaagagaggggacactaggaagaaaatagaaatggagaccaaaacttctattagcattcctaaacctggacaagacggggaaattgtaatcactggccagcatcgaaatggtgtaatttcagcccgaacacggattgatgttcttt

SEQ ID NO: 104042 - DNA, 599 bp, Homo sapiens
  Payload ID: 457
  Gene Symbol: ASCC1
  Gene Name: activating signal cointegrator 1 complex subunit 1
  ENST ID: ENST00000533958
  CDS Start-End: 431-599
ctatcgcacgtctgctgcagcagtctcctgtttctcctcctaccttctccatttttctagtccctgcagccccacccccaggaccagcctgagtggctgcgctcaccacgacgaggaccgcggcgtgttcgccccccaacagacggagccagcggcgaaggcggcgtgcgcgcgcccgtgccgtggtgggcgtggccggggcggagacgcgaggaggggagcagagaacgcgctcgcgtagaggaattccgggtcctcctcctcgccctaccttggtttacctgcagccgcctagtcctcttctccttctctttgatgattcagggcctcggcttccctcacgatattgcagaaagacacagctttcctcttcctctccaaaccacctcgaagcaggggcataattggaatatcatttggagaaagtgtcatggaagttctgcgtccacagcttataagaattgatggccggaattacaggaagaatccagtccaagaacagacctatcaacatgaagaagatgaagaggacttctatcaaggctccatggagtgtgctgatgagccctgtgatgcctacgaggtggagcagaccccac

SEQ ID NO: 104043 - DNA, 580 bp, Homo sapiens
  Payload ID: 457
  Gene Symbol: ASCC1
  Gene Name: activating signal cointegrator 1 complex subunit 1
  ENST ID: ENST00000527593
  CDS Start-End: 124-580
cctatcgcacgtctgctgcagcagtctcctgtttctcctcctaccttctccatttttctagtccctgcagatggtaattatatttttcagggcataattggaatatcatttggagaaagtgtcatggaagttctgcgtccacagcttataagaattgatggccggaattacaggaagaatccagtccaagaacagacctatcaacatgaagaagatgaagaggacttctatcaaggctccatggagtgtgctgatgagccctgtgatgcctacgaggtggagcagaccccacaaggattccggtctactttgagggcccccagcttgctctataagcatatagttggaaagagaggggacactaggaagaaaatagaaatggagaccaaaacttctattagcattcctaaacctggacaagacggggaaattgtaatcactggccagcatcgaaatggtgtaatttcagcccgaacacggattgatgttcttttggacacttttcgaagaaagcagcccttcactcacttccttgcctttttcctcaatgaagttgaggttcaggaaggattcctgagat

SEQ ID NO: 104044 - DNA, 569 bp, Homo sapiens
  Payload ID: 457
  Gene Symbol: ASCC1
  Gene Name: activating signal cointegrator 1 complex subunit 1
  ENST ID: ENST00000532011
  CDS Start-End: 110-241
aaatttcctatcgcacgtctgctgcagcagtctcctgtttctcctcctaccttctccatttttctagtccctgcagggcataattggaatatcatttggagaaagtgtcatggaagttctgcgtccacagcttataagaattgatggccggaattacaggaagaatccagtccaagaacagacctatcaacatgaagaagatgaagaggacttctatcaaggctggagtgcagtggcgtgatctgggctctctgcaacctctacctcccgggttcaagcaattctcctgcctcatcttccccagtagctggaactacaggctccatggagtgtgctgatgagccctgtgatgcctacgaggtggagcagaccccacaaggattccggtctactttgagggcccccagcttgctctataagcatatagttggaaagagaggggacactaggaagaaaatagaaatggagaccaaaacttctattagcattcctaaacctggacaagacggggaaattgtaatcactggccagcatcgaaatggtgtaatttcagcccgaacacggattga

SEQ ID NO: 104045 - DNA, 527 bp, Homo sapiens
  Payload ID: 457
  Gene Symbol: ASCC1
  Gene Name: activating signal cointegrator 1 complex subunit 1
  ENST ID: ENST00000525286
  CDS Start-End: 1-527
taatcactggccagcatcgaaatggtgtaatttcagcccgaacacggattgatgttcttttggacacttttcgaagaaagcagcccttcactcacttccttgcctttttcctcaatgaagttgaggttcaggaaggattcctgagattccaggaggaagtactggcgaagtgctccatggatcatggggttgacagcagcattttccagaatcctaaaaagcttcatctaactattgggatgttggtgcttttgagtgaggaagagatccagcagacatgtgagatgctacagcagtgtaaagaggaattcattaagctacaagaattagttgatcgagtgctggaacgttttcaggcatctggactaatagtgaaagagtggaatagtgtgaaactgcatgctacagttatgaatacactattcaggaaagaccccaatgctgaaggcaggtacaatctctacacagcggaaggcaaatatatcttcaaggaaagagaatcatttgatggccgaaatattttaaag

SEQ ID NO: 104046 - DNA, 640 bp, Homo sapiens
  Payload ID: 457
  Gene Symbol: ASCC1
  Gene Name: activating signal cointegrator 1 complex subunit 1
  ENST ID: ENST00000461369
  CDS Start-End: 1-211
tctcattcacttgaacacatcaaacgactgtgggttccagaagataactttggattgtcagaatatttatacttggaagtccaggcatatagttggaaagagaggggacactaggaagaaaatagaaatggagaccaaaacttctattagcattcctaaacctggacaagacggggaaattgagaaatcagagaaggaaatgatctggtagcttttaatcctctagacaaggatctggtcttgtctgttttgaaatctcaggcaatggaacatcagaagcttctccacctccaaccactgtagagacagagtttcagtaaattgcctaggctgtctggaactcctggcctcaggcaatcctcctgccttggcctttgccccagagtgctgggattacagtaatcactggccagcatcgaaatggtgtaatttcagcccgaacacggattgatgttcttttggacacttttcgaagaaagcagcccttcactcacttccttgcctttttcctcaatgaagttgaggttcaggaaggattcctgagattccaggaggaagtactggcgaagtgctccatggatcatggggttgacagcagcattttccagaatcctaaaaagcttcatctaactattgggat

SEQ ID NO: 104047 - DNA, 450 bp, Homo sapiens
  Payload ID: 457
  Gene Symbol: ASCC1
  Gene Name: activating signal cointegrator 1 complex subunit 1
  ENST ID: ENST00000531048
  CDS Start-End: 34-450
ggcataattggaatatcatttggagaaagtgtcatggaagttctgcgtccacagcttataagaattgatggccggaattacaggaagaatccagtccaagaacagacctatcaacatgaagaagatgaagaggacttctatcaagtaatcactggccagcatcgaaatggtgtaatttcagcccgaacacggattgatgttcttttggacacttttcgaagaaagcagcccttcactcacttccttgcctttttcctcaatgaagttgaggttcaggaaggattcctgagattccaggaggaagtactggcgaagtgctccatggatcatggggttgacagcagcattttccagaatcctaaaaagcttcatctaactattgggatgttggtgcttttgagtgaggaagagatccagcagacatgtgagatgctacagcagtgtaaagag

SEQ ID NO: 104048 - DNA, 839 bp, Homo sapiens
  Payload ID: 457
  Gene Symbol: ASCC1
  Gene Name: activating signal cointegrator 1 complex subunit 1
  ENST ID: ENST00000530394
  CDS Start-End: 1-437
gtaaagaggaattcattaatgatatttctgggggtaaacccctagaagtggagatggcagggatagaatacatgaatgatgatcctggcatggtggatgttctttacgccaaagtccatatgaaagatggctccaacaggctacaagaattagttgatcgagtgctggaacgttttcaggcatctggactaatagtgaaagagtggaatagtgtgaaactgcatgctacagttatgaatacactattcaggaaagaccccaatgctgaaggcaggtacaatctctacacagcggaaggcaaatatatcttcaaggaaagagaatcatttgatggccgaaatattttaaaggtgtctctgatgcatattctcagagcctaccaggaaaatcctagaatcgagaagggcttgggacacagagagctagtggttgtttgagaacttctactttggctccctaaagctgaattcaattcacatctctcagaggttcaccgtagacagctttggaaactacgcttcctgtggacaaattgacttctcctgaggtggatcttggaaagcactagaaactaaacatcttcaccaggtgctgaagaaaagtgtcttcgttttaattgccaagcagggatgtggacatttggatggtgactttcctgggtggttccccatagattcaccattgcctctaatggtgtctacacccgtcatactaccagctgagatggtggtgggcataaggagaatttgtgcctataacccttagtgtgttctggttttttttcttttaatttttaaattgtcgtaaaatactcataaaacatactgtcttcaccattt

SEQ ID NO: 104049 - DNA, 2793 bp, Homo sapiens
  Payload ID: 458
  Gene Symbol: ASCC2
  Gene Name: activating signal cointegrator 1 complex subunit 2
  Uniprot ID: Q9H1I8
  ENST ID: ENST00000307790
  CDS Start-End: 115-2388
agtttgaccccggaagtgcgggcgctcagggagctgtcaccgtggtcggcggcggcggcggcggcggcggcacagagccggtggtggagccgccgaggagggtcacgcagcacaatgccagctctgcccctggaccaactccagatcacccacaaggacccgaagacaggaaagctgaggacttcaccagcgctgcaccccgagcagaaggcagaccggtattttgtgttatacaaaccgccccctaaagacaacattcccgccctagtggaggagtacctggaacgcgccaccttcgtagccaatgacctcgactggctcctggccttgcctcacgataaattctggtgccaggtgatctttgacgagactctacagaagtgcctggactcctacctgcgctatgtcccccgcaaattcgacgagggggtggcctcagcccctgaggttgttgacatgcagaagcgcctccatcgaagtgtttttctcaccttcctccgcatgtccactcacaaggaatccaaagatcacttcatttccccttctgcgtttggagaaatcctctacaataacttcctctttgacattccaaagatcctggacctctgcgtgctctttggaaaaggcaactcaccactgctccagaagatgataggaaacatctttacacagcagccaagttactacagtgacctggatgaaaccctgcctaccatccttcaggtcttcagcaatatcctccagcactgtggtttgcaaggggacggggccaataccacaccccagaagcttgaggagaggggccgattgacccccagtgacatgcctctcctggaattaaaggacattgttctctacctttgtgatacctgcaccacactttgggcctttctggatatcttccctttggcttgccagaccttccagaagcacgacttttgttacagactagcttccttctacgaagcagcaattcccgaaatggagtctgcaattaagaagaggaggcttgaagatagcaagcttcttggtgacctgtggcagaggctctcccattccaggaagaagctaatggagattttccacatcatcctgaaccagatctgcctccttcccatcctagaaagcagctgtgacaacattcagggcttcatcgaagagttccttcagatcttcagctccttgctgcaggagaagaggttcctccgggactatgatgcactcttccccgtggccgaagacatcagcttgctgcagcaggcctcatcagtcttggacgagacgcggactgcctacatcctccaggcagtcgagagtgcatgggaaggggtggacagacggaaagccacagatgctaaagacccatcggtgattgaggagcctaatggggagcctaacggggtcacggtgacagcagaggcagtcagtcaagcatcatcacatccggagaactcggaggaagaggagtgcatgggagcagccgcggctgtgggccctgccatgtgtggggtggaactggactctctcatctcccaagtgaaggacctgctgccagaccttggtgagggcttcatcctggcctgcctggagtactaccactacgacccagagcaggtgatcaacaatatcctggaggagcggctggcccccaccctcagccagctggaccgcaacctagacagagaaatgaaaccagaccctacacccctgctgacgtctcgccacaacgtcttccagaatgacgagtttgatgtgttcagcagggactcagtagacctgagccgggtgcacaagggcaagagcaccaggaaggaggaaaacacgcggagtttgctgaacgacaagcgtgcagtggcggcacagcggcagcgctacgagcagtacagcgtggtggtggaggaggtgccactgcagccaggcgagagcctgccctaccacagtgtctactacgaggatgagtacgatgacacatacgatggcaaccaggtgggcgccaatgatgcagactctgatgacgagctcatcagccgcaggccattcaccatccctcaggtgctgagaaccaaagtgcctagagaagggcaggaggaggatgacgacgatgaggaagacgatgctgacgaggaggctcccaagcccgaccattttgttcaggaccctgcagtgctgagagagaaggcagaagccaggcgcatggcctttctcgccaagaaagggtaccggcatgacagctcaacagcagtggccggcagcccccgaggccatgggcagagccgcgagacaacccaggaacgcaggaagaaggaagccaacaaggcgacaagagccaaccacaaccggagaaccatggccgaccgcaagaggagcaaaggcatgatcccatcctgagacctggtgcagggccagtggggaggcagcggcaccagactcaccaggccgtgctcccatcgcctggggcctcctcactaggggccccaagttcaactcaacccctcaacagcctcagctttgcagcccctgagaaggccgcctctcatctaccagccagccatgagcgccttcctgcagaacacacagtgccttatgccacagccgaagaatccgtggggccggcaagcaggcaccttcccccagctgcgctagcgggaaagagatggggatggagtcccaaggcaagcgccccaaacctcgggccacaagacaccacttcccctttaccctggacagcaggaaacctgtatattcaaaaacacaaaaagtcctgctaataaaatttttgaccctttcaaacga

SEQ ID NO: 104050 - DNA, 2823 bp, Homo sapiens
  Payload ID: 458
  Gene Symbol: ASCC2
  Gene Name: activating signal cointegrator 1 complex subunit 2
  Uniprot ID: Q9H1I8
  ENST ID: ENST00000397771
  CDS Start-End: 179-2452
gcagtttgaccccggaagtgcgggcgctcagggagctgtcaccgtggtcggcggcggcggcggcggcggcggcacagagccggtggtggagccgccgaggccacctcgtgtatgcagagaccatgtgtgtctgatctgctgggatcctagagctggaacaggagggtcacgcagcacaatgccagctctgcccctggaccaactccagatcacccacaaggacccgaagacaggaaagctgaggacttcaccagcgctgcaccccgagcagaaggcagaccggtattttgtgttatacaaaccgccccctaaagacaacattcccgccctagtggaggagtacctggaacgcgccaccttcgtagccaatgacctcgactggctcctggccttgcctcacgataaattctggtgccaggtgatctttgacgagactctacagaagtgcctggactcctacctgcgctatgtcccccgcaaattcgacgagggggtggcctcagcccctgaggttgttgacatgcagaagcgcctccatcgaagtgtttttctcaccttcctccgcatgtccactcacaaggaatccaaagatcacttcatttccccttctgcgtttggagaaatcctctacaataacttcctctttgacattccaaagatcctggacctctgcgtgctctttggaaaaggcaactcaccactgctccagaagatgataggaaacatctttacacagcagccaagttactacagtgacctggatgaaaccctgcctaccatccttcaggtcttcagcaatatcctccagcactgtggtttgcaaggggacggggccaataccacaccccagaagcttgaggagaggggccgattgacccccagtgacatgcctctcctggaattaaaggacattgttctctacctttgtgatacctgcaccacactttgggcctttctggatatcttccctttggcttgccagaccttccagaagcacgacttttgttacagactagcttccttctacgaagcagcaattcccgaaatggagtctgcaattaagaagaggaggcttgaagatagcaagcttcttggtgacctgtggcagaggctctcccattccaggaagaagctaatggagattttccacatcatcctgaaccagatctgcctccttcccatcctagaaagcagctgtgacaacattcagggcttcatcgaagagttccttcagatcttcagctccttgctgcaggagaagaggttcctccgggactatgatgcactcttccccgtggccgaagacatcagcttgctgcagcaggcctcatcagtcttggacgagacgcggactgcctacatcctccaggcagtcgagagtgcatgggaaggggtggacagacggaaagccacagatgctaaagacccatcggtgattgaggagcctaatggggagcctaacggggtcacggtgacagcagaggcagtcagtcaagcatcatcacatccggagaactcggaggaagaggagtgcatgggagcagccgcggctgtgggccctgccatgtgtggggtggaactggactctctcatctcccaagtgaaggacctgctgccagaccttggtgagggcttcatcctggcctgcctggagtactaccactacgacccagagcaggtgatcaacaatatcctggaggagcggctggcccccaccctcagccagctggaccgcaacctagacagagaaatgaaaccagaccctacacccctgctgacgtctcgccacaacgtcttccagaatgacgagtttgatgtgttcagcagggactcagtagacctgagccgggtgcacaagggcaagagcaccaggaaggaggaaaacacgcggagtttgctgaacgacaagcgtgcagtggcggcacagcggcagcgctacgagcagtacagcgtggtggtggaggaggtgccactgcagccaggcgagagcctgccctaccacagtgtctactacgaggatgagtacgatgacacatacgatggcaaccaggtgggcgccaatgatgcagactctgatgacgagctcatcagccgcaggccattcaccatccctcaggtgctgagaaccaaagtgcctagagaagggcaggaggaggatgacgacgatgaggaagacgatgctgacgaggaggctcccaagcccgaccattttgttcaggaccctgcagtgctgagagagaaggcagaagccaggcgcatggcctttctcgccaagaaagggtaccggcatgacagctcaacagcagtggccggcagcccccgaggccatgggcagagccgcgagacaacccaggaacgcaggaagaaggaagccaacaaggcgacaagagccaaccacaaccggagaaccatggccgaccgcaagaggagcaaaggcatgatcccatcctgagacctggtgcagggccagtggggaggcagcggcaccagactcaccaggccgtgctcccatcgcctggggcctcctcactaggggccccaagttcaactcaacccctcaacagcctcagctttgcagcccctgagaaggccgcctctcatctaccagccagccatgagcgccttcctgcagaacacacagtgccttatgccacagccgaagaatccgtggggccggcaagcaggcaccttcccccagctgcgctagcgggaaagagatggggatggagtcccaaggcaagcgccccaaacctcgggccacaagacaccacttcccctttaccctggacagcaggaaacctgtatattcaaaaacacaaaaag

SEQ ID NO: 104051 - DNA, 580 bp, Homo sapiens
  Payload ID: 458
  Gene Symbol: ASCC2
  Gene Name: activating signal cointegrator 1 complex subunit 2
  ENST ID: ENST00000449900
  CDS Start-End: 249-485
tttgaccccggaagtgcgggcgctcagggagctgtcaccgtggtcggcggcggcggcggcggcggcggcacagagccggtggtggagccgccgaggccacctcgtgtatgcagagaccatgtgtgtctgatctgctgggatcctagagctggaacaggccaagtgatattgtgaaaagaacactggacagcaagacaggagaccttggatctgccactcactgactgtgaggagggtcacgcagcacaatgccagctctgcccctggaccaactccagatcacccacaaggacccgaagacaggaaagctgaggacttcaccagcgctggaaacatctttacacagcagccaagttactacagtgacctggatgaaaccctgcctaccatccttcaggtcttcagcaatatcctccagcactgtggtttgcaaggggacggggccaataccacaccccagaagcttgaggagaggggccgattgacccccagtgacatgcctctcctggaattaaaggacattgttctctacctttgtgatacctgcaccacactttgggcctttctggatatcttccct

SEQ ID NO: 104052 - DNA, 2753 bp, Homo sapiens
  Payload ID: 458
  Gene Symbol: ASCC2
  Gene Name: activating signal cointegrator 1 complex subunit 2
  ENST ID: ENST00000458594
  CDS Start-End: 80-193
gccacctcgtgtatgcagagaccatgtgtgtctgatctgctgggatcctagagctggaacaggagggtcacgcagcacaatgccagctctgcccctggaccaactccagatcacccacaaggacccgaagacaggaaagctgaggacttcaccagcgctgatttgtacctgtaactccatgatacaaatttgatttaaatgggagggggtcctgcagacccacatgagaggtggccttgaagaatccttgtggtacccacaggctctacagtttggaaactcgccaccccgagcagaaggcagaccggtattttgtgttatacaaaccgccccctaaagacaacattcccgccctagtggaggagtacctggaacgcgccaccttcgtagccaatgacctcgactggctcctggccttgcctcacgataaattctggtgccaggtgatctttgacgagactctacagaagtgcctggactcctacctgcgctatgtcccccgcaaattcgacgagggggtggcctcagcccctgaggttgttgacatgcagaagcgcctccatcgaagtgtttttctcaccttcctccgcatgtccactcacaaggaatccaaagatcacttcatttccccttctgcgtttggagaaatcctctacaataacttcctctttgacattccaaagatcctggacctctgcgtgctctttggaaaaggcaactcaccactgctccagaagatgataggaaacatctttacacagcagccaagttactacagtgacctggatgaaaccctgcctaccatccttcaggtcttcagcaatatcctccagcactgtggtttgcaaggggacggggccaataccacaccccagaagcttgaggagaggggccgattgacccccagtgacatgcctctcctggaattaaaggacattgttctctacctttgtgatacctgcaccacactttgggcctttctggatatcttccctttggcttgccagaccttccagaagcacgacttttgttacagactagcttccttctacgaagcagcaattcccgaaatggagtctgcaattaagaagaggaggcttgaagatagcaagcttcttggtgacctgtggcagaggctctcccattccaggaagaagctaatggagattttccacatcatcctgaaccagatctgcctccttcccatcctagaaagcagctgtgacaacattcagggcttcatcgaagagttccttcagatcttcagctccttgctgcaggagaagaggttcctccgggactatgatgcactcttccccgtggccgaagacatcagcttgctgcagcaggcctcatcagtcttggacgagacgcggactgcctacatcctccaggcagtcgagagtgcatgggaaggggtggacagacggaaagccacagatgctaaagacccatcggtgattgaggagcctaatggggagcctaacggggtcacggtgacagcagaggcagtcagtcaagcatcatcacatccggagaactcggaggaagaggagtgcatgggagcagccgcggctgtgggccctgccatgtgtggggtggaactggactctctcatctcccaagtgaaggacctgctgccagaccttgagaaatgaaaccagaccctacacccctgctgacgtctcgccacaacgtcttccagaatgacgagtttgatgtgttcagcagggactcagtagacctgagccgggtgcacaagggcaagagcaccaggaaggaggaaaacacgcggagtttgctgaacgacaagcgtgcagtggcggcacagcggcagcgctacgagcagtacagcgtggtggtggaggaggtgccactgcagccaggcgagagcctgccctaccacagtgtctactacgaggatgagtacgatgacacatacgatggcaaccaggtgggcgccaatgatgcagactctgatgacgagctcatcagccgcaggccattcaccatccctcaggtgctgagaaccaaagtgcctagagaagggcaggaggaggatgacgacgatgaggaagacgatgctgacgaggaggctcccaagcccgaccattttgttcaggaccctgcagtgctgagagagaaggcagaagccaggcgcatggcctttctcgccaagaaagggtaccggcatgacagctcaacagcagtggccggcagcccccgaggccatgggcagagccgcgagacaacccaggaacgcaggaagaaggaagccaacaaggcgacaagagccaaccacaaccggagaaccatggccgaccgcaagaggagcaaaggcatgatcccatcctgagacctggtgcagggccagtggggaggcagcggcaccagactcaccaggccgtgctcccatcgcctggggcctcctcactaggggccccaagttcaactcaacccctcaacagcctcagctttgcagcccctgagaaggccgcctctcatctaccagccagccatgagcgccttcctgcagaacacacagtgccttatgccacagccgaagaatccgtggggccggcaagcaggcaccttcccccagctgcgctagcgggaaagagatggggatggagtcccaaggcaagcgccccaaacctcgggccacaagacaccacttcccctttaccctggacagcaggaaacctgtatattcaaaaacacaaaaagtcctgctaataaaatttttgaccctt

SEQ ID NO: 104053 - DNA, 469 bp, Homo sapiens
  Payload ID: 458
  Gene Symbol: ASCC2
  Gene Name: activating signal cointegrator 1 complex subunit 2
  ENST ID: ENST00000454854
  CDS Start-End: 178-291
agtttgaccccggaagtgcgggcgctcagggagctgtcaccgtggtcggcggcggcggcggcggcggcggcacagagccggtggtggagccgccgaggttatcatcatctctttctggtcatgtctgtctcatacttaaatgactcctcactgccttcaggagggtcacgcagcacaatgccagctctgcccctggaccaactccagatcacccacaaggacccgaagacaggaaagctgaggacttcaccagcgctgatttgtacctgtaactccatgatacaaatttgatttaaatgggagggggtcctgcagacccacatgagaggtggccttgaagaatccttgtggtacccacaggctctacagtttggaaactcgccaccccgagcagaaggcagaccggtattttgtgttatacaaaccgccccctaaagacaacattcccgccctagtggaggagtacctg

SEQ ID NO: 104054 - DNA, 529 bp, Homo sapiens
  Payload ID: 458
  Gene Symbol: ASCC2
  Gene Name: activating signal cointegrator 1 complex subunit 2
  ENST ID: ENST00000453160
  CDS Start-End: 1-163
aagtgcgggcgctcagggagctgtcaccgtggtcggcggcggcggcggcggcggcggcacagagccggtggtggagccgccgaggccacctcgtgtatgcagagaccatgtgtgtctgatctgctgggatcctagagctggaacaggccaagtgatattgtgaaaagaacactggacagcaagacaggagaccttggatctgccactcactgactgtgagcaccccgagcagaaggcagaccggtattttgtgttatacaaaccgccccctaaagacaacattcccgccctagtggaggagtacctggaacgcgccaccttcgtagccaatgacctcgactggctcctggccttgcctcacgataaattctggtgccaggtgatctttgacgagactctacagaagtgcctggactcctacctgcgctatgtcccccgcaaattcgacgagggggtggcctcagcccctgaggttgttgacatgcagaagcgcctccatcgaagtgtttttctcaccttcctccgcatg

SEQ ID NO: 104055 - DNA, 873 bp, Homo sapiens
  Payload ID: 458
  Gene Symbol: ASCC2
  Gene Name: activating signal cointegrator 1 complex subunit 2
  ENST ID: ENST00000431535
  CDS Start-End: 154-873
gccacctcgtgtatgcagagaccatgtgtgtctgatctgctgggatcctagagctggaacaggccaagtgatattgtgaaaagaacactggacagcaagacaggagaccttggatctgccactcactgactgtgaggagggtcacgcagcacaatgccagctctgcccctggaccaactccagatcacccacaaggacccgaagacaggaaagctgaggacttcaccagcgctgcaccccgagcagaaggcagaccggtattttgtgttatacaaaccgccccctaaagacaacattcccgccctagtggaggagtacctggaacgcgccaccttcgtagccaatgacctcgactggctcctggccttgcctcacgataaattctggtgccaggtgatctttgacgagactctacagaagtgcctggactcctacctgcgctatgtcccccgcaaattcgacgagggggtggcctcagcccctgaggttgttgacatgcagaagcgcctccatcgaagtgtttttctcaccttcctccgcatgtccactcacaaggaatccaaagatcacttcatttccccttctgcgtttggagaaatcctctacaataacttcctctttgacattccaaagatcctggacctctgcgtgctctttggaaaaggcaactcaccactgctccagaagatgataggaaacatctttacacagcagccaagttactacagtgacctggatgaaaccctgcctaccatccttcaggtcttcagcaatatcctccagcactgtggtttgcaaggggacggggccaataccacaccccagaagcttgaggagaggggccgattgacccccagtgacatgcctctcctg

SEQ ID NO: 104056 - DNA, 261 bp, Homo sapiens
  Payload ID: 458
  Gene Symbol: ASCC2
  Gene Name: activating signal cointegrator 1 complex subunit 2
  ENST ID: ENST00000411532
  CDS Start-End: 1-261
tcctggcctgcctggagtactaccactacgacccagagcagagaaatgaaaccagaccctacacccctgctgacgtctcgccacaacgtcttccagaatgacgagtttgatgtgttcagcagggactcagtagacctgagccgggtgcacaagggcaagagcaccaggaaggaggaaaacacgcggagtttgctgaacgacaagcgtgcagtggcggcacagcggcagcgctacgagcagtacagcgtggtggtggaggag

SEQ ID NO: 104057 - DNA, 2594 bp, Homo sapiens
  Payload ID: 458
  Gene Symbol: ASCC2
  Gene Name: activating signal cointegrator 1 complex subunit 2
  Uniprot ID: Q9H1I8
  ENST ID: ENST00000542393
  CDS Start-End: 145-2190
gagacttcctgtctgctcctgcggaatcgcagtttgaccccggaagtgcgggcgctcagggagctgtcaccgtggtcggcggcggcggcggcggcggcggcacagagccggtggtggagccgccgaggagggtcacgcagcacaatgccagctctgcccctggaccaactccagatcacccacaaggacccgaagacaggaaagctgaggacttcaccagcgctggtgatctttgacgagactctacagaagtgcctggactcctacctgcgctatgtcccccgcaaattcgacgagggggtggcctcagcccctgaggttgttgacatgcagaagcgcctccatcgaagtgtttttctcaccttcctccgcatgtccactcacaaggaatccaaaatcctggacctctgcgtgctctttggaaaaggcaactcaccactgctccagaagatgataggaaacatctttacacagcagccaagttactacagtgacctggatgaaaccctgcctaccatccttcaggtcttcagcaatatcctccagcactgtggtttgcaaggggacggggccaataccacaccccagaagcttgaggagaggggccgattgacccccagtgacatgcctctcctggaattaaaggacattgttctctacctttgtgatacctgcaccacactttgggcctttctggatatcttccctttggcttgccagaccttccagaagcacgacttttgttacagactagcttccttctacgaagcagcaattcccgaaatggagtctgcaattaagaagaggaggcttgaagatagcaagcttcttggtgacctgtggcagaggctctcccattccaggaagaagctaatggagattttccacatcatcctgaaccagatctgcctccttcccatcctagaaagcagctgtgacaacattcagggcttcatcgaagagttccttcagatcttcagctccttgctgcaggagaagaggttcctccgggactatgatgcactcttccccgtggccgaagacatcagcttgctgcagcaggcctcatcagtcttggacgagacgcggactgcctacatcctccaggcagtcgagagtgcatgggaaggggtggacagacggaaagccacagatgctaaagacccatcggtgattgaggagcctaatggggagcctaacggggtcacggtgacagcagaggcagtcagtcaagcatcatcacatccggagaactcggaggaagaggagtgcatgggagcagccgcggctgtgggccctgccatgtgtggggtggaactggactctctcatctcccaagtgaaggacctgctgccagaccttggtgagggcttcatcctggcctgcctggagtactaccactacgacccagagcaggtgatcaacaatatcctggaggagcggctggcccccaccctcagccagctggaccgcaacctagacagagaaatgaaaccagaccctacacccctgctgacgtctcgccacaacgtcttccagaatgacgagtttgatgtgttcagcagggactcagtagacctgagccgggtgcacaagggcaagagcaccaggaaggaggaaaacacgcggagtttgctgaacgacaagcgtgcagtggcggcacagcggcagcgctacgagcagtacagcgtggtggtggaggaggtgccactgcagccaggcgagagcctgccctaccacagtgtctactacgaggatgagtacgatgacacatacgatggcaaccaggtgggcgccaatgatgcagactctgatgacgagctcatcagccgcaggccattcaccatccctcaggtgctgagaaccaaagtgcctagagaagggcaggaggaggatgacgacgatgaggaagacgatgctgacgaggaggctcccaagcccgaccattttgttcaggaccctgcagtgctgagagagaaggcagaagccaggcgcatggcctttctcgccaagaaagggtaccggcatgacagctcaacagcagtggccggcagcccccgaggccatgggcagagccgcgagacaacccaggaacgcaggaagaaggaagccaacaaggcgacaagagccaaccacaaccggagaaccatggccgaccgcaagaggagcaaaggcatgatcccatcctgagacctggtgcagggccagtggggaggcagcggcaccagactcaccaggccgtgctcccatcgcctggggcctcctcactaggggccccaagttcaactcaacccctcaacagcctcagctttgcagcccctgagaaggccgcctctcatctaccagccagccatgagcgccttcctgcagaacacacagtgccttatgccacagccgaagaatccgtggggccggcaagcaggcaccttcccccagctgcgctagcgggaaagagatggggatggagtcccaaggcaagcgccccaaacctcgggccacaagacaccacttcccctttaccctggacagcaggaaacctgtatattcaaaaacacaaaaagtcctgctaataaaatttttgaccctttcaaacg

SEQ ID NO: 104058 - DNA, 3618 bp, Homo sapiens
  Payload ID: 459
  Gene Symbol: ASCC3
  Gene Name: activating signal cointegrator 1 complex subunit 3
  ENST ID: ENST00000324696
  CDS Start-End: 354-500
ggcgctgcagcggggcggtgacgtgtaggccggcgccagctccactctgtccctcctcgccgggtctgtgcgtctttgcgtctgtctgtctgactgatggtcctcacacgcggttccctgtgactgggcgcgaccccggcaagcgcggcttggagggcggacggggcgcggcgatacagctgcccgctcgcatctttggccctgcgctcagctcctcacccggcgtgggaagttaaagtaaaaccgaaagggaagaaggcgcggtggcaggagctgacagagtgatgggaaacgcgtgagccaggccgagagtttcaggtttcttgctgtatggatcactgattgaataatagatggctttacctcgtctcacaggagccttgcgttccttttcaaatgtcaccaagcaagataattataatgaagaagtggctgacttaaagttggaactgataatgggagagaagcaattgaaagtggggctgcatttctcttcatgacatttcacttgaaggactctgttggtcacaaggaaacaaaggctatcaaacagatgtttggcccctttccttcatcatctgccactgcagcttgtaatgctactaatcgaattatttctcattttagtcaagatgatcttactgctcttgtgcagatgacagaaaaagaacatggcgatagggttttttttggtaaaaatttagcattttcatttgacatgcatgatttggaccactttgacgaactgccaataaatggtgaaactcagaaaactataagcctagattataagaagtttctgaatgaacatctccaggaggcttgcaccccagaactcaagcctgtggaaaaaacaaatggctcctttttgtggtgtgaagttgaaaagtacctaaattcaactttgaaggaaatgactgaagtgccaagagtagaagatctttgctgtactttatatgatatgcttgcttctattaaaagtggtgatgaacttcaggatgagctatttgaactgctgggacctgaaggacttgaacttattgagaaactcctccagaacagaattacaattgtggatagatttcttaattcttcaaatgatcataggtttcaggctcttcaagacaattgtaaaaaaattttaggagaaaatgctaaacccaattatggttgtcaagtcactattcagtctgaacaagaaaagcagttaatgaaacaatatcgacgtgaagaaaaaagaattgccagacgagaaaaaaaggctggagaagatttagaagtttcagaaggacttatgtgctttgatcctaaggaattgcggatacaaagagaacaggcacttctgaatgctagaagtgttccaattctgagcaggcagagagatgcagacgttgaaaaaatacattatccccatgtgtatgattcccaggctgaagccatgaaaacatcagcatttattgctggtgcaaagatgattttgccagaaggaatccaaagagagaataacaagctttatgaagaagtaaggattccctacagcgaaccaatgccactcagctttgaggaaaagccagtttatatccaagacttagatgagatcggacagctggcttttaaaggaatgaagagactcaatagaatccagtcaatagtgtttgagactgcctacaacaccaatgagaacatgctgatttgtgcccctacaggagctggaaaaaccaacattgcaatgctgacagtcttgcatgaaattcgccaacattttcaacaaggtgttatcaaaaagaatgaatttaagattgtatatgttgctccaatgaaagccttggcagctgaaatgacagattacttcagcagacgtctagagccactaggcatcattgtgaaagaattgactggtgacatgcagttgtccaaaagtgaaattttacgaactcagatgcttgtgaccacaccagaaaaatgggatgtagtgacaagaaagagtgttggggatgtagctctttcccagattgtaaggctccttattcttgatgaagttcatttgctgcatgaagatagaggaccagtattagaaagcatagttgcccgtactttacggcaggtggaatccacacagagtatgataaggattctcggactgtctgcaactttacctaactacctcgatgttgccacatttttacatgttaatccatacattggacttttcttctttgatggccgttttcgaccagtacctcttggacagacatttttggggattaaatgtgcaaataagatgcagcagttgaataacatggatgaagtatgttatgaaaatgttttgaagcaagtaaaggctggacaccaggtgatggtgtttgtacatgctcgaaatgccactgtaagaacagctatgtctctaatagaaagagcaaaaaattgtggccatattcccttcttttttcctacccaaggacatgactatgtacttgcagaaaaacaggtacaaaggtcgagaaataagcaagtacgagaattattcccagatggttttagtattcatcatgcaggaatgcttcggcaggacagaaatttagttgaaaacttgttttctaatgggcatatcaaagtcctagtgtgtacagctacgttagcctggggtgtcaatcttcccgcccatgctgttattattaagggaacacaaatatatgctgcaaaaagaggctcctttgttgaccttggaattttagatgtcatgcagatatttggtcgagctggacgaccacaatttgacaaatttggggaaggaataattataacaacgcatgataaactcagccattacctcactttgctcactcaacgaaacccaattgagagtcagtttctggaaagccttgcagataacctaaatgcagagattgctctgggaacagttactaatgtggaagaagcagtgaagtggataagttacacttatctttatgtacggatgagagcaaatccattagcatatggcatcagtcacaaggcttatcagattgacccaacattaagaaagcatcgagaacagttggtcattgaagttggacgaaaactagacaaagctcagatgattcgttttgaggagcgaactggatatttttcctcaactgatttgggtagaactgccagccattactatattaaatacaacaccattgagacctttaatgaactctttgatgctcacaaaacagaaggtgatatctttgccatagtctccaaagctgaagaatttgatcaaattaaggtcagagaagaggaaatagaggagttagataccttattaagcaatttttgtgaactctccactcctggaggtgtagagaatagttatgggaaaataaacatcttacttcaaacttatatcagccgaggagaaatggacagtttctcccttatatcagattctgcatatgttgcacagaatgcagctagaattgtccgtgctctttttgaaattgctctgaggaaacgttggcctaccatgacctacaggctcctgaatcttagtaaagtcattgacaagaggctttggggttgggctagccctttgagacaattttcaatcctaccaccacacatcctaac

SEQ ID NO: 104059 - DNA, 852 bp, Homo sapiens
  Payload ID: 459
  Gene Symbol: ASCC3
  Gene Name: activating signal cointegrator 1 complex subunit 3
  ENST ID: ENST00000324723
  CDS Start-End: 324-852
gtaggccggcgccagctccactctgtccctcctcgccgggtctgtgcgtctttgcgtctgtctgtctgactgatggtcctcacacgcggttccctgtgactgggcgcgaccccggcaagcgcggcttggagggcggacggggcgcggcgatacagctgcccgctcgcatctttggccctgcgctcagctcctcacccggcgtgggaagttaaagtaaaaccgaaagggaagaaggcgcggtggcaggagctgacagagtgatgggaaacgcgtgagccaggccgagaggtttcttgctgtatggatcactgattgaataatagatggctttacctcgtctcacaggagccttgcgttccttttcaaatgtcaccaagcaagataattataatgaagaagtggctgacttaaagataaagcgatctaaacttcatgaacaagttttagatttgggcctgacatggaagaagataataaaatttttgaatgaaaaactggagaagagtaaaatgcaaagtataaatgaagacttaaaagatatattacatgctgcaaagcagatagttggaactgataatgggagagaagcaattgaaagtggggctgcatttctcttcatgacatttcacttgaaggactctgttggtcacaaggaaacaaaggctatcaaacagatgtttggcccctttccttcatcatctgccactgcagcttgtaatgctactaatcgaattatttctcattttagtcaagatgatcttactgctcttgtgcagatgacagaaaaagaacatggcgatagggttttttttggtaaaaatttagcattttcatttgacatgcatgatttgg

SEQ ID NO: 104060 - DNA, 3433 bp, Homo sapiens
  Payload ID: 459
  Gene Symbol: ASCC3
  Gene Name: activating signal cointegrator 1 complex subunit 3
  Uniprot ID: Q8N3C0
  ENST ID: ENST00000369143
  CDS Start-End: 293-628
gggtctgtgcgtctttgcgtctgtctgtctgactgatggtcctcacacgcggttccctgtgactgggcgcgaccccggcaagcgcggcttggagggcggacggggcgcggcgatacagctgcccgctcgcatctttggccctgcgctcagctcctcacccggcgtgggaagttaaagtaaaaccgaaagggaagaaggcgcggtggcaggagctgacagagtgatgggaaacgcgtgagccaggccgagagtttcaggtttcttgctgtatggatcactgattgaataatagatggctttacctcgtctcacaggagccttgcgttccttttcaaatgtcaccaagcaagataattataatgaagaagtggctgacttaaagataaagcgatctaaacttcatgaacaagttttagatttgggcctgacatggaagaagataataaaatttttgaatgaaaaactggagaagagtaaaatgcaaagtataaatgaagacttaaaagatatattacatgctgcaaagcagatagaagtgaattgtccattccagaagaggaggctggatggaaaagaggaggatgagaagatgagcagagcttctgacagattcagaggactaagatgacaaaaatgactaaaatggacaaaagaagaaatagaaaatctgaatatttgactattaaaggaatttaatctgtaattaaaaaccttaagtacaaagaaatctatatgctatgatggctttaatggagaatgtcataatgtcatttaaaaaggtatgagagtactattgtagattaaaagaggttaaaggcatataataatcaaaatgtaatgtatgatccttgattgactcttgaatcagaaaaaaattacgtatttttggggccgttggagaaatctgaatatgggctggacatcattaggtaatattagatctcaggtgtgataatgttgtggctatgtaagaggatatcctaaatctcaggagaagcatactgcagtatatatagtggtatctcatgaagattaaaatgtactgtcaaatgtgtcagcaaaagaaatacacatgatgtgtgtgtgtgatcaagtgtttataatgagtggattaataaatatgagaagatagggtgatttgttgtaaagtaataaaggtttaaaaattacatgattcagtagagaaaaagcattttatgaatatctaacattacttatgataaaaaatctcagcaaactaggaatagaaggggattttgttaatctgataagctgtagctataaaaaacttggagaaaacatacttaatgctacaaagttagaagcttccctgaggtacggaattagacacaaatgcctgttaccacttctgtttctcactgtattaaaaatccttgctaacataatatggcaagaaaaagtaagggcataaagactggaaaaaaaaacttttccatttttcacatgactgtacctgtagaaaatgaatttaacaaggttaatataaaaatcaattttatttctacttactagaagcacattaaaaattacacttatctttatgtaacgtaatacattttaccttaaattttaaaattttaatttattttacgtttacaaaagcatcataaacatcaaatacgtaggagtaaatttaacaaaaaataagcaagacttcatggaaaactaaaatattgagagaatttaaagaagatctaaataaacagagggatataccaagaattggaagactcactattataatgatatattttttacccaaattgatctgtagattcagtgctatcccaggcacagtcttatgtttgagggtgtgtgtgtgtgtgtgtgtgtatgtgtgcatgtgtgtgtgtggaaattgacaagggtaatatgaaagttatatggaaattcaaaggcaaagagcagcctggttaactttgaaaaataaaaagggagaacttactctagtagatcttaaaacttattataaagataagtatacagtgtggtgttggtccaagaataggcaaatggactagtatgacagaatatagcccagaaacaaacctacggatagaaatatacttgatttataatgaaggccaaacaatagtgagacaaggctattttttcagtatatggtgctgggtcaactgcatatacagatgaaaaaaagtacctattttacaaataattttaaacagcctacagaattaagcatgatacacaaaacaatacatcttctaaaagatgtaaaagagtgtcttcaggatctttgtatgtgcgaaaatttatcaaacagagaacaaaaagtacaaagggaatgattaagttggactgtagtaaaattaataccttctatttattaagagtaaaaaggcaaaacatggagtgggagaatatagcttcaagatatataaccaaaaagagagcttttatccaggttaaatacgagctcctacaaatcaataaggaaaggacagataatcctatatgaacatgagtaagagctttgaacaaggacttcacaagagatagttgaccagtaaacatgaaaagggcttcagcttcattggtagtcaaggatatgccactgcatgcccattagaatggttaaaatgtaaaagactgacatacctattgttaggatcaagaatgtgaactagaatttttgtctactgctgctagagtttacaattggtacaaccactttgagtaactgtttgacagtgtctactattacctactgtggttggacaagtgaaattttaaatcttaggacataaatatccaataaaaatgcttgtacatacatgtatatcaaaaataggtgcattcattgcaacattatttgtgatagccttaatgtagaaacaacccagttcattgttaaaaagcttaagttgtagtatgtagactgccttatagcagtaacggattacagctatgtataacattgtaagtgaatcttataatgttgacaaaagaagccatacaacacatattatgattccattaatatgaaactgaaaactaggcatgaccagtctctggttttagaagtcaggatagtggctgcttttgaggaaggaggtagtgactaggagtgaatatgagggaggtttctggggagctgataatgttctgattcttgaagtagttaaccagattacacaggtgtgttcgttttttgataattctttgaactgtatgtgtactgtatattttcttgttatattcaataaaaagaattactatgatttttatattacatagattaaataagaagtatttcagattgataagtaacacatgcttgtgtatttatttagcttaaggtttggctatcatggtgagaactcctatgtaccctgctcaggtcctggtaaacagtatcataagtataataaattggtgtttttcattctca

SEQ ID NO: 104061 - DNA, 8146 bp, Homo sapiens
  Payload ID: 459
  Gene Symbol: ASCC3
  Gene Name: activating signal cointegrator 1 complex subunit 3
  Uniprot ID: Q8N3C0
  ENST ID: ENST00000369162
  CDS Start-End: 346-6954
agcggggcggtgacgtgtaggccggcgccagctccactctgtccctcctcgccgggtctgtgcgtctttgcgtctgtctgtctgactgatggtcctcacacgcggttccctgtgactgggcgcgaccccggcaagcgcggcttggagggcggacggggcgcggcgatacagctgcccgctcgcatctttggccctgcgctcagctcctcacccggcgtgggaagttaaagtaaaaccgaaagggaagaaggcgcggtggcaggagctgacagagtgatgggaaacgcgtgagccaggccgagagtttcaggtttcttgctgtatggatcactgattgaataatagatggctttacctcgtctcacaggagccttgcgttccttttcaaatgtcaccaagcaagataattataatgaagaagtggctgacttaaagataaagcgatctaaacttcatgaacaagttttagatttgggcctgacatggaagaagataataaaatttttgaatgaaaaactggagaagagtaaaatgcaaagtataaatgaagacttaaaagatatattacatgctgcaaagcagatagttggaactgataatgggagagaagcaattgaaagtggggctgcatttctcttcatgacatttcacttgaaggactctgttggtcacaaggaaacaaaggctatcaaacagatgtttggcccctttccttcatcatctgccactgcagcttgtaatgctactaatcgaattatttctcattttagtcaagatgatcttactgctcttgtgcagatgacagaaaaagaacatggcgatagggttttttttggtaaaaatttagcattttcatttgacatgcatgatttggaccactttgacgaactgccaataaatggtgaaactcagaaaactataagcctagattataagaagtttctgaatgaacatctccaggaggcttgcaccccagaactcaagcctgtggaaaaaacaaatggctcctttttgtggtgtgaagttgaaaagtacctaaattcaactttgaaggaaatgactgaagtgccaagagtagaagatctttgctgtactttatatgatatgcttgcttctattaaaagtggtgatgaacttcaggatgagctatttgaactgctgggacctgaaggacttgaacttattgagaaactcctccagaacagaattacaattgtggatagatttcttaattcttcaaatgatcataggtttcaggctcttcaagacaattgtaaaaaaattttaggagaaaatgctaaacccaattatggttgtcaagtcactattcagtctgaacaagaaaagcagttaatgaaacaatatcgacgtgaagaaaaaagaattgccagacgagaaaaaaaggctggagaagatttagaagtttcagaaggacttatgtgctttgatcctaaggaattgcggatacaaagagaacaggcacttctgaatgctagaagtgttccaattctgagcaggcagagagatgcagacgttgaaaaaatacattatccccatgtgtatgattcccaggctgaagccatgaaaacatcagcatttattgctggtgcaaagatgattttgccagaaggaatccaaagagagaataacaagctttatgaagaagtaaggattccctacagcgaaccaatgccactcagctttgaggaaaagccagtttatatccaagacttagatgagatcggacagctggcttttaaaggaatgaagagactcaatagaatccagtcaatagtgtttgagactgcctacaacaccaatgagaacatgctgatttgtgcccctacaggagctggaaaaaccaacattgcaatgctgacagtcttgcatgaaattcgccaacattttcaacaaggtgttatcaaaaagaatgaatttaagattgtatatgttgctccaatgaaagccttggcagctgaaatgacagattacttcagcagacgtctagagccactaggcatcattgtgaaagaattgactggtgacatgcagttgtccaaaagtgaaattttacgaactcagatgcttgtgaccacaccagaaaaatgggatgtagtgacaagaaagagtgttggggatgtagctctttcccagattgtaaggctccttattcttgatgaagttcatttgctgcatgaagatagaggaccagtattagaaagcatagttgcccgtactttacggcaggtggaatccacacagagtatgataaggattctcggactgtctgcaactttacctaactacctcgatgttgccacatttttacatgttaatccatacattggacttttcttctttgatggccgttttcgaccagtacctcttggacagacatttttggggattaaatgtgcaaataagatgcagcagttgaataacatggatgaagtatgttatgaaaatgttttgaagcaagtaaaggctggacaccaggtgatggtgtttgtacatgctcgaaatgccactgtaagaacagctatgtctctaatagaaagagcaaaaaattgtggccatattcccttcttttttcctacccaaggacatgactatgtacttgcagaaaaacaggtacaaaggtcgagaaataagcaagtacgagaattattcccagatggttttagtattcatcatgcaggaatgcttcggcaggacagaaatttagttgaaaacttgttttctaatgggcatatcaaagtcctagtgtgtacagctacgttagcctggggtgtcaatcttcccgcccatgctgttattattaagggaacacaaatatatgctgcaaaaagaggctcctttgttgaccttggaattttagatgtcatgcagatatttggtcgagctggacgaccacaatttgacaaatttggggaaggaataattataacaacgcatgataaactcagccattacctcactttgctcactcaacgaaacccaattgagagtcagtttctggaaagccttgcagataacctaaatgcagagattgctctgggaacagttactaatgtggaagaagcagtgaagtggataagttacacttatctttatgtacggatgagagcaaatccattagcatatggcatcagtcacaaggcttatcagattgacccaacattaagaaagcatcgagaacagttggtcattgaagttggacgaaaactagacaaagctcagatgattcgttttgaggagcgaactggatatttttcctcaactgatttgggtagaactgccagccattactatattaaatacaacaccattgagacctttaatgaactctttgatgctcacaaaacagaaggtgatatctttgccatagtctccaaagctgaagaatttgatcaaattaaggtcagagaagaggaaatagaggagttagataccttattaagcaatttttgtgaactctccactcctggaggtgtagagaatagttatgggaaaataaacatcttacttcaaacttatatcagccgaggagaaatggacagtttctcccttatatcagattctgcatatgttgcacagaatgcagctagaattgtccgtgctctttttgaaattgctctgaggaaacgttggcctaccatgacctacaggctcctgaatcttagtaaagtcattgacaagaggctttggggttgggctagccctttgagacaattttcaatcctaccaccacacatcctaacaagattagaagaaaaaaagcttactgtggataagctgaaagacatgaggaaagatgaaataggtcacattttacatcatgtgaatattggactgaaggtcaaacaatgtgttcatcagattccttctgttatgatggaagcatccattcagcctatcacaaggactgtcctccgagtgacactcagcatctatgctgatttcacttggaatgatcaggtacatgggacagtaggagaaccttggtggatttgggtagaagatcctacaaatgatcatatttatcattcagagtattttctagctctaaaaaaacaagtcattagtaaagaagcccaactactggtatttacaatccctatttttgagcctttgccttcccaatactacatccgagcagtgtctgatagatggttgggtgctgaggcagtatgtattatcaactttcaacatctaattctaccagagagacatcctcctcatacagaattactggatcttcagcctttaccaatcacagctttgggatgtaaagcatatgaagccctgtacaacttcagccactttaaccctgtacagacacaaatatttcatacattgtatcacacggattgtaatgtcctacttggagcacctactggatcgggaaagactgttgcagctgaattagccattttcagagtcttcaacaaataccctacttcaaaggcggtatatattgcacccctaaaagccctagtacgtgaaagaatggatgattggaaagttagaatagaagaaaaacttggtaaaaaagttattgaactaacaggggatgtgactcctgatatgaaatccattgccaaggctgaccttatcgtcactacgccagagaagtgggatggagtcagcagaagctggcaaaataggaactatgttcagcaagtcactattctcatcatagatgagatccatctgcttggggaggaaagaggccctgttctagaggtcattgtatctcgaacaaattttatctcatcacacacagaaaagcctgttagaatagttggactatctactgcattagctaatgccagagaccttgctgattggctcaatattaagcagatgggcttgtttaacttccgaccatcagtacgcccagttccactggaagttcacattcaaggctttccaggtcaacattactgtcctcgtatggctagtatgaacaagcctgcatttcaggcaattagaagccattctccagccaaacctgttttgatatttgtctcatcaagacgtcaaactcgtcttactgctttggaattgatcgccttcctggctactgaagaagatccaaagcagtggttaaacatggatgaaagagagatggagaacatcattgcaacagtaagagattccaacctcaagctgacccttgctttcgggataggaatgcatcatgctggactacatgagagggaccgaaaaacagtagaggaactatttgtaaactgtaaagttcaggttcttattgctacaagcacattagcctggggtgtaaactttccagctcatttagtaattattaagggaacagaatactatgatggaaaaacaagacgttatgtggattttcccattacagatgtcctccagatgatggggcgtgctgggaggccgcagttcgatgaccaaggcaaagctgtaattctagttcatgacataaagaaagacttttataaaaaatttctttatgaacctttcccagtagaatcaagtttattaggagtgctctctgaccacttaaatgcagagattgctggtggtacaattacatctaagcaagatgcattggattatatcacctggacttactttttccgacgtcttatcatgaatcccagctattacaatttgggtgatgtgagccatgattctgtgaacaagtttctgtcccatctgattgagaagtccctgattgaattggaactttcctactgtattgaaattggagaggataatcgcagcattgaacctctaacttatggccgaattgcctcctattactatttgaagcatcaaacagttaaaatgttcaaggaccgcttgaagcctgaatgcagtactgaagaactgctttcaattctaagtgatgcagaagaatatacagatttgccagtgagacacaatgaagatcatatgaatagtgaactggcaaaatgtcttcccattgaatcaaatcctcattcatttgacagccctcacaccaaagcacatctcctgctacaggcacatctcagccgagccatgctaccctgcccagattatgacactgataccaaaacagtcttggaccaagctctcagagtatgtcaggcaatgctggacgtggctgcaaaccagggctggctggtgactgtcctgaatatcaccaacctgattcagatggtgatccagggtcggtggttaaaggactcttctcttcttacactaccaaacatagaaaaccatcatcttcaccttttcaagaaatggaagccgattatgaagggcccacatgctaggggtcggacctccatcgagtcccttcctgaactgatccatgcctgtggagggaaagaccatgtatttagctccatggtagaaagtgagctacatgctgcaaaaacgaaacaggcatggaatttcttatctcacttgccagtgataaatgttggcataagtgttaaaggctcgtgggatgacttagttgaaggacataatgaactctctgtctcaactctgactgcagacaaacgagatgacaacaaatggatcaaattgcatgctgaccaagagtatgtgcttcaagtgagcttgcagagagtccactttgggttccacaagggaaagccagagagctgtgcagttactcctcgatttcccaaatcaaaagacgaaggatggtttttgatattaggagaagtggataagagagaacttattgctttgaaaagagtaggatatattcgaaatcatcatgttgcttccctttctttttatacccctgaaatacctggaaggtatatctacacattatatttcatgagtgactgctaccttggcctggaccagcagtatgacatctatctcaacgttacacaagcgagtctttctgcacaggtcaacaccaaggtctctgattccctgactgacctggcattaaagtaacttgacctgaacaatccatttgaaaggagtggctaagaattctctctgttcagtcatctagacaaatcgaattacttgatgtttgccttgaaagaatcaacttctaacctcaaccatccaggaaattgacagtggctgcagtattgactccagtgacataaagttaaccacagtggccttttaacaaatgttgccttttataatgttatctttatgagtttcttgatatgtaagatgaaaaagcatttagaataatcttttaatttgtgtatatttgggatgatatttaggagctatcaatcaaattttacatctcacaatgtactgtttacatggatattggctgctttttttaaggaaaaccacattgagatgtgacaagtgttaggacttgtcacagatttctaactctgccgcataaactataaatctgtaaggtggtacacagcgtgtcttgttagcaaaatttatactttgatatgatcacatgtagaagtagcttcaagaatttcttgtagtcataaatgtttaataatatatgatgtaaaattatattatggagcctaatgatgataacaaagaaaacaatatactgatcttagaaaatgtagacatggttaactgggaaataaaatatagagtggcacttcaagacaagctgactcaatgttttcttctgcttcctttaaataatatccccttactcatctgttcttcttttctttcccttctacttcaaggctttatttctattatctttctgacatatttatttacagaagtagagaagtataatctaattcatgttgtagcacttacagatcatatagtacaattatttgtctttatgctctccaggaaaaatctgagacagaaaatttttcacccctatggataggttttcacctgtaataaagaaaatttctctatgtccaaacaaattccttcttgaaaaatactttttcaaactaaaaacttgttaaaattcaatgttcatataatatgcattctagtggaatgaaattctacctttgtgaaataatttcagttttcttagccctaaaatgaattattttaaaacattttccaatgtcattgttacaaatactagaatttaagtgtttctgaaattggaatgtattgcttgtatatatccttttccatgcttaaataaaaaagaagaagaaataaa

SEQ ID NO: 104062 - DNA, 2828 bp, Homo sapiens
  Payload ID: 459
  Gene Symbol: ASCC3
  Gene Name: activating signal cointegrator 1 complex subunit 3
  Uniprot ID: Q8N3C0
  ENST ID: ENST00000522650
  CDS Start-End: 346-2541
agcggggcggtgacgtgtaggccggcgccagctccactctgtccctcctcgccgggtctgtgcgtctttgcgtctgtctgtctgactgatggtcctcacacgcggttccctgtgactgggcgcgaccccggcaagcgcggcttggagggcggacggggcgcggcgatacagctgcccgctcgcatctttggccctgcgctcagctcctcacccggcgtgggaagttaaagtaaaaccgaaagggaagaaggcgcggtggcaggagctgacagagtgatgggaaacgcgtgagccaggccgagagtttcaggtttcttgctgtatggatcactgattgaataatagatggctttacctcgtctcacaggagccttgcgttccttttcaaatgtcaccaagcaagataattataatgaagaagtggctgacttaaagataaagcgatctaaacttcatgaacaagttttagatttgggcctgacatggaagaagataataaaatttttgaatgaaaaactggagaagagtaaaatgcaaagtataaatgaagacttaaaagatatattacatgctgcaaagcagatagttggaactgataatgggagagaagcaattgaaagtggggctgcatttctcttcatgacatttcacttgaaggactctgttggtcacaaggaaacaaaggctatcaaacagatgtttggcccctttccttcatcatctgccactgcagcttgtaatgctactaatcgaattatttctcattttagtcaagatgatcttactgctcttgtgcagatgacagaaaaagaacatggcgatagggttttttttggtaaaaatttagcattttcatttgacatgcatgatttggaccactttgacgaactgccaataaatggtgaaactcagaaaactataagcctagattataagaagtttctgaatgaacatctccaggaggcttgcaccccagaactcaagcctgtggaaaaaacaaatggctcctttttgtggtgtgaagttgaaaagtacctaaattcaactttgaaggaaatgactgaagtgccaagagtagaagatctttgctgtactttatatgatatgcttgcttctattaaaagtggtgatgaacttcaggatgagctatttgaactgctgggacctgaaggacttgaacttattgagaaactcctccagaacagaattacaattgtggatagatttcttaattcttcaaatgatcataggtttcaggctcttcaagacaattgtaaaaaaattttaggagaaaatgctaaacccaattatggttgtcaagtcactattcagtctgaacaagaaaagcagttaatgaaacaatatcgacgtgaagaaaaaagaattgccagacgagaaaaaaaggctggagaagatttagaagtttcagaaggacttatgtgctttgatcctaaggaattgcggatacaaagagaacaggcacttctgaatgctagaagtgttccaattctgagcaggcagagagatgcagacgttgaaaaaatacattatccccatgtgtatgattcccaggctgaagccatgaaaacatcagcatttattgctggtgcaaagatgattttgccagaaggaatccaaagagagaataacaagctttatgaagaagtaaggattccctacagcgaaccaatgccactcagctttgaggaaaagccagtttatatccaagacttagatgagatcggacagctggcttttaaaggaatgaagagactcaatagaatccagtcaatagtgtttgagactgcctacaacaccaatgagaacatgctgatttgtgcccctacaggagctggaaaaaccaacattgcaatgctgacagtcttgcatgaaattcgccaacattttcaacaaggtgttatcaaaaagaatgaatttaagattgtatatgttgctccaatgaaagccttggcagctgaaatgacagattacttcagcagacgtctagagccactaggcatcattgtgaaagaattgactggtgacatgcagttgtccaaaagtgaaattttacgaactcagatgcttgtgaccacaccagaaaaatgggatgtagtgacaagaaagagtgttggggatgtagctctttcccagattgtaaggctccttattcttgatgaagttcatttgctgcatgaagatagaggaccagtattagaaagcatagttgcccgtactttacggcaggtggaatccacacagagtatgataaggattctcggactgtctgcaactttacctaactacctcgatgttgccacatttttacatgttaatccatacattggacttttcttctttgatggccgttttcgaccagtacctcttggacagacatttttggggattaaatgtgcaaataagatgcagcagttgaataacatggatgaagtatgttatgaaaatgttttgaagcaagtaaaggctggacaccaggtacacttattttatctgcttttacacttatttatctgcttttagagagtgcttaatgataaaaattattaatatttacgctcttcagaagaaaatttttctttaattctgaggcaatgactcagaggttctaattcttaataactgctttagcccaatgggtaagtcataaaaatattcatagatattatcatcccagtattgataggtcgtgctattttgtttgccatttttaattttaaatattatattcttactgttttcatgaagcaatatcaattgaaatgtaatatatataataaagttctgtattgtttgatggtgtttagaaa

SEQ ID NO: 104063 - DNA, 2181 bp, Homo sapiens
  Payload ID: 460
  Gene Symbol: ATF1
  Gene Name: activating transcription factor 1
  Uniprot ID: P18846
  ENST ID: ENST00000262053
  CDS Start-End: 23-838
gaggcggcagccacagttgattatggaagattcccacaagagtaccacgtcagagacagcacctcaacctggttcagcagttcagggagctcacatttctcatattgctcaacaggtatcatctttatcagaaagtgaggagtcccaggactcatccgacagcataggctcctcacagaaagcccacgggatcctagcacggcgcccatcttacagaaaaattttgaaagacttatcttctgaagatacacggggcagaaaaggagacggagaaaattctggagtttctgctgctgtcacttctatgtctgttccaactcccatctatcagactagcagcggacagtacattgccattgccccaaatggagccttacagttggcaagtccaggcacagatggagtacagggacttcagacattaaccatgacaaattcaggcagtactcagcaaggtacaactattcttcagtatgcacagacctctgatggacagcagatacttgtgcccagcaatcaggtggtcgtacaaactgcatcaggagatatgcaaacatatcagatccgaactacaccttcagctacttctctgccacaaactgtggtgatgacatctcctgtgactctcacctctcagacaactaagacagatgacccccaattgaaaagagaaataaggttaatgaaaaacagagaagctgctcgagaatgtcgcagaaagaagaaagaatatgtgaaatgcctggaaaaccgagttgcagtcctggaaaatcaaaataaaactctaatagaagagttaaaaactttgaaggatctttattccaataaaagtgtttgattcctaagaaagaaaatatttttgtggacatgcataaaaattaaatggatttcctagtggagttttataaattaaaaggtcaaaactgaagctttttatttaggcttttccaaatcaaggataaatatcttacgcacgatatctagtgacagaggagaaagtggaaaatgacctcaaggaagctacgggcacaactggaagctttgtagaaattaaacatattcaaggagcaagaaatgaactttcagcagtctaaattttctaaataaccaatagttgccaatctaaaatggcagagaagatgaaatttgataaactgaattttttttaaaaatccatttaccctacaggtttgcatttgtttgctgaaatttacctttttttagttatatatatgtgtgtgtgtgtgtgtaatttctgccaataaattctaaattacaaaggtaagagaaaacctagtacattactaaatatataaagtatatgttctgattatgtatacttgttctagtgtcaagtctttttaagtgggtttttaaaagtttgttattggacttgaatggatttttgagactaggttaattatttttgaggtcttatcctaaaaggcatctaaggtacatgaatggagtatggtgattttataacattttttatcagaatggaaaaagaactgtttaaaagtttgatacttttaaatagttggtttttttgcttactctggtaatgattttctacaaatacataataaattgtttttttgagtctatattctgtatgcagttgaatatccattacttattctgctgtgctttaatagaatggaatgtttacaggcccttaaaatattatttttaaaaaaccttctgaagatacataccaaagtttttccaagaagattttataatcaatttaataatgtaaggtttatcagattctataatagtatagttattaaggcaattttatgttagagactattttgtaatgtagtgagtggtacctttataagaaaagtgactgccaatatatttttatagctgatctttataaattctaatgttgagtttttaatgattattttaaatgtttatatagtttagtaaaatttgcatctcaaagtatcatttttatattatgggacgttttcagattggctaatatttgcattgtaaattttgtatgcagtttatctaaaattcaaaaatactgtcagtacaccagcgtttaacatctatattccaatttgtatacagtttaaaattgtactgcaaaactattgtgtgctcttacacagtatgcatcatattgttgtctgtgaaattaaaggacatttgatagtc

SEQ ID NO: 104064 - DNA, 568 bp, Homo sapiens
  Payload ID: 460
  Gene Symbol: ATF1
  Gene Name: activating transcription factor 1
  ENST ID: ENST00000549612
  CDS Start-End: 237-470
aggcttgtgtagatcatgccgccagtagcggccctgactgccgaggaaacggtagcttaggacagttggctgttaagtgacactgattctccccgccccgcctgacccccgagaaggaggcttgtcccccgctgcgtgagggggtggggaagtgggtagtgaattcggatctacctgggaggggggagtggaagttcccgccccggagagcggcgaggcggcagccacagttgattatggaagattcccacaagagtaccacgtcagagacagcacctcaacctggttcagcagttcagggagctcacatttctcatattgctcaacagggtctcactctgtcacccagactggtgtgcagtagtgtgaacatagctcactgcagccttgacctcctgtgctcaagcaatcctcctgcctcagctccccaagtagcagggaccacaggtatcatctttatcagaaagtgaggagtcccaggactcatccgacagcataggctcctcacagaaagcccacgggatcctagcacggcgcccatcttacagaaaaattttgaaagacttat

SEQ ID NO: 104065 - DNA, 549 bp, Homo sapiens
  Payload ID: 460
  Gene Symbol: ATF1
  Gene Name: activating transcription factor 1
  ENST ID: ENST00000552510
  CDS Start-End: 39-549
cagggccggcgtcggtcaaggtcaattggcagttgattatggaagattcccacaagagtaccacgtcagagacagcacctcaacctggttcagcagttcagggagctcacatttctcatattgctcaacaggtatcatctttatcagaaagtgaggagtcccaggactcatccgacagcataggctcctcacagaaagcccacgggatcctagcacggcgcccatcttacagaaaaattttgaaagacttatcttctgaagatacacggggcagaaaaggagacggagaaaattctggagtttctgctgctgtcacttctatgtctgttccaactcccatctatcagactagcagcggacagtacattgccattgccccaaatggagccttacagttggcaagtccaggcacagatggagtacagggacttcagacattaaccatgacaaattcaggcagtactcagcaaggtacaactattcttcagtatgcacagacctctgatggacagcagatacttgtgcccagcaatcaggtggtcgtacaaa

SEQ ID NO: 104066 - DNA, 745 bp, Homo sapiens
  Payload ID: 460
  Gene Symbol: ATF1
  Gene Name: activating transcription factor 1
  ENST ID: ENST00000552487
  CDS Start-End: 146-745
cccttccagtcgtgcgtctcctcctttccctcgcccccaaataaaagtaaagcccgaaaccgcccgccgcggggtggctttcgcctcagaagccgccctttgcagtcgcaggcgctagctctccgtgggaggtctcgagttgattatggaagattcccacaagagtaccacgtcagagacagcacctcaacctggttcagcagttcagggagctcacatttctcatattgctcaacaggtatcatctttatcagaaagtgaggagtcccaggactcatccgacagcataggctcctcacagaaagcccacgggatcctagcacggcgcccatcttacagaaaaattttgaaagacttatcttctgaagatacacggggcagaaaaggagacggagaaaattctggagtttctgctgctgtcacttctatgtctgttccaactcccatctatcagactagcagcggacagtacattgccattgccccaaatggagccttacagttggcaagtccaggcacagatggagtacagggacttcagacattaaccatgacaaattcaggcagtactcagcaaggtacaactattcttcagtatgcacagacctctgatggacagcagatacttgtgcccagcaatcaggtggtcgtacaaactgcatcaggagatatgcaaacatatcagatccgaactacaccttcagctacttctctgccacaaactgtggtgatgacatctcctgtg

SEQ ID NO: 104067 - DNA, 970 bp, Homo sapiens
  Payload ID: 460
  Gene Symbol: ATF1
  Gene Name: activating transcription factor 1
  ENST ID: ENST00000551831
  CDS Start-End: 159-326
tccgcgcctcggtgcagagctgcgctgcgcccttccagtcgtgcgtctcctcctttccctcgcccccaaataaaaagacgaggtcttgctacattgtccaggatggagaagtaggaattcttaaggatattgttatggagggaaaaaaatcattgattatggaagattcccacaagagtaccacgtcagagacagcacctcaacctggttcagcagttcagggagctcacatttctcatattgctcaacagttgccattgccccaaatggagccttacagttggcaagtccaggcacagatggagtacagggacttcagacattaaccatgacaaattcaggcagtactcagcaaggtacaactattcttcagtatgcacagacctctgatggacagcagatacttgtgcccagcaatcaggtggtcgtacaaactgcatcaggagatatgcaaacatatcagatccgaactacaccttcagctacttctctgccacaaactgtggtgatgacatctcctgtgactctcacctctcagacaactaagacagatgacccccaattgaaaagagaaataaggttaatgaaaaacagagaagctgctcgagaatgtcgcagaaagaagaaagaatatgtgaaatgcctggaaaaccgagttgcagtcctggaaaatcaaaataaaactctaatagaagagttaaaaactttgaaggatctttattccaataaaagtgtttgattcctaagaaagaaaatatttttgtggacatgcataaaaattaaatggatttcctagtggagttttataaattaaaaggtcaaaactgaagctttttatttaggcttttccaaatcaaggataaatatcttacgcacgatatctagtgacagaggagaaagtggaaaatgacctcaaggaagctacgggcacaactggaagctttgtagaaattaaacatattcaaggagc

SEQ ID NO: 104068 - DNA, 4176 bp, Homo sapiens
  Payload ID: 461
  Gene Symbol: ATF2
  Gene Name: activating transcription factor 2
  Uniprot ID: P15336
  ENST ID: ENST00000264110
  CDS Start-End: 300-1817
gttgtcagtccgatctcgcgagagaggacggaagcctgtgggagcccgtggcctttaaagtgccgttcagccttttcctccaggggtgctttgtaaacacggctgtgctcagggctcgcgggtgaccgaaaggatcatgaactagtgacctggaaagggtactagatggaaacttgagaaaggactgcttattgataacagctaaggtattcctggaagcagagtaaataaagctcatggcccaccagctagaaagtattcttgccatgagaaaaagaatgtgataagttattcaacttatgaaattcaagttacatgtgaattctgccaggcaatacaaggacctgtggaatatgagtgatgacaaaccctttctatgtactgcgcctggatgtggccagcgttttaccaacgaggatcatttggctgtccataaacataaacatgagatgacactgaaatttggtccagcacgtaatgacagtgtcattgtggctgatcagaccccaacaccaacaagattcttgaaaaactgtgaagaagtgggtttgtttaatgagttggcgagtccatttgagaatgaattcaagaaagcttcagaagatgacattaaaaaaatgcctctagatttatcccctcttgcaacacctatcataagaagcaaaattgaggagccttctgttgtagaaacaactcaccaggatagtcctttacctcacccagagtctactaccagtgatgagaaggaagtaccattggcacaaactgcacagcccacatcagctattgttcgtccagcatcattacaggttcccaatgtgctgcttacaagttctgactcaagtgtaattattcagcaggcagtaccttcaccaacctcaagtactgtaatcacccaggcaccatcctctaacaggccaattgtccctgtaccaggcccatttcctcttctgttacatcttcctaatggacaaaccatgcctgttgctattcctgcatcaattacaagttctaatgtgcatgttccagctgcagtcccactcgttcgaccagtcaccatggtgcctagtgttccaggaatcccaggtccttcctctccccaaccagtacagtcagaagcaaaaatgagattaaaagctgctttgacccagcaacatcctccagttaccaatggtgatactgtcaaaggtcatggtagcggattggttaggactcagtcagaggaatctcgaccgcagtcattacaacagccagccacatccactacagaaactccggcttctccagctcacacaactccacagacccaaagtacaagtggtcgtcggagaagagcagctaacgaagatcctgatgaaaaaaggagaaagtttttagagcgaaatagagcagcagcttcaagatgccgacaaaaaaggaaagtctgggttcagtctttagagaagaaagctgaagacttgagttcattaaatggtcagctgcagagtgaagtcaccctgctgagaaatgaagtggcacagctgaaacagcttcttctggctcataaagattgccctgtaaccgccatgcagaagaaatctggctatcatactgctgataaagatgatagttcagaagacatttcagtgccgagtagtccacatacagaagctatacagcatagttcggtcagcacatccaatggagtcagttcaacctccaaggcagaagctgtagccacttcagtcctcacccagatggcggaccagagtacagagcctgctctttcacagatcgttatggctccttcctcccagtcacagccctcaggaagttgattaaaaacctgcagtacaacagttttagatactcattagtgacttcaaagggaaatcaaggaaagaccagtttccatttatgcgaaatctgtggttgtaaattttttttttttacttgaaattaaatttggctctaaagttggtgtagcagcagttgatcagactgaaaaacggtttttagtctctggaaaaagactgattttgctttttttataaatattattagatttattaatttttctgtgctcaatgtgtaaattgtattataattcattgtgatttatttcacttttaatttgctggtgttttaataaatgggggtgttactgaatctttcttcccacttccatttcttttgaccaccccttaaccctcaactgtgacggtagtagtattatcatttataccaaagttttgcatagtccctgttgactttgtaatgttaacggagtcataaaagcactaggcaagagaaagatagaaatttgcttttaatctttttgccttttattttgcacattatgcaaaaggaaaaacattaaagaacacttttttttaagtgagtgaaaacatggtaaagacatacagtgcttttatgcacattgttaagctaaatcaaggtcatttataatcattttccttttttatttaagattttaagtaaacaaattttagaattttcagcatttcaaaaatgattttatttttcaagtcttaaattcaatattttacacctatgttttgaggctaaaaatatgaaattatataatgtatgatacagggttatcaaatatctaataatttttgaaattagctcttgtttttggtttttttgttgttgtttttacagatttcaggttacaaactgcaaagtttatgcataattaagtatggtatggttgccagaaaagcctaaaattactacttagaaaatttaagactgtttacccccattgtcttgtacttgcgagctaacttgtactattcttgtgaaagcactgtcatcttttagtagcaaattttgataatgtttctcgtggaaaaaaaaatcagtatctatctttagaacaatgtaattataatgtgggaagtgtgcatgaatgagagagagtgtgtgtgtatctgtgtgtgtgtgcgcgtgtgtgtgtgtcttttaatagtttatgccagcaatctttgcttgaatgtttaacgatgccttcagtgtgatgctggccaatagatgattgcagtttaaaatgtcattattgtgcaggcttggataactaacattccatgatgtagcttgtttctgatgagatgattgtaggtacatttttctcattatccaatcatctgtgggatacttagttttctaatgtgccattatctatttttattctgcagttatgttcaaaatacagtacatattttaaaatagaataaattgttaaacataaaattttaaaagtagtagatgtgcgtaagaaaactttgtaaaatagttatgagtcctacccagtagcaacttctggcattcaagcaggattccactatgtaaatatctgtaatgcatttataataagttgtgtagtttgtcctgcatccatactacactatttgctaaagtctcagtgccatctcctaatgagactgacattttaaaagtctgtatggaatatccttgataattcaaggaaatatccctcctgcctaagttccaaactgggaaacattcaaattatataaatgacatttcaggactttaagtatgaagataatgggaattttattgttttgctttttaaaatgagagcatttttatttgataattttttttaaatttttaatttttaactaatttcattattttaaagtaatcagtttttcaaatcatgattttgatatcattattctaaggagttatctcaaaggcacaaaatatgaattctgcaagaaggctattttttattgtagtttgaatgggttaggaaaagcctcaatttttcactcttaagtccttcagtacatttttctttcatcttattacttatgcaagttaaggttctttggtaacagaattcttgcaactgtaaaataaaactacatagatgtaagaagtcatgtaaacggttaacaagcttaccaaggttagcaaaactttcattgtaaatcagtctgtactgagcaaataaaaatcattattagttgtataaacacaaattccattttgactttcaggatgtcatactacttctgtacctagcattttcagtccttatatttgcaatgttacacaaactgtactattttcttttatgtgcagtttgcatgagtaaaccatcagagaataaattctatctttaaattatgttcataa

SEQ ID NO: 104069 - DNA, 4079 bp, Homo sapiens
  Payload ID: 461
  Gene Symbol: ATF2
  Gene Name: activating transcription factor 2
  Uniprot ID: P15336
  ENST ID: ENST00000345739
  CDS Start-End: 377-1720
gttgtcagtccgatctcgcgagagaggacggaagcctgtgggagcccgtggcctttaaagtgccgttcagccttttcctccaggggtgctttgtaaacacggctgtgctcagggctcgcgggtgaccgaaaggatcatgaactagtgacctggaaagggtactagatggaaacttgagaaaggactgcttattgataacagctaaggtattcctggaagcagagtaaataaagctcatggcccaccagctagaaagtattcttgccatgagaaaaagaatgtgataagttattcaacttatgaaattcaagttacatgtgaattctgccaggcaatacaaggacctgtggaatatgagtgatgacaaaccctttctatgtactgcgcctggatgtggccagatcagaccccaacaccaacaagattcttgaaaaactgtgaagaagtgggtttgtttaatgagttggcgagtccatttgagaatgaattcaagaaagcttcagaagatgacattaaaaaaatgcctctagatttatcccctcttgcaacacctatcataagaagcaaaattgaggagccttctgttgtagaaacaactcaccaggatagtcctttacctcacccagagtctactaccagtgatgagaaggaagtaccattggcacaaactgcacagcccacatcagctattgttcgtccagcatcattacaggttcccaatgtgctgcttacaagttctgactcaagtgtaattattcagcaggcagtaccttcaccaacctcaagtactgtaatcacccaggcaccatcctctaacaggccaattgtccctgtaccaggcccatttcctcttctgttacatcttcctaatggacaaaccatgcctgttgctattcctgcatcaattacaagttctaatgtgcatgttccagctgcagtcccactcgttcgaccagtcaccatggtgcctagtgttccaggaatcccaggtccttcctctccccaaccagtacagtcagaagcaaaaatgagattaaaagctgctttgacccagcaacatcctccagttaccaatggtgatactgtcaaaggtcatggtagcggattggttaggactcagtcagaggaatctcgaccgcagtcattacaacagccagccacatccactacagaaactccggcttctccagctcacacaactccacagacccaaagtacaagtggtcgtcggagaagagcagctaacgaagatcctgatgaaaaaaggagaaagtttttagagcgaaatagagcagcagcttcaagatgccgacaaaaaaggaaagtctgggttcagtctttagagaagaaagctgaagacttgagttcattaaatggtcagctgcagagtgaagtcaccctgctgagaaatgaagtggcacagctgaaacagcttcttctggctcataaagattgccctgtaaccgccatgcagaagaaatctggctatcatactgctgataaagatgatagttcagaagacatttcagtgccgagtagtccacatacagaagctatacagcatagttcggtcagcacatccaatggagtcagttcaacctccaaggcagaagctgtagccacttcagtcctcacccagatggcggaccagagtacagagcctgctctttcacagatcgttatggctccttcctcccagtcacagccctcaggaagttgattaaaaacctgcagtacaacagttttagatactcattagtgacttcaaagggaaatcaaggaaagaccagtttccatttatgcgaaatctgtggttgtaaattttttttttttacttgaaattaaatttggctctaaagttggtgtagcagcagttgatcagactgaaaaacggtttttagtctctggaaaaagactgattttgctttttttataaatattattagatttattaatttttctgtgctcaatgtgtaaattgtattataattcattgtgatttatttcacttttaatttgctggtgttttaataaatgggggtgttactgaatctttcttcccacttccatttcttttgaccaccccttaaccctcaactgtgacggtagtagtattatcatttataccaaagttttgcatagtccctgttgactttgtaatgttaacggagtcataaaagcactaggcaagagaaagatagaaatttgcttttaatctttttgccttttattttgcacattatgcaaaaggaaaaacattaaagaacacttttttttaagtgagtgaaaacatggtaaagacatacagtgcttttatgcacattgttaagctaaatcaaggtcatttataatcattttccttttttatttaagattttaagtaaacaaattttagaattttcagcatttcaaaaatgattttatttttcaagtcttaaattcaatattttacacctatgttttgaggctaaaaatatgaaattatataatgtatgatacagggttatcaaatatctaataatttttgaaattagctcttgtttttggtttttttgttgttgtttttacagatttcaggttacaaactgcaaagtttatgcataattaagtatggtatggttgccagaaaagcctaaaattactacttagaaaatttaagactgtttacccccattgtcttgtacttgcgagctaacttgtactattcttgtgaaagcactgtcatcttttagtagcaaattttgataatgtttctcgtggaaaaaaaaatcagtatctatctttagaacaatgtaattataatgtgggaagtgtgcatgaatgagagagagtgtgtgtgtatctgtgtgtgtgtgcgcgtgtgtgtgtgtcttttaatagtttatgccagcaatctttgcttgaatgtttaacgatgccttcagtgtgatgctggccaatagatgattgcagtttaaaatgtcattattgtgcaggcttggataactaacattccatgatgtagcttgtttctgatgagatgattgtaggtacatttttctcattatccaatcatctgtgggatacttagttttctaatgtgccattatctatttttattctgcagttatgttcaaaatacagtacatattttaaaatagaataaattgttaaacataaaattttaaaagtagtagatgtgcgtaagaaaactttgtaaaatagttatgagtcctacccagtagcaacttctggcattcaagcaggattccactatgtaaatatctgtaatgcatttataataagttgtgtagtttgtcctgcatccatactacactatttgctaaagtctcagtgccatctcctaatgagactgacattttaaaagtctgtatggaatatccttgataattcaaggaaatatccctcctgcctaagttccaaactgggaaacattcaaattatataaatgacatttcaggactttaagtatgaagataatgggaattttattgttttgctttttaaaatgagagcatttttatttgataattttttttaaatttttaatttttaactaatttcattattttaaagtaatcagtttttcaaatcatgattttgatatcattattctaaggagttatctcaaaggcacaaaatatgaattctgcaagaaggctattttttattgtagtttgaatgggttaggaaaagcctcaatttttcactcttaagtccttcagtacatttttctttcatcttattacttatgcaagttaaggttctttggtaacagaattcttgcaactgtaaaataaaactacatagatgtaagaagtcatgtaaacggttaacaagcttaccaaggttagcaaaactttcattgtaaatcagtctgtactgagcaaataaaaatcattattagttgtataaacacaaattccattttgactttcaggatgtcatactacttctgtacctagcattttcagtccttatatttgcaatgttacacaaactgtactattttcttttatgtgcagtttgcatgagtaaaccatcagagaataaattctatctttaaattatgttcataa

SEQ ID NO: 104070 - DNA, 1919 bp, Homo sapiens
  Payload ID: 461
  Gene Symbol: ATF2
  Gene Name: activating transcription factor 2
  Uniprot ID: P15336
  ENST ID: ENST00000392544
  CDS Start-End: 298-1815
gtgggagcccgtggcctttaaagtgccgttcagccttttcctccaggggtgctttgtaaacacggctgtgctcagggctcgcgggtgaccgaaaggatcatgaactagtgacctggaaagggtactagatggaaacttgagaaaggactgcttattgataacagctaaggtattcctggaagcagagtaaataaagctcatggcccaccagctagaaagatttcctgaagaggtagtctgattggcttaactcgtattcttgccatgagaaaaagaatgtgataagttattcaacttatgaaattcaagttacatgtgaattctgccaggcaatacaaggacctgtggaatatgagtgatgacaaaccctttctatgtactgcgcctggatgtggccagcgttttaccaacgaggatcatttggctgtccataaacataaacatgagatgacactgaaatttggtccagcacgtaatgacagtgtcattgtggctgatcagaccccaacaccaacaagattcttgaaaaactgtgaagaagtgggtttgtttaatgagttggcgagtccatttgagaatgaattcaagaaagcttcagaagatgacattaaaaaaatgcctctagatttatcccctcttgcaacacctatcataagaagcaaaattgaggagccttctgttgtagaaacaactcaccaggatagtcctttacctcacccagagtctactaccagtgatgagaaggaagtaccattggcacaaactgcacagcccacatcagctattgttcgtccagcatcattacaggttcccaatgtgctgcttacaagttctgactcaagtgtaattattcagcaggcagtaccttcaccaacctcaagtactgtaatcacccaggcaccatcctctaacaggccaattgtccctgtaccaggcccatttcctcttctgttacatcttcctaatggacaaaccatgcctgttgctattcctgcatcaattacaagttctaatgtgcatgttccagctgcagtcccactcgttcgaccagtcaccatggtgcctagtgttccaggaatcccaggtccttcctctccccaaccagtacagtcagaagcaaaaatgagattaaaagctgctttgacccagcaacatcctccagttaccaatggtgatactgtcaaaggtcatggtagcggattggttaggactcagtcagaggaatctcgaccgcagtcattacaacagccagccacatccactacagaaactccggcttctccagctcacacaactccacagacccaaagtacaagtggtcgtcggagaagagcagctaacgaagatcctgatgaaaaaaggagaaagtttttagagcgaaatagagcagcagcttcaagatgccgacaaaaaaggaaagtctgggttcagtctttagagaagaaagctgaagacttgagttcattaaatggtcagctgcagagtgaagtcaccctgctgagaaatgaagtggcacagctgaaacagcttcttctggctcataaagattgccctgtaaccgccatgcagaagaaatctggctatcatactgctgataaagatgatagttcagaagacatttcagtgccgagtagtccacatacagaagctatacagcatagttcggtcagcacatccaatggagtcagttcaacctccaaggcagaagctgtagccacttcagtcctcacccagatggcggaccagagtacagagcctgctctttcacagatcgttatggctccttcctcccagtcacagccctcaggaagttgattaaaaacctgcagtacaacagttttagatactcattagtgacttcaaagggaaatcaaggaaagaccagtttccatttatgcgaaatctgtggttgtaaattt

SEQ ID NO: 104071 - DNA, 801 bp, Homo sapiens
  Payload ID: 461
  Gene Symbol: ATF2
  Gene Name: activating transcription factor 2
  Uniprot ID: P15336
  ENST ID: ENST00000409499
  CDS Start-End: 263-697
gtgggagcccgtggcctttaaagtgccgttcagccttttcctccaggggtgctttgtaaacacggctgtgctcagggctcgcgggtgaccgaaaggatcatgaactagtgacctggaaagggtactagatggaaacttgagaaaggactgcttattgataacagctaaggtattcctggaagcagagtaaataaagctcatggcccaccagctagaaagtattcttgccatgagaaaaagaatgtgataagttattcaacttatgaaattcaagttacatgtgaattctgccaggcaatacaaggacctgtggaatatgagtgatgacaaaccctttctatgtactgcgcctggatgtggccagagtgaagtcaccctgctgagaaatgaagtggcacagctgaaacagcttcttctggctcataaagattgccctgtaaccgccatgcagaagaaatctggctatcatactgctgataaagatgatagttcagaagacatttcagtgccgagtagtccacatacagaagctatacagcatagttcggtcagcacatccaatggagtcagttcaacctccaaggcagaagctgtagccacttcagtcctcacccagatggcggaccagagtacagagcctgctctttcacagatcgttatggctccttcctcccagtcacagccctcaggaagttgattaaaaacctgcagtacaacagttttagatactcattagtgacttcaaagggaaatcaaggaaagaccagtttccatttatgcgaaatctgtggttgtaaattt

SEQ ID NO: 104072 - DNA, 3697 bp, Homo sapiens
  Payload ID: 461
  Gene Symbol: ATF2
  Gene Name: activating transcription factor 2
  ENST ID: ENST00000409437
  CDS Start-End: 184-1353
ctcatggcccaccagctagaaagtattcttgccatgagaaaaagaatgtgataagttattcaacttatgaaattcaagttacatgtgaattctgccagatactgaattcattacttaaaaccacccagaagagaaacctccaggctcagatagcttcactggcaatacaaggacctgtggaatatgagtgatgacaaaccctttctatgtactgcgcctggatgtggccagcgttttaccaacgaggatcatttggctgtccataaacataaacatgagatgacactgaaatttggtccagcacgtaatgacagtgtcattgtggctgatcagaccccaacaccaacaagattcttgaaaaactgtgaagaagtgggtttgtttaatgagttggcgagtccatttgagaatgaattcaagaaagcttcagaagatgacattaaaaaaatgcctctagatttatcccctcttgcaacacctatcataagaagcaaaattgaggagccttctgttgtagaaacaactcaccaggatagtcctttacctcacccagagtctactaccagtgatgagaagctcgttcgaccagtcaccatggtgcctagtgttccaggaatcccaggtccttcctctccccaaccagtacagtcagaagcaaaaatgagattaaaagctgctttgacccagcaacatcctccagttaccaatggtgatactgtcaaaggtcatggtagcggattggttaggactcagtcagaggaatctcgaccgcagtcattacaacagccagccacatccactacagaaactccggcttctccagctcacacaactccacagacccaaagtacaagtggtcgtcggagaagagcagctaacgaagatcctgatgaaaaaaggagaaagtttttagagcgaaatagagcagcagcttcaagatgccgacaaaaaaggaaagtctgggttcagtctttagagaagaaagctgaagacttgagttcattaaatggtcagctgcagagtgaagtcaccctgctgagaaatgaagtggcacagctgaaacagcttcttctggctcataaagattgccctgtaaccgccatgcagaagaaatctggctatcatactgctgataaagatgatagttcagaagacatttcagtgccgagtagtccacatacagaagctatacagcatagttcggtcagcacatccaatggagtcagttcaacctccaaggcagaagctgtagccacttcagtcctcacccagatggcggaccagagtacagagcctgctctttcacagatcgttatggctccttcctcccagtcacagccctcaggaagttgattaaaaacctgcagtacaacagttttagatactcattagtgacttcaaagggaaatcaaggaaagaccagtttccatttatgcgaaatctgtggttgtaaattttttttttttacttgaaattaaatttggctctaaagttggtgtagcagcagttgatcagactgaaaaacggtttttagtctctggaaaaagactgattttgctttttttataaatattattagatttattaatttttctgtgctcaatgtgtaaattgtattataattcattgtgatttatttcacttttaatttgctggtgttttaataaatgggggtgttactgaatctttcttcccacttccatttcttttgaccaccccttaaccctcaactgtgacggtagtagtattatcatttataccaaagttttgcatagtccctgttgactttgtaatgttaacggagtcataaaagcactaggcaagagaaagatagaaatttgcttttaatctttttgccttttattttgcacattatgcaaaaggaaaaacattaaagaacacttttttttaagtgagtgaaaacatggtaaagacatacagtgcttttatgcacattgttaagctaaatcaaggtcatttataatcattttccttttttatttaagattttaagtaaacaaattttagaattttcagcatttcaaaaatgattttatttttcaagtcttaaattcaatattttacacctatgttttgaggctaaaaatatgaaattatataatgtatgatacagggttatcaaatatctaataatttttgaaattagctcttgtttttggtttttttgttgttgtttttacagatttcaggttacaaactgcaaagtttatgcataattaagtatggtatggttgccagaaaagcctaaaattactacttagaaaatttaagactgtttacccccattgtcttgtacttgcgagctaacttgtactattcttgtgaaagcactgtcatcttttagtagcaaattttgataatgtttctcgtggaaaaaaaaatcagtatctatctttagaacaatgtaattataatgtgggaagtgtgcatgaatgagagagagtgtgtgtgtatctgtgtgtgtgtgcgcgtgtgtgtgtgtcttttaatagtttatgccagcaatctttgcttgaatgtttaacgatgccttcagtgtgatgctggccaatagatgattgcagtttaaaatgtcattattgtgcaggcttggataactaacattccatgatgtagcttgtttctgatgagatgattgtaggtacatttttctcattatccaatcatctgtgggatacttagttttctaatgtgccattatctatttttattctgcagttatgttcaaaatacagtacatattttaaaatagaataaattgttaaacataaaattttaaaagtagtagatgtgcgtaagaaaactttgtaaaatagttatgagtcctacccagtagcaacttctggcattcaagcaggattccactatgtaaatatctgtaatgcatttataataagttgtgtagtttgtcctgcatccatactacactatttgctaaagtctcagtgccatctcctaatgagactgacattttaaaagtctgtatggaatatccttgataattcaaggaaatatccctcctgcctaagttccaaactgggaaacattcaaattatataaatgacatttcaggactttaagtatgaagataatgggaattttattgttttgctttttaaaatgagagcatttttatttgataattttttttaaatttttaatttttaactaatttcattattttaaagtaatcagtttttcaaatcatgattttgatatcattattctaaggagttatctcaaaggcacaaaatatgaattctgcaagaaggctattttttattgtagtttgaatgggttaggaaaagcctcaatttttcactcttaagtccttcagtacatttttctttcatcttattacttatgcaagttaaggttctttggtaacagaattcttgcaactgtaaaataaaactacatagatgtaagaagtcatgtaaacggttaacaagcttaccaaggttagcaaaactttcattgtaaatcagtctgtactgagcaaataaaaatcattattagttgtataaacacaaattccattttgactttcaggatgtcatactacttctgtacctagcattttcagtccttatatttgcaatgttacacaaactgtactattttcttttatgtgcagtttgcatgagtaaaccatcagagaataaattctatcttt

SEQ ID NO: 104073 - DNA, 1335 bp, Homo sapiens
  Payload ID: 461
  Gene Symbol: ATF2
  Gene Name: activating transcription factor 2
  Uniprot ID: P15336
  ENST ID: ENST00000409833
  CDS Start-End: 263-892
gtgggagcccgtggcctttaaagtgccgttcagccttttcctccaggggtgctttgtaaacacggctgtgctcagggctcgcgggtgaccgaaaggatcatgaactagtgacctggaaagggtactagatggaaacttgagaaaggactgcttattgataacagctaaggtattcctggaagcagagtaaataaagctcatggcccaccagctagaaagtattcttgccatgagaaaaagaatgtgataagttattcaacttatgaaattcaagttacatgtgaattctgccaggcaatacaaggacctgtggaatatgagtgatgacaaaccctttctatgtactgcgcctggatgtggccagcgttttaccaacgaggatcatttggctgtccataaacataaacatgagatgacactgaaatttggtccagcacgtaatgacagtgtcattgtggctgatcagaccccaacaccaacaagattcttgaaaaactgtgaagaagtgggtttgtttaatgagttggcgagtccatttgagaatgaattcaagaaagcttcagaagatgacattaaaaaaatgcctctagatttatcccctcttgcaacacctatcataagaagcaaaattgaggagccttctgttgtagaaacaactcaccaggatagtcctttacctcacccagagtctactaccagtgatgagaaggaagtaccattggcacaaactgcacagcccacatcagctattgttcgtccagcatcattacaggttcccaatgtgctgcttacaagttctgactcaagtgtaattattcagcaggcagtaccttcaccaacctcaagtactgtaatcacccaggcaccatcctctaacaggccaattgtgtaagtgattcaggccaatcattgaacatatacatgaattaagtttgttttgtaatgatttttcctaagacatttgattattcaaactaagatcttagttttgtatgtgtgtgcatgcttcgaattttggaaaaagtacttgcgtagtcttctttaatataaatattaactaacagagtgggagataaatacaactaaaaacaaatatagaatgtgaatttaagatagtcttattttcatgctatttcacacaaaatataaaattactgcatcaccagattccatttctttcagttcttactggtagctcccaagagctctctgatgacagtttttctcattttacaaattggagattgtcctaagtaaatccataacttttctcttcttttcaatactgctacacaggttatgcatttaagatgcaattaaaaataattaaatttt

SEQ ID NO: 104074 - DNA, 2109 bp, Homo sapiens
  Payload ID: 461
  Gene Symbol: ATF2
  Gene Name: activating transcription factor 2
  Uniprot ID: P15336
  ENST ID: ENST00000409635
  CDS Start-End: 437-1780
gtcagtccgatctcgcgagagaggacggaagcctgtgggagcccgtggcctttaaagtgccgttcagccttttcctccaggggtgctttgtaaacacggctgtgctcagggctcgcgggtgaccgaaaggatcatgaactagtgacctggaaagggtactagatggaaacttgagaaaggactgcttattgataacagctaaggtattcctggaagcagagtaaataaagctcatggcccaccagctagaaagtattcttgccatgagaaaaagaatgtgataagttattcaacttatgaaattcaagttacatgtgaattctgccagatactgaattcattacttaaaaccacccagaagagaaacctccaggctcagatagcttcactggcaatacaaggacctgtggaatatgagtgatgacaaaccctttctatgtactgcgcctggatgtggccagatcagaccccaacaccaacaagattcttgaaaaactgtgaagaagtgggtttgtttaatgagttggcgagtccatttgagaatgaattcaagaaagcttcagaagatgacattaaaaaaatgcctctagatttatcccctcttgcaacacctatcataagaagcaaaattgaggagccttctgttgtagaaacaactcaccaggatagtcctttacctcacccagagtctactaccagtgatgagaaggaagtaccattggcacaaactgcacagcccacatcagctattgttcgtccagcatcattacaggttcccaatgtgctgcttacaagttctgactcaagtgtaattattcagcaggcagtaccttcaccaacctcaagtactgtaatcacccaggcaccatcctctaacaggccaattgtccctgtaccaggcccatttcctcttctgttacatcttcctaatggacaaaccatgcctgttgctattcctgcatcaattacaagttctaatgtgcatgttccagctgcagtcccactcgttcgaccagtcaccatggtgcctagtgttccaggaatcccaggtccttcctctccccaaccagtacagtcagaagcaaaaatgagattaaaagctgctttgacccagcaacatcctccagttaccaatggtgatactgtcaaaggtcatggtagcggattggttaggactcagtcagaggaatctcgaccgcagtcattacaacagccagccacatccactacagaaactccggcttctccagctcacacaactccacagacccaaagtacaagtggtcgtcggagaagagcagctaacgaagatcctgatgaaaaaaggagaaagtttttagagcgaaatagagcagcagcttcaagatgccgacaaaaaaggaaagtctgggttcagtctttagagaagaaagctgaagacttgagttcattaaatggtcagctgcagagtgaagtcaccctgctgagaaatgaagtggcacagctgaaacagcttcttctggctcataaagattgccctgtaaccgccatgcagaagaaatctggctatcatactgctgataaagatgatagttcagaagacatttcagtgccgagtagtccacatacagaagctatacagcatagttcggtcagcacatccaatggagtcagttcaacctccaaggcagaagctgtagccacttcagtcctcacccagatggcggaccagagtacagagcctgctctttcacagatcgttatggctccttcctcccagtcacagccctcaggaagttgattaaaaacctgcagtacaacagttttagatactcattagtgacttcaaagggaaatcaaggaaagaccagtttccatttatgcgaaatctgtggttgtaaattttttttttttacttgaaattaaatttggctctaaagttggtgtagcagcagttgatcagactgaaaaacggtttttagtctctggaaaaagactgattttgctttttttataaatattattagatttattaatttttctgtgctcaatgtgtaaattgtattataattcattgtgatttatttcacttttaatttgctggtgttttaataaatgggggtgttactg

SEQ ID NO: 104075 - DNA, 2113 bp, Homo sapiens
  Payload ID: 461
  Gene Symbol: ATF2
  Gene Name: activating transcription factor 2
  ENST ID: ENST00000417080
  CDS Start-End: 298-1485
gtgggagcccgtggcctttaaagtgccgttcagccttttcctccaggggtgctttgtaaacacggctgtgctcagggctcgcgggtgaccgaaaggatcatgaactagtgacctggaaagggtactagatggaaacttgagaaaggactgcttattgataacagctaaggtattcctggaagcagagtaaataaagctcatggcccaccagctagaaagatttcctgaagaggtagtctgattggcttaactcgtattcttgccatgagaaaaagaatgtgataagttattcaacttatgaaattcaagttacatgtgaattctgccaggcaatacaaggacctgtggaatatgagtgatgacaaaccctttctatgtactgcgcctggatgtggccagcgttttaccaacgaggatcatttggctgtccataaacataaacatgagatgacactgaaatttggtccagcacgtaatgacagtgtcattgtggctgatcagaccccaacaccaacaagattcttgaaaaactgtgaagaagtgggtttgtttaatgagttggcgagtccatttgagaatgaattcaagaaagcttcagaagatgacattaaaaaaatgcctctagatttatcccctcttgcaacacctatcataagaagcaaaattgaggagccttctgttgtagaaacaactcaccaggatagtcctttacctcacccagagtctactaccagtgatgagaaggaagtaccattggcacaaactgcacagcccacatcagctattgttcgtccagcatcattacaggttcccaatgtgctgcttacaagttctgactcaagtgtaattattcagcaggcagtaccttcaccaacctcaagtactgtaatcacccaggcaccatcctctaacaggccaattgtccctgtaccaggcccatttcctcttctgttacatcttcctaatggacaaaccatgcctgttgctattcctgcatcaattacaagttctaatgtgcatgttccagctgcagtcccactcgttcgaccagtcaccatggtgcctagtgttccaggaatcccaggtccttcctctccccaaccagtacagtcagaagcaaaaatgagattaaaagctgctttgacccagcaacatcctccagttaccaatggtgatactgtcaaaggtcatggtagcggattggttaggactcagtcagaggaatctcgaccgcagtcattacaacagccagccacatccactacagaaactccggcttctccagctcacacaactccacagacccaaagtacaagtggtcgtcggagaagagcagctaacgaagatcctgatgaaaaaaggagaaagtttttagagcgaaatagagcagcagcttcaagatgccgacaaaaaaggaaagtctgggttcagtctttagagaagaaagctgaagacttgagttcattaaatggtcagctgcagtgaatatattgctcgtgaaaggtgccagattgacagctttggaaactgaaggactctaattatccacagaccagagtgaagtcaccctgctgagaaatgaagtggcacagctgaaacagcttcttctggctcataaagattgccctgtaaccgccatgcagaagaaatctggctatcatacaaatatttcttcagctctattccataaggcagtgggcacccagatgtttccatatgcatggttgtgccttcttttgacctattgcaggaaaatgaataatttttcttttttccacccagctgctgataaagatgatagttcagaagacatttcagtgccgagtagtccacatacagaagctatacagcatagttcggtcagcacatccaatggagtcagttcaacctccaaggcagaagctgtagccacttcagtcctcacccagatggcggaccagagtacagagcctgctctttcacagatcgttatggctccttcctcccagtcacagccctcaggaagttgattaaaaacctgcagtacaacagttttagatactcattagtgacttcaaagggaaatcaaggaaagaccagtttccatttatgcgaaatctgtggttgtaaattt

SEQ ID NO: 104076 - DNA, 1861 bp, Homo sapiens
  Payload ID: 461
  Gene Symbol: ATF2
  Gene Name: activating transcription factor 2
  ENST ID: ENST00000456655
  CDS Start-End: 263-394
gtgggagcccgtggcctttaaagtgccgttcagccttttcctccaggggtgctttgtaaacacggctgtgctcagggctcgcgggtgaccgaaaggatcatgaactagtgacctggaaagggtactagatggaaacttgagaaaggactgcttattgataacagctaaggtattcctggaagcagagtaaataaagctcatggcccaccagctagaaagtattcttgccatgagaaaaagaatgtgataagttattcaacttatgaaattcaagttacatgtgaattctgccaggcaatacaaggacctgtggaatatgagtgatgacaaaccctttctatgtactgcgcctggatgtggccagatcagaccccaacaccaacaagattcttgaaaaactgtgaagaagtgggtttgtttaatgagttggcgagtccatttgagaatgaattcaagaaagcttcagaagatgacattaaaaaaatgcctctagatttatcccctcttgcaacacctatcataagaagcaaaattgaggagccttctgttgtagaaacaactcaccaggatagtcctttacctcacccagagtctactaccagtgatgagaaggaagtaccattggcacaaactgcacagcccacatcagctattgttcgtccagcatcattacaggttcccaatgtgctgcttacaagttctgactcaagtgtaattattcagcaggcagtaccttcaccaacctcaagtactgtaatcacccaggcaccatcctctaacaggccaattgtccctgtaccaggcccatttcctcttctgttacatcttcctaatggacaaaccatgcctgttgctattcctgcatcaattacaagttctaatgtgcatgttccagctgcagtcccactcgttcgaccagtcaccatggtgcctagtgttccaggaatcccaggtccttcctctccccaaccagtacagtcagaagcaaaaatgagattaaaagctgctttgacccagcaacatcctccagttaccaatggtgatactgtcaaaggtcatggtagcggattggttaggactcagtcagaggaatctcgaccgcagtcattacaacagccagccacatccactacagaaactccggcttctccagctcacacaactccacagacccaaagtacaagtggtcgtcggagaagagcagctaacgaagatcctgatgaaaaaaggagaaagtttttagagcgaaatagagcagcagcttcaagatgccgacaaaaaaggaaagtctgggttcagtctttagagaagaaagctgaagacttgagttcattaaatggtcagctgcagtgaatatattgctcgtgaaaggtgccagattgacagctttggaaactgaaggactctaattatccacagaccagagtgaagtcaccctgctgagaaatgaagtggcacagctgaaacagcttcttctggctcataaagattgccctgtaaccgccatgcagaagaaatctggctatcatactgctgataaagatgatagttcagaagacatttcagtgccgagtagtccacatacagaagctatacagcatagttcggtcagcacatccaatggagtcagttcaacctccaaggcagaagctgtagccacttcagtcctcacccagatggcggaccagagtacagagcctgctctttcacagatcgttatggctccttcctcccagtcacagccctcaggaagttgattaaaaacctgcagtacaacagttttagatactcattagtgacttcaaagggaaatcaaggaaagaccagtttccatttatgcgaaatctgtggttgtaaattt

SEQ ID NO: 104077 - DNA, 2081 bp, Homo sapiens
  Payload ID: 461
  Gene Symbol: ATF2
  Gene Name: activating transcription factor 2
  ENST ID: ENST00000429579
  CDS Start-End: 298-1485
gtgggagcccgtggcctttaaagtgccgttcagccttttcctccaggggtgctttgtaaacacggctgtgctcagggctcgcgggtgaccgaaaggatcatgaactagtgacctggaaagggtactagatggaaacttgagaaaggactgcttattgataacagctaaggtattcctggaagcagagtaaataaagctcatggcccaccagctagaaagatttcctgaagaggtagtctgattggcttaactcgtattcttgccatgagaaaaagaatgtgataagttattcaacttatgaaattcaagttacatgtgaattctgccaggcaatacaaggacctgtggaatatgagtgatgacaaaccctttctatgtactgcgcctggatgtggccagcgttttaccaacgaggatcatttggctgtccataaacataaacatgagatgacactgaaatttggtccagcacgtaatgacagtgtcattgtggctgatcagaccccaacaccaacaagattcttgaaaaactgtgaagaagtgggtttgtttaatgagttggcgagtccatttgagaatgaattcaagaaagcttcagaagatgacattaaaaaaatgcctctagatttatcccctcttgcaacacctatcataagaagcaaaattgaggagccttctgttgtagaaacaactcaccaggatagtcctttacctcacccagagtctactaccagtgatgagaaggaagtaccattggcacaaactgcacagcccacatcagctattgttcgtccagcatcattacaggttcccaatgtgctgcttacaagttctgactcaagtgtaattattcagcaggcagtaccttcaccaacctcaagtactgtaatcacccaggcaccatcctctaacaggccaattgtccctgtaccaggcccatttcctcttctgttacatcttcctaatggacaaaccatgcctgttgctattcctgcatcaattacaagttctaatgtgcatgttccagctgcagtcccactcgttcgaccagtcaccatggtgcctagtgttccaggaatcccaggtccttcctctccccaaccagtacagtcagaagcaaaaatgagattaaaagctgctttgacccagcaacatcctccagttaccaatggtgatactgtcaaaggtcatggtagcggattggttaggactcagtcagaggaatctcgaccgcagtcattacaacagccagccacatccactacagaaactccggcttctccagctcacacaactccacagacccaaagtacaagtggtcgtcggagaagagcagctaacgaagatcctgatgaaaaaaggagaaagtttttagagcgaaatagagcagcagcttcaagatgccgacaaaaaaggaaagtctgggttcagtctttagagaagaaagctgaagacttgagttcattaaatggtcagctgcagtgaatatattgctcgtgaaaggtgccagattgacagctttggaaactgaaggactctaattatccacagaccagagtgaagtcaccctgctgagaaatgaagtggcacagctgaaacagcttcttctggctcataaagattgccctgtaaccgccatgcagaagaaatctggctatcatacaaatatttcttcagctctattccataaggcagtgggcacccagatgtttccatatgcatggttgtgccttcttttgacctattgcagctgctgataaagatgatagttcagaagacatttcagtgccgagtagtccacatacagaagctatacagcatagttcggtcagcacatccaatggagtcagttcaacctccaaggcagaagctgtagccacttcagtcctcacccagatggcggaccagagtacagagcctgctctttcacagatcgttatggctccttcctcccagtcacagccctcaggaagttgattaaaaacctgcagtacaacagttttagatactcattagtgacttcaaagggaaatcaaggaaagaccagtttccatttatgcgaaatctgtggttgtaaattt

SEQ ID NO: 104078 - DNA, 1115 bp, Homo sapiens
  Payload ID: 461
  Gene Symbol: ATF2
  Gene Name: activating transcription factor 2
  ENST ID: ENST00000435004
  CDS Start-End: 1-797
aatacaaggacctgtggaatatgagtgatgacaaaccctttctatgtactgcgcctggatgtggccagcgttttaccaacgaggatcatttggctgtccataaacataaacatgagatgacactgaaatttggtccagcacgtaatgacagtgtcattgtggctgatcagaccccaacaccaacaagattcttgaaaaactgtgaagaagtgggtttgtttaatgagttggcgagtccatttgagaatgaattcaagaaagcttcagaagatgacattaaaaaaatgcctctagatttatcccctcttgcaacacctatcataagaagcaaaattgaggagccttctgttgtagaaacaactcaccaggatagtcctttacctcacccagagtctactaccagtgatgagaaggaagtaccattggcacaaactgcacagcccacatcagctattgttcgtccagcttctccagctcacacaactccacagacccaaagtacaagtggtcgtcggagaagagcagctaacgaagatcctgatgaaaaaaggagaaagtttttagagcgaaatagagcagcagcttcaagatgccgacaaaaaaggaaagtctgggttcagtctttagagaagaaagctgaagacttgagttcattaaatggtcagctgcagctgctgataaagatgatagttcagaagacatttcagtgccgagtagtccacatacagaagctatacagcatagttcggtcagcacatccaatggagtcagttcaacctccaaggcagaagctgtagccacttcagtcctcacccagatggcggaccagagtacagagcctgctctttcacagatcgttatggctccttcctcccagtcacagccctcaggaagttgattaaaaacctgcagtacaacagttttagatactcattagtgacttcaaagggaaatcaaggaaagaccagtttccatttatgcgaaatctgtggttgtaaattttttttttttacttgaaattaaatttggctctaaagttggtgtagcagcagttgatcagactgaaaaacggtttttagtctctggaaaaagactgattttgctttttttataaa

SEQ ID NO: 104079 - DNA, 4132 bp, Homo sapiens
  Payload ID: 461
  Gene Symbol: ATF2
  Gene Name: activating transcription factor 2
  Uniprot ID: P15336
  ENST ID: ENST00000426833
  CDS Start-End: 314-1777
gttgtcagtccgatctcgcgagagaggacggaagcctgtgggagcccgtggcctttaaagtgccgttcagccttttcctccaggggtgctttgtaaacacggctgtgctcagggctcgcgggtgaccgaaaggatcatgaactagtgacctggaaagggtactagatggaaacttgagaaaggactgcttattgataacagctaaggtattcctggaagcagagtaaataaagctcatggcccaccagctagaaagatttcctgaagaggtagtctgattggcttaactcggcaatacaaggacctgtggaatatgagtgatgacaaaccctttctatgtactgcgcctggatgtggccagcgttttaccaacgaggatcatttggctgtccataaacataaacatgagatgacactgaaatttggtccagcacgtaatgacagtgtcattgtggctgatcagaccccaacaccaacaagattcttgaaaaactgtgaagaagtgggtttgtttaatgagttggcgagtccatttgagaatgaattcaagaaagcttcagaagatgacattaaaaaaatgcctctagatttatcccctcttgcaacacctatcataagaagcaaaattgaggagccttctgttgtagaaacaactcaccaggatagtcctttacctcacccagagtctactaccagtgatgagaaggaagtaccattggcacaaactgcacagcccacatcagctattgttcgtccagcatcattacaggttcccaatgtgctgcttacaagttctgactcaagtgtaattattcagcaggcagtaccttcaccaacctcaagtactgtaatcacccaggcaccatcctctaacaggccaattgtccctgtaccaggcccatttcctcttctgttacatcttcctaatggacaaaccatgcctgttgctattcctgcatcaattacaagttctaatgtgcatgttccagctgcagtcccactcgttcgaccagtcaccatggtgcctagtgttccaggaatcccaggtccttcctctccccaaccagtacagtcagaagcaaaaatgagattaaaagctgctttgacccagcaacatcctccagttaccaatggtgatactgtcaaaggtcatggtagcggattggttaggactcagtcagaggaatctcgaccgcagtcattacaacagccagccacatccactacagaaactccggcttctccagctcacacaactccacagacccaaagtacaagtggtcgtcggagaagagcagctaacgaagatcctgatgaaaaaaggagaaagtttttagagcgaaatagagcagcagcttcaagatgccgacaaaaaaggaaagtctgggttcagtctttagagaagaaagctgaagacttgagttcattaaatggtcagctgcagagtgaagtcaccctgctgagaaatgaagtggcacagctgaaacagcttcttctggctcataaagattgccctgtaaccgccatgcagaagaaatctggctatcatactgctgataaagatgatagttcagaagacatttcagtgccgagtagtccacatacagaagctatacagcatagttcggtcagcacatccaatggagtcagttcaacctccaaggcagaagctgtagccacttcagtcctcacccagatggcggaccagagtacagagcctgctctttcacagatcgttatggctccttcctcccagtcacagccctcaggaagttgattaaaaacctgcagtacaacagttttagatactcattagtgacttcaaagggaaatcaaggaaagaccagtttccatttatgcgaaatctgtggttgtaaattttttttttttacttgaaattaaatttggctctaaagttggtgtagcagcagttgatcagactgaaaaacggtttttagtctctggaaaaagactgattttgctttttttataaatattattagatttattaatttttctgtgctcaatgtgtaaattgtattataattcattgtgatttatttcacttttaatttgctggtgttttaataaatgggggtgttactgaatctttcttcccacttccatttcttttgaccaccccttaaccctcaactgtgacggtagtagtattatcatttataccaaagttttgcatagtccctgttgactttgtaatgttaacggagtcataaaagcactaggcaagagaaagatagaaatttgcttttaatctttttgccttttattttgcacattatgcaaaaggaaaaacattaaagaacacttttttttaagtgagtgaaaacatggtaaagacatacagtgcttttatgcacattgttaagctaaatcaaggtcatttataatcattttccttttttatttaagattttaagtaaacaaattttagaattttcagcatttcaaaaatgattttatttttcaagtcttaaattcaatattttacacctatgttttgaggctaaaaatatgaaattatataatgtatgatacagggttatcaaatatctaataatttttgaaattagctcttgtttttggtttttttgttgttgtttttacagatttcaggttacaaactgcaaagtttatgcataattaagtatggtatggttgccagaaaagcctaaaattactacttagaaaatttaagactgtttacccccattgtcttgtacttgcgagctaacttgtactattcttgtgaaagcactgtcatcttttagtagcaaattttgataatgtttctcgtggaaaaaaaaatcagtatctatctttagaacaatgtaattataatgtgggaagtgtgcatgaatgagagagagtgtgtgtgtatctgtgtgtgtgtgcgcgtgtgtgtgtgtcttttaatagtttatgccagcaatctttgcttgaatgtttaacgatgccttcagtgtgatgctggccaatagatgattgcagtttaaaatgtcattattgtgcaggcttggataactaacattccatgatgtagcttgtttctgatgagatgattgtaggtacatttttctcattatccaatcatctgtgggatacttagttttctaatgtgccattatctatttttattctgcagttatgttcaaaatacagtacatattttaaaatagaataaattgttaaacataaaattttaaaagtagtagatgtgcgtaagaaaactttgtaaaatagttatgagtcctacccagtagcaacttctggcattcaagcaggattccactatgtaaatatctgtaatgcatttataataagttgtgtagtttgtcctgcatccatactacactatttgctaaagtctcagtgccatctcctaatgagactgacattttaaaagtctgtatggaatatccttgataattcaaggaaatatccctcctgcctaagttccaaactgggaaacattcaaattatataaatgacatttcaggactttaagtatgaagataatgggaattttattgttttgctttttaaaatgagagcatttttatttgataattttttttaaatttttaatttttaactaatttcattattttaaagtaatcagtttttcaaatcatgattttgatatcattattctaaggagttatctcaaaggcacaaaatatgaattctgcaagaaggctattttttattgtagtttgaatgggttaggaaaagcctcaatttttcactcttaagtccttcagtacatttttctttcatcttattacttatgcaagttaaggttctttggtaacagaattcttgcaactgtaaaataaaactacatagatgtaagaagtcatgtaaacggttaacaagcttaccaaggttagcaaaactttcattgtaaatcagtctgtactgagcaaataaaaatcattattagttgtataaacacaaattccattttgactttcaggatgtcatactacttctgtacctagcattttcagtccttatatttgcaatgttacacaaactgtactattttcttttatgtgcagtttgcatgagtaaaccatcagagaataaattctatctttaaattatgttc

SEQ ID NO: 104080 - DNA, 1896 bp, Homo sapiens
  Payload ID: 461
  Gene Symbol: ATF2
  Gene Name: activating transcription factor 2
  ENST ID: ENST00000415955
  CDS Start-End: 298-429
gtgggagcccgtggcctttaaagtgccgttcagccttttcctccaggggtgctttgtaaacacggctgtgctcagggctcgcgggtgaccgaaaggatcatgaactagtgacctggaaagggtactagatggaaacttgagaaaggactgcttattgataacagctaaggtattcctggaagcagagtaaataaagctcatggcccaccagctagaaagatttcctgaagaggtagtctgattggcttaactcgtattcttgccatgagaaaaagaatgtgataagttattcaacttatgaaattcaagttacatgtgaattctgccaggcaatacaaggacctgtggaatatgagtgatgacaaaccctttctatgtactgcgcctggatgtggccagatcagaccccaacaccaacaagattcttgaaaaactgtgaagaagtgggtttgtttaatgagttggcgagtccatttgagaatgaattcaagaaagcttcagaagatgacattaaaaaaatgcctctagatttatcccctcttgcaacacctatcataagaagcaaaattgaggagccttctgttgtagaaacaactcaccaggatagtcctttacctcacccagagtctactaccagtgatgagaaggaagtaccattggcacaaactgcacagcccacatcagctattgttcgtccagcatcattacaggttcccaatgtgctgcttacaagttctgactcaagtgtaattattcagcaggcagtaccttcaccaacctcaagtactgtaatcacccaggcaccatcctctaacaggccaattgtccctgtaccaggcccatttcctcttctgttacatcttcctaatggacaaaccatgcctgttgctattcctgcatcaattacaagttctaatgtgcatgttccagctgcagtcccactcgttcgaccagtcaccatggtgcctagtgttccaggaatcccaggtccttcctctccccaaccagtacagtcagaagcaaaaatgagattaaaagctgctttgacccagcaacatcctccagttaccaatggtgatactgtcaaaggtcatggtagcggattggttaggactcagtcagaggaatctcgaccgcagtcattacaacagccagccacatccactacagaaactccggcttctccagctcacacaactccacagacccaaagtacaagtggtcgtcggagaagagcagctaacgaagatcctgatgaaaaaaggagaaagtttttagagcgaaatagagcagcagcttcaagatgccgacaaaaaaggaaagtctgggttcagtctttagagaagaaagctgaagacttgagttcattaaatggtcagctgcagtgaatatattgctcgtgaaaggtgccagattgacagctttggaaactgaaggactctaattatccacagaccagagtgaagtcaccctgctgagaaatgaagtggcacagctgaaacagcttcttctggctcataaagattgccctgtaaccgccatgcagaagaaatctggctatcatactgctgataaagatgatagttcagaagacatttcagtgccgagtagtccacatacagaagctatacagcatagttcggtcagcacatccaatggagtcagttcaacctccaaggcagaagctgtagccacttcagtcctcacccagatggcggaccagagtacagagcctgctctttcacagatcgttatggctccttcctcccagtcacagccctcaggaagttgattaaaaacctgcagtacaacagttttagatactcattagtgacttcaaagggaaatcaaggaaagaccagtttccatttatgcgaaatctgtggttgtaaattt

SEQ ID NO: 104081 - DNA, 1966 bp, Homo sapiens
  Payload ID: 461
  Gene Symbol: ATF2
  Gene Name: activating transcription factor 2
  ENST ID: ENST00000421438
  CDS Start-End: 298-1011
gtgggagcccgtggcctttaaagtgccgttcagccttttcctccaggggtgctttgtaaacacggctgtgctcagggctcgcgggtgaccgaaaggatcatgaactagtgacctggaaagggtactagatggaaacttgagaaaggactgcttattgataacagctaaggtattcctggaagcagagtaaataaagctcatggcccaccagctagaaagatttcctgaagaggtagtctgattggcttaactcgtattcttgccatgagaaaaagaatgtgataagttattcaacttatgaaattcaagttacatgtgaattctgccaggcaatacaaggacctgtggaatatgagtgatgacaaaccctttctatgtactgcgcctggatgtggccagcgttttaccaacgaggatcatttggctgtccataaacataaacatgagatgacactgaaatttggtccagcacgtaatgacagtgtcattgtggctgatcagaccccaacaccaacaagattcttgaaaaactgtgaagaagtgggtttgtttaatgagttggcgagtccatttgagaatgaattcaagaaagcttcagaagatgacattaaaaaaatgcctctagatttatcccctcttgcaacacctatcataagaagcaaaattgaggagccttctgttgtagaaacaactcaccaggatagtcctttacctcacccagagtctactaccagtgatgagaaggaagtaccattggcacaaactgcacagcccacatcagctattgttcgtccagcatcattacaggttcccaatgtgctgcttacaagttctgactcaagtgtaattattcagcaggcagtaccttcaccaacctcaagtactgtaatcacccaggcaccatcctctaacaggccaattgtctcgttcgaccagtcaccatggtgcctagtgttccaggaatcccaggtccttcctctccccaaccagtacagtcagaagcaaaaatgagattaaaagctgctttgacccagcaacatcctccagttaccaatggtgatactgtcaaaggtcatggtagcggattggttaggactcagtcagaggaatctcgaccgcagtcattacaacagccagccacatccactacagaaactccggcttctccagctcacacaactccacagacccaaagtacaagtggtcgtcggagaagagcagctaacgaagatcctgatgaaaaaaggagaaagtttttagagcgaaatagagcagcagcttcaagatgccgacaaaaaaggaaagtctgggttcagtctttagagaagaaagctgaagacttgagttcattaaatggtcagctgcagtgaatatattgctcgtgaaaggtgccagattgacagctttggaaactgaaggactctaattatccacagaccagagtgaagtcaccctgctgagaaatgaagtggcacagctgaaacagcttcttctggctcataaagattgccctgtaaccgccatgcagaagaaatctggctatcatacaaatatttcttcagctctattccataaggcagtgggcacccagatgtttccatatgcatggttgtgccttcttttgacctattgcagctgctgataaagatgatagttcagaagacatttcagtgccgagtagtccacatacagaagctatacagcatagttcggtcagcacatccaatggagtcagttcaacctccaaggcagaagctgtagccacttcagtcctcacccagatggcggaccagagtacagagcctgctctttcacagatcgttatggctccttcctcccagtcacagccctcaggaagttgattaaaaacctgcagtacaacagttttagatactcattagtgacttcaaagggaaatcaaggaaagaccagtttccatttatgcgaaatctgtggttgtaaattt

SEQ ID NO: 104082 - DNA, 1989 bp, Homo sapiens
  Payload ID: 461
  Gene Symbol: ATF2
  Gene Name: activating transcription factor 2
  ENST ID: ENST00000428760
  CDS Start-End: 263-1450
gtgggagcccgtggcctttaaagtgccgttcagccttttcctccaggggtgctttgtaaacacggctgtgctcagggctcgcgggtgaccgaaaggatcatgaactagtgacctggaaagggtactagatggaaacttgagaaaggactgcttattgataacagctaaggtattcctggaagcagagtaaataaagctcatggcccaccagctagaaagtattcttgccatgagaaaaagaatgtgataagttattcaacttatgaaattcaagttacatgtgaattctgccaggcaatacaaggacctgtggaatatgagtgatgacaaaccctttctatgtactgcgcctggatgtggccagcgttttaccaacgaggatcatttggctgtccataaacataaacatgagatgacactgaaatttggtccagcacgtaatgacagtgtcattgtggctgatcagaccccaacaccaacaagattcttgaaaaactgtgaagaagtgggtttgtttaatgagttggcgagtccatttgagaatgaattcaagaaagcttcagaagatgacattaaaaaaatgcctctagatttatcccctcttgcaacacctatcataagaagcaaaattgaggagccttctgttgtagaaacaactcaccaggatagtcctttacctcacccagagtctactaccagtgatgagaaggaagtaccattggcacaaactgcacagcccacatcagctattgttcgtccagcatcattacaggttcccaatgtgctgcttacaagttctgactcaagtgtaattattcagcaggcagtaccttcaccaacctcaagtactgtaatcacccaggcaccatcctctaacaggccaattgtccctgtaccaggcccatttcctcttctgttacatcttcctaatggacaaaccatgcctgttgctattcctgcatcaattacaagttctaatgtgcatgttccagctgcagtcccactcgttcgaccagtcaccatggtgcctagtgttccaggaatcccaggtccttcctctccccaaccagtacagtcagaagcaaaaatgagattaaaagctgctttgacccagcaacatcctccagttaccaatggtgatactgtcaaaggtcatggtagcggattggttaggactcagtcagaggaatctcgaccgcagtcattacaacagccagccacatccactacagaaactccggcttctccagctcacacaactccacagacccaaagtacaagtggtcgtcggagaagagcagctaacgaagatcctgatgaaaaaaggagaaagtttttagagcgaaatagagcagcagcttcaagatgccgacaaaaaaggaaagtctgggttcagtctttagagaagaaagctgaagacttgagttcattaaatggtcagctgcagtgaatatattgctcgtgaaaggtgccagattgacagctttggaaactgaaggactctaattatccacagaccagagtgaagtcaccctgctgagaaatgaagtggcacagctgaaacagcttcttctggctcataaagattgccctgtaaccgccatgcagaagaaatctggctatcatactgctgataaagatgatagttcagaagacatttcagtgccgagtagtccacatacagaagctatacagcatagttcggtcagcacatccaatggagtcagttcaacctccaaggcagaagctgtagccacttcagtcctcacccagatggcggaccagagtacagagcctgctctttcacagatcgttatggctccttcctcccagtcacagccctcaggaagttgattaaaaacctgcagtacaacagttttagatactcattagtgacttcaaagggaaatcaaggaaagaccagtttccatttatgcgaaatctgtggttgtaaattttttttttttacttgaaattaaatttggctct

SEQ ID NO: 104083 - DNA, 784 bp, Homo sapiens
  Payload ID: 461
  Gene Symbol: ATF2
  Gene Name: activating transcription factor 2
  ENST ID: ENST00000435231
  CDS Start-End: 262-393
tgggagcccgtggcctttaaagtgccgttcagccttttcctccaggggtgctttgtaaacacggctgtgctcagggctcgcgggtgaccgaaaggatcatgaactagtgacctggaaagggtactagatggaaacttgagaaaggactgcttattgataacagctaaggtattcctggaagcagagtaaataaagctcatggcccaccagctagaaagtattcttgccatgagaaaaagaatgtgataagttattcaacttatgaaattcaagttacatgtgaattctgccaggcaatacaaggacctgtggaatatgagtgatgacaaaccctttctatgtactgcgcctggatgtggccagatcagaccccaacaccaacaagattcttgaaaaactgtgaagaagtgggtttgtttaatgagttggcgagtccatttgagaatgaattcaagaaagcttcagaagatgacattaaaaaagaagtaccattggcacaaactgcacagcccacatcagctattgttcgtccagcatcattacaggttcccaatgtgctgcttacaagttctgactcaagtgtaattattcagcaggcagtaccttcaccaacctcaagtactgtaatcacccaggcaccatcctctaacaggccaattgtccctgtaccaggcccatttcctcttctgttacatcttcctaatggacaaaccatgcctgttgctattcctgcatcaattacaagttctaatgtgcatgttccagctgcagtcccactcgttcg

SEQ ID NO: 104084 - DNA, 883 bp, Homo sapiens
  Payload ID: 461
  Gene Symbol: ATF2
  Gene Name: activating transcription factor 2
  ENST ID: ENST00000437522
  CDS Start-End: 317-883
gatgcccgtcccctctacccgccctgccgaagacccgccttcttctccttaagcctgacggaatcacctgactcggaggcgctccctcagaaggaagggtactagatggaaacttgagaaaggactgcttattgataacagctaaggtattcctggaagcagagtaaataaagctcatggcccaccagctagaaagtattcttgccatgagaaaaagaatgtgataagttattcaacttatgaaattcaagttacatgtgaattctgccaggcaatacaaggacctgtggaatatgagtgatgacaaaccctttctatgtactgcgcctggatgtggccagatcagaccccaacaccaacaagattcttgaaaaactgtgaagaagtgggtttgtttaatgagttggcgagtccatttgagaatgaattcaagaaagcttcagaagatgacattaaaaaaatgcctctagatttatcccctcttgcaacacctatcataagaagcaaaattgaggagccttctgttgtagaaacaactcaccaggatagtcctttacctcacccagagtctactaccagtgatgagaaggaagtaccattggcacaaactgcacagcccacatcagctattgttcgtccagcatcattacaggttcccaatgtgctgcttacaagttctgactcaagtgtaattattcagcaggcagtaccttcaccaacctcaagtactgtaatcacccaggcaccatcctctaacaggccaattgtccctgtaccaggcccatttcctcttctgttacatcttcctaatggacaaaccatgcctgttgctattcctgcatcaattacaagttctaatgtgcatgttccagctgcagtccca

SEQ ID NO: 104085 - DNA, 1325 bp, Homo sapiens
  Payload ID: 461
  Gene Symbol: ATF2
  Gene Name: activating transcription factor 2
  ENST ID: ENST00000538946
  CDS Start-End: 15-1004
attacaggttcccaatggctgcttacaagttccaaattattcagcaggcagtaccttcaccaacctcaagtactgtaatcacccaggcaccatcctctaacaggccaattgtccctgtaccaggcccatttcctcttctgttacatcttcctaatggacaaaccatgcctgttgctattcctgcatcaattacaagttctaatgtgcatgttccagctgcagtcccactcgttcgaccagtcaccatggtgcctagtgttccaggaatcccaggtccttcctctccccaaccagtacagtcagaagcaaaaatgagattaaaagctgctttgacccagcaacatcctccagttaccaatggtgatactgtcaaaggtcatggtagcggattggttaggactcagtcagaggaatctcgaccgcagtcattacaacagccagccacatccactacagaaactccggcttctccagctcacacaactccacagacccaaagtacaagtggtcgtcggagaagagcagctaacgaagatcctgatgaaaaaaggagaaagtttttagagcgaaatagagcagcagcttcaagatgccgacaaaaaaggaaagtctgggttcagtctttagagaagaaagctgaagacttgagttcattaaatggtcagctgcagagtgaagtcaccctgctgagaaatgaagtggcacagctgaaacagcttcttctggctcataaagattgccctgtaaccgccatgcagaagaaatctggctatcatactgctgataaagatgatagttcagaagacatttcagtgccgagtagtccacatacagaagctatacagcatagttcggtcagcacatccaatggagtcagttcaacctccaaggcagaagctgtagccacttcagtcctcacccagatggcggaccagagtacagagcctgctctttcacagatcgttatggctccttcctcccagtcacagccctcaggaagttgattaaaaacctgcagtacaacagttttagatactcattagtgacttcaaagggaaatcaaggaaagaccagtttccatttatgcgaaatctgtggttgtaaattttttttttttacttgaaattaaatttggctctaaagttggtgtagcagcagttgatcagactgaaaaacggtttttagtctctggaaaaagactgattttgctttttttataaatattattagatttattaatttttctgtgctcaatgtgtaaattgtattataattcattgtgatttatttcacttttaatttgctggtgttttaataaatggggg

SEQ ID NO: 104086 - DNA, 482 bp, Homo sapiens
  Payload ID: 462
  Gene Symbol: ATF3
  Gene Name: activating transcription factor 3
  Uniprot ID: P18847
  ENST ID: ENST00000336937
  CDS Start-End: 1-321
atgatgcttcaacacccaggccaggtctctgcctcggaagaagagctgaggtttgccatccagaacaagcacctctgccaccggatgtcctctgcgctggaatcagtcactgtcagcgacagacccctcggggtgtccatcacaaaagccgaggtagcccctgaagaagatgaaaggaaaaagaggcgacgagaaagaaataagattgcagctgcaaagtgccgaaacaagaagaaggagaagacggagtgcctgcagaaactcccaaggcccttttgggtccagaagacctgcatatgggctgttgactcatgcaaatgaggtatctgaactgcagcttcagtattagcagagccacaggccgcctctgtggcatcaccagggtttctctgaagaagagggtctgcattttcctaaacccagtgctgctctcccatctcccatcttcctctcgcagcttgatgagccccggtgtgtcccag

SEQ ID NO: 104087 - DNA, 2033 bp, Homo sapiens
  Payload ID: 462
  Gene Symbol: ATF3
  Gene Name: activating transcription factor 3
  Uniprot ID: P18847
  ENST ID: ENST00000341491
  CDS Start-End: 266-811
attacgtcagcctgggactggcaacacggagtaaacgaccgcgccgccagcctgagggctataaaaggggtgatgcaacgctctccaagccacagtcgcacgcagccaggcgcgcactgcacagctctcttctctcgccgccgcccgagcgcacccttcagcccgcgcgccggccgtgagtcctcggtgctcgcccgccggccagacaaacagcccgcccgaccccgtcccgaccctggccgccccgagcggagcctggagcaaaatgatgcttcaacacccaggccaggtctctgcctcggaagtgagtgcttctgccatcgtcccctgcctgtcccctcctgggtcactggtgtttgaggattttgctaacctgacgccctttgtcaaggaagagctgaggtttgccatccagaacaagcacctctgccaccggatgtcctctgcgctggaatcagtcactgtcagcgacagacccctcggggtgtccatcacaaaagccgaggtagcccctgaagaagatgaaaggaaaaagaggcgacgagaaagaaataagattgcagctgcaaagtgccgaaacaagaagaaggagaagacggagtgcctgcagaaagagtcggagaagctggaaagtgtgaatgctgaactgaaggctcagattgaggagctcaagaacgagaagcagcatttgatatacatgctcaaccttcatcggcccacgtgtattgtccgggctcagaatgggaggactccagaagatgagagaaacctctttatccaacagataaaagaaggaacattgcagagctaagcagtcgtggtatgggggcgactggggagtcctcattgaatcctcattttatacccaaaaccctgaagccattggagagctgtcttcctgtgtacctctagaatcccagcagcagagaaccatcaaggcgggagggcctgcagtgattcagcaggcccttcccattctgccccagagtgggtcttggaccagggcaagtgcatctttgcctcaactccaggatttaggccttaacacactggccattcttatgttccagatggcccccagctggtgtcctgcccgcctttcatctggattctacaaaaaaccaggatgcccaccgttaggattcaggcagcagtgtctgtacctcgggtgggagggatggggccatctccttcaccgtggctaccattgtcactcgtaggggatgtggagtgagaacagcatttagtgaagttgtgcaacggccagggttgtgctttctagcaaatatgctgttatgtccagaaattgtgtgtgcaagaaaactaggcaatgtactcttccgatgtttgtgtcacacaacactgatgtgacttttatatgctttttctcagatctggtttctaagagttttggggggcggggctgtcaccacgtgcagtatctcaagatattcaggtggccagaagagcttgtcagcaagaggaggacagaattctcccagcgttaacacaaaatccatgggcagtatgatggcaggtcctctgttgcaaactcagttccaaagtcacaggaagaaagcagaaagttcaacttccaaagggttaggactctccactcaatgtcttaggtcaggagttgtgtctaggctggaagagccaaagaatattccattttcctttccttgtggttgaaaaccacagtcagtggagagatgtttggaaaccacagtcagtggagcctgggtggtacccaggctttagcattattggatgtcaatagcattgtttttgtcatgtagctgttttaagaaatctggcccagggtgtttgcagctgtgagaagtcactcacactggccacaaggacgctggctactgtctattaaaattctgatgtttctgtgaaattctcagagtgtttaattgtactcaatggtatcattacaattttctgtaagagaaaatattacttatttatcctagtattcctaacctgtcagaataataaatattggaaccaagacatggtaaaca

SEQ ID NO: 104088 - DNA, 680 bp, Homo sapiens
  Payload ID: 462
  Gene Symbol: ATF3
  Gene Name: activating transcription factor 3
  ENST ID: ENST00000366981
  CDS Start-End: 155-680
ggcggaggtggggttagcttcagttgaccaaccatgccttgaggataaattggatgggatcagatgggaagatgtgacaagaagagaaatcctcctctatataggatgctctgctgtttcctaaggattttcagcaccttgccccaaaatcaaaatgatgcttcaacacccaggccaggtctctgcctcggaagtgagtgcttctgccatcgtcccctgcctgtcccctcctgggtcactggtgtttgaggattttgctaacctgacgccctttgtcaaggaagagctgaggtttgccatccagaacaagcacctctgccaccggatgtcctctgcgctggaatcagtcactgtcagcgacagacccctcggggtgtccatcacaaaagccgaggtagcccctgaagaagatgaaaggaaaaagaggcgacgagaaagaaataagattgcagctgcaaagtgccgaaacaagaagaaggagaagacggagtgcctgcagaaagagtcggagaagctggaaagtgtgaatgctgaactgaaggctcagattgaggagctcaagaacgagaagcagcatttgatatacatgctcaaccttcatcggcccacgtgtattgtccgggctcagaatgggaggactccagaagatgagagaaacctctttatccaacagataaaag

SEQ ID NO: 104089 - DNA, 858 bp, Homo sapiens
  Payload ID: 462
  Gene Symbol: ATF3
  Gene Name: activating transcription factor 3
  Uniprot ID: P18847
  ENST ID: ENST00000366983
  CDS Start-End: 1-408
atgatgcttcaacacccaggccaggtctctgcctcggaagtgagtgcttctgccatcgtcccctgcctgtcccctcctgggtcactggtgtttgaggattttgctaacctgacgccctttgtcaaggaagagctgaggtttgccatccagaacaagcacctctgccaccggatgtcctctgcgctggaatcagtcactgtcagcgacagacccctcggggtgtccatcacaaaagccgaggtagcccctgaagaagatgaaaggaaaaagaggcgacgagaaagaaataagattgcagctgcaaagtgccgaaacaagaagaaggagaagacggagtgcctgcagaaactcccaaggcccttttgggtccagaagacctgcatatgggctgttgactcatgcaaatgaggtatctgaactgcagcttcagtattagcagagccacaggccgcctctgtggcatcaccagggtttctctgaagaagagggtctgcattttcctaaacccagtgctgctctcccatctcccatcttcctctcgcagcttgatgagccccggtgtgtcccaggtacacccctgcatccaggcagcagcccaggccaccccctcctcactggcccttggctcctttcttgatgcctctgttgcttgtcccccaggagtcggagaagctggaaagtgtgaatgctgaactgaaggctcagattgaggagctcaagaacgagaagcagcatttgatatacatgctcaaccttcatcggcccacgtgtattgtccgggctcagaatgggaggactccagaagatgagagaaacctctttatccaacagataaaagaaggaacattgcagagctaa

SEQ ID NO: 104090 - DNA, 516 bp, Homo sapiens
  Payload ID: 462
  Gene Symbol: ATF3
  Gene Name: activating transcription factor 3
  ENST ID: ENST00000366985
  CDS Start-End: 1-460
cgagcggagcctggagcaaaatgatgcttcaacacccaggccagagctgaggtttgccatccagaacaagcacctctgccaccggatgtcctctgcgctggaatcagtcactgtcagcgacagacccctcggggtgtccatcacaaaagccgaggtagcccctgaagaagatgaaaggaaaaagaggcgacgagaaagaaataagattgcagctgcaaagtgccgaaacaagaagaaggagaagacggagtgcctgcagaaagagtcggagaagctggaaagtgtgaatgctgaactgaaggctcagattgaggagctcaagaacgagaagcagcatttgatatacatgctcaaccttcatcggcccacgtgtattgtccgggctcagaatgggaggactccagaagatgagagaaacctctttatccaacagataaaagaaggaacattgcagagctaagcagtcgtggtatgggggcgactggggagtcctcattgaatcctcattttataccc

SEQ ID NO: 104091 - DNA, 1917 bp, Homo sapiens
  Payload ID: 462
  Gene Symbol: ATF3
  Gene Name: activating transcription factor 3
  Uniprot ID: P18847
  ENST ID: ENST00000366987
  CDS Start-End: 155-700
ggcggaggtggggttagcttcagttgaccaaccatgccttgaggataaattggatgggatcagatgggaagatgtgacaagaagagaaatcctcctctatataggatgctctgctgtttcctaaggattttcagcaccttgccccaaaatcaaaatgatgcttcaacacccaggccaggtctctgcctcggaagtgagtgcttctgccatcgtcccctgcctgtcccctcctgggtcactggtgtttgaggattttgctaacctgacgccctttgtcaaggaagagctgaggtttgccatccagaacaagcacctctgccaccggatgtcctctgcgctggaatcagtcactgtcagcgacagacccctcggggtgtccatcacaaaagccgaggtagcccctgaagaagatgaaaggaaaaagaggcgacgagaaagaaataagattgcagctgcaaagtgccgaaacaagaagaaggagaagacggagtgcctgcagaaagagtcggagaagctggaaagtgtgaatgctgaactgaaggctcagattgaggagctcaagaacgagaagcagcatttgatatacatgctcaaccttcatcggcccacgtgtattgtccgggctcagaatgggaggactccagaagatgagagaaacctctttatccaacagataaaagaaggaacattgcagagctaagcagtcgtggtatgggggcgactggggagtcctcattgaatcctcattttatacccaaaaccctgaagccattggagagctgtcttcctgtgtacctctagaatcccagcagcagagaaccatcaaggcgggagggcctgcagtgattcagcaggcccttcccattctgccccagagtgggtcttggaccagggcaagtgcatctttgcctcaactccaggatttaggccttaacacactggccattcttatgttccagatggcccccagctggtgtcctgcccgcctttcatctggattctacaaaaaaccaggatgcccaccgttaggattcaggcagcagtgtctgtacctcgggtgggagggatggggccatctccttcaccgtggctaccattgtcactcgtaggggatgtggagtgagaacagcatttagtgaagttgtgcaacggccagggttgtgctttctagcaaatatgctgttatgtccagaaattgtgtgtgcaagaaaactaggcaatgtactcttccgatgtttgtgtcacacaacactgatgtgacttttatatgctttttctcagatctggtttctaagagttttggggggcggggctgtcaccacgtgcagtatctcaagatattcaggtggccagaagagcttgtcagcaagaggaggacagaattctcccagcgttaacacaaaatccatgggcagtatgatggcaggtcctctgttgcaaactcagttccaaagtcacaggaagaaagcagaaagttcaacttccaaagggttaggactctccactcaatgtcttaggtcaggagttgtgtctaggctggaagagccaaagaatattccattttcctttccttgtggttgaaaaccacagtcagtggagagatgtttggaaaccacagtcagtggagcctgggtggtacccaggctttagcattattggatgtcaatagcattgtttttgtcatgtagctgttttaagaaatctggcccagggtgtttgcagctgtgagaagtcactcacactggccacaaggacgctggctactgtctattaaaattctgatgtttctgtgaaattctcagagtgtttaattgtactcaatggtatcattacaattttctgtaagagaaaatattacttatttatcctagtattcctaacctgtcagaataataaatattggaaccaagacatggt

SEQ ID NO: 104092 - DNA, 767 bp, Homo sapiens
  Payload ID: 462
  Gene Symbol: ATF3
  Gene Name: activating transcription factor 3
  Uniprot ID: P18847
  ENST ID: ENST00000464547
  CDS Start-End: 1-408
atgatgcttcaacacccaggccaggtctctgcctcggaagtgagtgcttctgccatcgtcccctgcctgtcccctcctgggtcactggtgtttgaggattttgctaacctgacgccctttgtcaaggaagagctgaggtttgccatccagaacaagcacctctgccaccggatgtcctctgcgctggaatcagtcactgtcagcgacagacccctcggggtgtccatcacaaaagccgaggtagcccctgaagaagatgaaaggaaaaagaggcgacgagaaagaaataagattgcagctgcaaagtgccgaaacaagaagaaggagaagacggagtgcctgcagaaactcccaaggcccttttgggtccagaagacctgcatatgggctgttgactcatgcaaatgaggtatctgaactgcagcttcagtattagcagagccacaggccgcctctgtggcatcaccagggtttctctgaagaagagggtctgcattttcctaaacccagtgctgctctcccatctcccatcttcctctcgcagcttgatgagccccggtgtgtcccaggagtcggagaagctggaaagtgtgaatgctgaactgaaggctcagattgaggagctcaagaacgagaagcagcatttgatatacatgctcaaccttcatcggcccacgtgtattgtccgggctcagaatgggaggactccagaagatgagagaaacctctttatccaacagataaaagaaggaacattgcagagctaa

SEQ ID NO: 104093 - DNA, 581 bp, Homo sapiens
  Payload ID: 462
  Gene Symbol: ATF3
  Gene Name: activating transcription factor 3
  Uniprot ID: P18847
  ENST ID: ENST00000613104
  CDS Start-End: 16-390
cacctctgccaccggatgtcctctgcgctggaatcagtcactgtcagcgacagacccctcggggtgtccatcacaaaagccgaggtagcccctgaagaagatgaaaggaaaaagaggcgacgagaaagaaataagattgcagctgcaaagtgccgaaacaagaagaaggagaagacggagtgcctgcagaaagagtcggagaagctggaaagtgtgaatgctgaactgaaggctcagattgaggagctcaagaacgagaagcagcatttgatatacatgctcaaccttcatcggcccacgtgtattgtccgggctcagaatgggaggactccagaagatgagagaaacctctttatccaacagataaaagaaggaacattgcagagctaagcagtcgtggtatgggggcgactggggagtcctcattgaatcctcattttatacccaaaaccctgaagccattggagagctgtcttcctgtgtacctctagaatcccagcagcagagaaccatcaaggcgggagggcctgcagtgattcagcaggcccttcccattctgccccagagtgggtcttggacca

SEQ ID NO: 104094 - DNA, 2031 bp, Homo sapiens
  Payload ID: 462
  Gene Symbol: ATF3
  Gene Name: activating transcription factor 3
  Uniprot ID: P18847
  ENST ID: ENST00000613954
  CDS Start-End: 440-814
tccgctccgttcggccggttctcccgggaagctattaatagcattacgtcagcctgggactggcaacacggagtaaacgaccgcgccgccagcctgagggctataaaaggggtgatgcaacgctctccaagccacagtcgcacgcagccaggcgcgcactgcacagctctcttctctcgccgccgcccgagcgcacccttcagcccgcgcgccggccgtgagtcctcggtgctcgcccgccggccagacaaacagcccgcccgaccccgtcccgaccctggccgccccgagcggagcctggagcaaaatgagtgcttctgccatcgtcccctgcctgtcccctcctgggtcactggtgtttgaggattttgctaacctgacgccctttgtcaaggaagagctgaggtttgccatccagaacaagcacctctgccaccggatgtcctctgcgctggaatcagtcactgtcagcgacagacccctcggggtgtccatcacaaaagccgaggtagcccctgaagaagatgaaaggaaaaagaggcgacgagaaagaaataagattgcagctgcaaagtgccgaaacaagaagaaggagaagacggagtgcctgcagaaagagtcggagaagctggaaagtgtgaatgctgaactgaaggctcagattgaggagctcaagaacgagaagcagcatttgatatacatgctcaaccttcatcggcccacgtgtattgtccgggctcagaatgggaggactccagaagatgagagaaacctctttatccaacagataaaagaaggaacattgcagagctaagcagtcgtggtatgggggcgactggggagtcctcattgaatcctcattttatacccaaaaccctgaagccattggagagctgtcttcctgtgtacctctagaatcccagcagcagagaaccatcaaggcgggagggcctgcagtgattcagcaggcccttcccattctgccccagagtgggtcttggaccagggcaagtgcatctttgcctcaactccaggatttaggccttaacacactggccattcttatgttccagatggcccccagctggtgtcctgcccgcctttcatctggattctacaaaaaaccaggatgcccaccgttaggattcaggcagcagtgtctgtacctcgggtgggagggatggggccatctccttcaccgtggctaccattgtcactcgtaggggatgtggagtgagaacagcatttagtgaagttgtgcaacggccagggttgtgctttctagcaaatatgctgttatgtccagaaattgtgtgtgcaagaaaactaggcaatgtactcttccgatgtttgtgtcacacaacactgatgtgacttttatatgctttttctcagatctggtttctaagagttttggggggcggggctgtcaccacgtgcagtatctcaagatattcaggtggccagaagagcttgtcagcaagaggaggacagaattctcccagcgttaacacaaaatccatgggcagtatgatggcaggtcctctgttgcaaactcagttccaaagtcacaggaagaaagcagaaagttcaacttccaaagggttaggactctccactcaatgtcttaggtcaggagttgtgtctaggctggaagagccaaagaatattccattttcctttccttgtggttgaaaaccacagtcagtggagagatgtttggaaaccacagtcagtggagcctgggtggtacccaggctttagcattattggatgtcaatagcattgtttttgtcatgtagctgttttaagaaatctggcccagggtgtttgcagctgtgagaagtcactcacactggccacaaggacgctggctactgtctattaaaattctgatgtttctgtgaaattctcagagtgtttaattgtactcaatggtatcattacaattttctgtaagagaaaatattacttatttatcctagtattcctaacctgtcagaataataaatattggaaccaagacatggt

SEQ ID NO: 104095 - DNA, 2019 bp, Homo sapiens
  Payload ID: 463
  Gene Symbol: ATF4
  Gene Name: activating transcription factor 4
  Uniprot ID: P18848
  ENST ID: ENST00000337304
  CDS Start-End: 883-1938
tttctactttgcccgcccacagatgtagttttctctgcgcgtgtgcgttttccctcctccccgccctcagggtccacggccaccatggcgtattaggggcagcagtgcctgcggcagcattggcctttgcagcggcggcagcagcaccaggctctgcagcggcaacccccagcggcttaagccatggcgtgagtaccggggcgggtcgtccagctgtgctcctggggccggcgcgggttttggattggtggggtgcggcctggggccagggcggtgccgccaagggggaagcgatttaacgagcgcccgggacgcgtggtctttgcttgggtgtccccgagacgctcgcgtgcctgggatcgggaaagcgtagtcgggtgcccggactgcttccccaggagccctacagccctcggaccccgagccccgcaagggtcccaggggtcttggctgttgccccacgaaacgtggcaggaaccaagatggcggcggcagggcggcggcgcgggcgtgagtcaagggcgggcggtgggcggggcgcggccgccctggccgtatttggacgtggggacggagcgctttcctcttggcggccggtggaagaatcccctggtctccgtgagcgtccattttgtggaacctgagttgcaagcagggaggggcaaatacaactgccctgttcccgattctctagatggccgatctagagaagtcccgcctcataagtggaaggatgaaattctcagaacagctaacctctaatgggagttggcttctgattctcattcaggcttctcacggcattcagcagcagcgttgctgtaaccgacaaagacaccttcgaattaagcacattcctcgattccagcaaagcaccgcaacatgaccgaaatgagcttcctgagcagcgaggtgttggtgggggacttgatgtcccccttcgaccagtcgggtttgggggctgaagaaagcctaggtctcttagatgattacctggaggtggccaagcacttcaaacctcatgggttctccagcgacaaggctaaggcgggctcctccgaatggctggctgtggatgggttggtcagtccctccaacaacagcaaggaggatgccttctccgggacagattggatgttggagaaaatggatttgaaggagttcgacttggatgccctgttgggtatagatgacctggaaaccatgccagatgaccttctgaccacgttggatgacacttgtgatctctttgcccccctagtccaggagactaataagcagcccccccagacggtgaacccaattggccatctcccagaaagtttaacaaaacccgaccaggttgcccccttcaccttcttacaacctcttcccctttccccaggggtcctgtcctccactccagatcattcctttagtttagagctgggcagtgaagtggatatcactgaaggagataggaagccagactacactgcttacgttgccatgatccctcagtgcataaaggaggaagacaccccttcagataatgatagtggcatctgtatgagcccagagtcctatctggggtctcctcagcacagcccctctaccaggggctctccaaataggagcctcccatctccaggtgttctctgtgggtctgcccgtcccaaaccttacgatcctcctggagagaagatggtagcagcaaaagtaaagggtgagaaactggataagaagctgaaaaaaatggagcaaaacaagacagcagccactaggtaccgccagaagaagagggcggagcaggaggctcttactggtgagtgcaaagagctggaaaagaagaacgaggctctaaaagagagggcggattccctggccaaggagatccagtacctgaaagatttgatagaagaggtccgcaaggcaagggggaagaaaagggtcccctagttgaggatagtcaggagcgtcaatgtgcttgtacatagagtgctgtagctgtgtgttccaataaattattttgtagggaaa

SEQ ID NO: 104096 - DNA, 1419 bp, Homo sapiens
  Payload ID: 463
  Gene Symbol: ATF4
  Gene Name: activating transcription factor 4
  Uniprot ID: P18848
  ENST ID: ENST00000396680
  CDS Start-End: 281-1336
tttctactttgcccgcccacagatgtagttttctctgcgcgtgtgcgttttccctcctccccgccctcagggtccacggccaccatggcgtattaggggcagcagtgcctgcggcagcattggcctttgcagcggcggcagcagcaccaggctctgcagcggcaacccccagcggcttaagccatggcgcttctcacggcattcagcagcagcgttgctgtaaccgacaaagacaccttcgaattaagcacattcctcgattccagcaaagcaccgcaacatgaccgaaatgagcttcctgagcagcgaggtgttggtgggggacttgatgtcccccttcgaccagtcgggtttgggggctgaagaaagcctaggtctcttagatgattacctggaggtggccaagcacttcaaacctcatgggttctccagcgacaaggctaaggcgggctcctccgaatggctggctgtggatgggttggtcagtccctccaacaacagcaaggaggatgccttctccgggacagattggatgttggagaaaatggatttgaaggagttcgacttggatgccctgttgggtatagatgacctggaaaccatgccagatgaccttctgaccacgttggatgacacttgtgatctctttgcccccctagtccaggagactaataagcagcccccccagacggtgaacccaattggccatctcccagaaagtttaacaaaacccgaccaggttgcccccttcaccttcttacaacctcttcccctttccccaggggtcctgtcctccactccagatcattcctttagtttagagctgggcagtgaagtggatatcactgaaggagataggaagccagactacactgcttacgttgccatgatccctcagtgcataaaggaggaagacaccccttcagataatgatagtggcatctgtatgagcccagagtcctatctggggtctcctcagcacagcccctctaccaggggctctccaaataggagcctcccatctccaggtgttctctgtgggtctgcccgtcccaaaccttacgatcctcctggagagaagatggtagcagcaaaagtaaagggtgagaaactggataagaagctgaaaaaaatggagcaaaacaagacagcagccactaggtaccgccagaagaagagggcggagcaggaggctcttactggtgagtgcaaagagctggaaaagaagaacgaggctctaaaagagagggcggattccctggccaaggagatccagtacctgaaagatttgatagaagaggtccgcaaggcaagggggaagaaaagggtcccctagttgaggatagtcaggagcgtcaatgtgcttgtacatagagtgctgtagctgtgtgttccaataaattattttgtagggaaagt

SEQ ID NO: 104097 - DNA, 1910 bp, Homo sapiens
  Payload ID: 463
  Gene Symbol: ATF4
  Gene Name: activating transcription factor 4
  Uniprot ID: P18848
  ENST ID: ENST00000404241
  CDS Start-End: 774-1829
aggtggacaggcccggcgcgccctctcgaggccccttcaacctcccgggggcagcagcgccgtgtcggctatgaatggggcctctggaaaactcaggcttggaacagcacctcgcgcgataacctggcgtcctcggccttcacaataaaaactcttcgccggaaaacgacctttccccgcccactgcgctgacaccggaagcgaggcgtgtctgggagatcactccgcgctccggcggcgaaggaaagaacggactctgatcatagaagcctagtaaagtagtacacctctctcctttcgtgaggccataagaacaaactccttttctcgtcacagctacgccctgggcataaacggttggggcgtcaaagggagggagggaagggagcgggcgggaggagacggtcacgtggtcgcggcggaaggatgcgtctgtgctgcgtccccatagagacgaagtctataaagggccggcgggcggccacggcagccatttctactttgcccgcccacagatgtagttttctctgcgcgtgtgcgttttccctcctccccgccctcagggtccacggccaccatggcgtattaggggcagcagtgcctgcggcagcattggcctttgcagcggcggcagcagcaccaggctctgcagcggcaacccccagcggcttaagccatggcgcttctcacggcattcagcagcagcgttgctgtaaccgacaaagacaccttcgaattaagcacattcctcgattccagcaaagcaccgcaacatgaccgaaatgagcttcctgagcagcgaggtgttggtgggggacttgatgtcccccttcgaccagtcgggtttgggggctgaagaaagcctaggtctcttagatgattacctggaggtggccaagcacttcaaacctcatgggttctccagcgacaaggctaaggcgggctcctccgaatggctggctgtggatgggttggtcagtccctccaacaacagcaaggaggatgccttctccgggacagattggatgttggagaaaatggatttgaaggagttcgacttggatgccctgttgggtatagatgacctggaaaccatgccagatgaccttctgaccacgttggatgacacttgtgatctctttgcccccctagtccaggagactaataagcagcccccccagacggtgaacccaattggccatctcccagaaagtttaacaaaacccgaccaggttgcccccttcaccttcttacaacctcttcccctttccccaggggtcctgtcctccactccagatcattcctttagtttagagctgggcagtgaagtggatatcactgaaggagataggaagccagactacactgcttacgttgccatgatccctcagtgcataaaggaggaagacaccccttcagataatgatagtggcatctgtatgagcccagagtcctatctggggtctcctcagcacagcccctctaccaggggctctccaaataggagcctcccatctccaggtgttctctgtgggtctgcccgtcccaaaccttacgatcctcctggagagaagatggtagcagcaaaagtaaagggtgagaaactggataagaagctgaaaaaaatggagcaaaacaagacagcagccactaggtaccgccagaagaagagggcggagcaggaggctcttactggtgagtgcaaagagctggaaaagaagaacgaggctctaaaagagagggcggattccctggccaaggagatccagtacctgaaagatttgatagaagaggtccgcaaggcaagggggaagaaaagggtcccctagttgaggatagtcaggagcgtcaatgtgcttgtacatagagtgctgtagctgtgtgttccaataaattattttgtagggaaa

SEQ ID NO: 104098 - DNA, 2069 bp, Homo sapiens
  Payload ID: 464
  Gene Symbol: ATF5
  Gene Name: activating transcription factor 5
  Uniprot ID: Q9Y2D1
  ENST ID: ENST00000423777
  CDS Start-End: 378-1226
atccgggagggccgtgctccgccacccagtatatatctgtccccagtccccggggccgcctcattccctgtcctcggatcacagtctcttctcactacagtgtcgccgcctctgcctgcgtagccccggccatggctctgtagcctcgacccctttgtgcccccggcccgtctccgcgctcaccacgcctgcgctctccgctcccaccttctttcttcagccgaggccgccgccgcctctccttgctgcagccatggagtcttccactttcgccttggtgcctgtcttcgcccacctgagcatcctccagagcctcgtgccagctgctggtgcagcctctcctgttgccatcagtgcccagcacctgtgctacagccatgtcactcctggcgaccctggggctggagctggacagggccctgctcccagctagtgggctgggatggctcgtagactatgggaaactccccccggcccctgcccccctggctccctatgaggtccttgggggagccctggagggcgggcttccagtggggggagagcccctggcaggtgatggcttctctgactggatgactgagcgagttgatttcacagctctcctccctctggagcctcccttaccccccggcaccctcccccaaccttccccaaccccacctgacctggaagctatggcctccctcctcaagaaggagctggaacagatggaagacttcttcctagatgccccgcccctcccaccaccctccccgccgccactaccaccaccaccactaccaccagccccctccctccccctgtccctcccctcctttgacctcccccagccccctgtcttggatactctggacttgctggccatctactgccgcaacgaggccgggcaggaggaagtggggatgccgcctctgcccccgccacagcagccccctcctccttctccacctcaaccttctcgcctggccccctacccacatcctgccaccacccgaggggaccgcaagcaaaagaagagagaccagaacaagtcggcggctctgaggtaccgccagcggaagcgggcagagggtgaggccctggagggcgagtgccaggggctggaggcacggaatcgcgagctgaaggaacgggcagagtccgtggagcgcgagatccagtacgtcaaggacctgctcatcgaggtttacaaggcccggagccagaggacccgtagctgctagaagggcaggggtgtggcttctgggggctggtcttcagctctggcgccttcatccccctgcctctaccttcattccaaacccctctcggccgggtgcagtggcttatgcttgtaatcccagcactttgggaggccaaggcaggaggatcgtttgaggccaggaggtcaataccagcctgggcaacatagtaagaccctgtctctattaaaaaaaaaaaatcaacccttcttccccaccaaaccacccaactcctctctactcttatccttttatcctctgtctctgcttatcacctctcttgcgtatttctggatctccttccctcctttctcgtccaaatcatgaaatgtttggccttagtcaatgtctatgcccgtcacataacagccgaggcaccgaggcccacagggaagcagctgggagcttggaaacctggtctcttgaatttcaaacctggtttcttacaggtggttgtctggggtgggtggagtggcgacaggatagagctgaaggactatgcaaatgaggaagtaagtcagggcgggctttgagaaggggacccatatcctacaggcaaaaagcaggctaggtgaccttgggacactacgctaagggagggaggctaaaggcggccaggtttgcagtgcgggaagatgagcaggccagtgggaggaggggcagggcagggctgtagttggtgactgggtgttcattttagctctaagaaaaaaaatcagtgtttcgtgaaggtgttggagaggggctgtgtctgggtgagggatggcggggtactgatttttttgggaggttatgagcaaaaataaaacgaaacatttcctctgg

SEQ ID NO: 104099 - DNA, 722 bp, Homo sapiens
  Payload ID: 464
  Gene Symbol: ATF5
  Gene Name: activating transcription factor 5
  ENST ID: ENST00000596658
  CDS Start-End: 334-722
ggcagagcgaggagtgggatttgagtggataacattgctgaagggctgcggcctggggcagttcccctgggaactggtttgggatggaagctaggaaggcagtggggccaaaaggaaatattttagaggaaggggcgtggctggaagaaaatgtccctgggattgagtttttccttgaggcgaaatattctgaggtggatgggaggggcctaaggtcttccactttcgccttggtgcctgtcttcgcccacctgagcatcctccagagcctcgtgccagctgctggtgcagcctctcctgttgccatcagtgcccagcacctgtgctacagccatgtcactcctggcgaccctggggctggagctggacagggccctgctcccagctagtgggctgggatggctcgtagactatgggaaactccccccggcccctgcccccctggctccctatgaggtccttgggggagccctggagggcgggcttccagtggggggagagcccctggcaggtgatggcttctctgactggatgactgagcgagttgatttcacagctctcctccctctggagcctcccttaccccccggcaccctcccccaaccttccccaaccccacctgacctggaagctatggcctccctcctcaagaaggagctggaacagatggaagacttcttcctagatgccccgcccctcccaccaccctccccgccgccact

SEQ ID NO: 104100 - DNA, 1637 bp, Homo sapiens
  Payload ID: 464
  Gene Symbol: ATF5
  Gene Name: activating transcription factor 5
  Uniprot ID: Q9Y2D1
  ENST ID: ENST00000595125
  CDS Start-End: 583-1431
atttgggagagtgctgtgactcatgctggactctaacccacgagggtttctcagagtcagcagctgggggatgaagaagtgaaaagtgactggcaggaaattctgcaagcaaggaaagggaaagagaaatgaactggtgcaggtctgcgggaagagaatgaggctggatcctcaaaatcacaggaggaagcaggcccagacctcagaggcagaaagagaaagaaaccagagcttagagtcaggaggaggaaaccagaccccggagccacaaggagagggctggatccccggctcagagggaagagtgtcgccgcctctgcctgcgtagccccggccatggctctgtagcctcgacccctttgtgcccccggcccgtctccgcgctcaccacgcctgcgctctccgctcccaccttctttcttcagccgaggccgccgccgcctctccttgctgcagccatggagtcttccactttcgccttggtgcctgtcttcgcccacctgagcatcctccagagcctcgtgccagctgctggtgcagcctctcctgttgccatcagtgcccagcacctgtgctacagccatgtcactcctggcgaccctggggctggagctggacagggccctgctcccagctagtgggctgggatggctcgtagactatgggaaactccccccggcccctgcccccctggctccctatgaggtccttgggggagccctggagggcgggcttccagtggggggagagcccctggcaggtgatggcttctctgactggatgactgagcgagttgatttcacagctctcctccctctggagcctcccttaccccccggcaccctcccccaaccttccccaaccccacctgacctggaagctatggcctccctcctcaagaaggagctggaacagatggaagacttcttcctagatgccccgcccctcccaccaccctccccgccgccactaccaccaccaccactaccaccagccccctccctccccctgtccctcccctcctttgacctcccccagccccctgtcttggatactctggacttgctggccatctactgccgcaacgaggccgggcaggaggaagtggggatgccgcctctgcccccgccacagcagccccctcctccttctccacctcaaccttctcgcctggccccctacccacatcctgccaccacccgaggggaccgcaagcaaaagaagagagaccagaacaagtcggcggctctgaggtaccgccagcggaagcgggcagagggtgaggccctggagggcgagtgccaggggctggaggcacggaatcgcgagctgaaggaacgggcagagtccgtggagcgcgagatccagtacgtcaaggacctgctcatcgaggtttacaaggcccggagccagaggacccgtagctgctagaagggcaggggtgtggcttctgggggctggtcttcagctctggcgccttcatccccctgcctctaccttcattccaaacccctctcggccgggtgcagtggcttatgcttgtaatcccagcactttgggaggccaaggcaggaggatcgtttgaggccaggaggtcaataccagcctgggcaacatagtaagaccctgtctctatt

SEQ ID NO: 104101 - DNA, 828 bp, Homo sapiens
  Payload ID: 464
  Gene Symbol: ATF5
  Gene Name: activating transcription factor 5
  ENST ID: ENST00000597227
  CDS Start-End: 464-828
cacagtctcttctcactacagtgtcgccgcctctgcctgcgtagccccggccatggctctgtagcctcgacccctttgtgcccccggcccgtctccgcgctcaccacgcctgcgctctccgctcccaccttctttcttcagccgaggccgccgccgcctctccttgctgcagccatggatagcccaccagtgccccgtagtgaaagagctgcggaccctgaatggccgcacatgcgcattgatccccaagagggcggaggtgtaaaggcaattggaccgctcgggcgacgtagcatgcgccttggccctcggcgcagagccgcgtgtggacgggtggcgttcgggtcttccactttcgccttggtgcctgtcttcgcccacctgagcatcctccagagcctcgtgccagctgctggtgcagcctctcctgttgccatcagtgcccagcacctgtgctacagccatgtcactcctggcgaccctggggctggagctggacagggccctgctcccagctagtgggctgggatggctcgtagactatgggaaactccccccggcccctgcccccctggctccctatgaggtccttgggggagccctggagggcgggcttccagtggggggagagcccctggcaggtgatggcttctctgactggatgactgagcgagttgatttcacagctctcctccctctggagcctcccttaccccccggcaccctcccccaaccttccccaaccccacctgacctggaagctatggcctccctcctcaagaaggagctggaacagatggaagacttcttcctagatgccccgcccct

SEQ ID NO: 104102 - DNA, 682 bp, Homo sapiens
  Payload ID: 464
  Gene Symbol: ATF5
  Gene Name: activating transcription factor 5
  ENST ID: ENST00000600336
  CDS Start-End: 304-570
cggatcacagtctcttctcactacagtgtcgccgcctctgcctgcgtagccccggccatggctctgtagcctcgacccctttgtgcccccggcccgtctccgcgctcaccacgcctgcgctctccgctcccaccttctttcttcagccgaggccgccgccgcctctccttgctgcagccatggagtcttccactttcgccttggtgcctgtcttcgcccacctgagcatcctccagagcctcgtgccagctgctggtgcagcctctcctgttgccatcagtgcccagcacctgtgctacagccatgtcactcctggcgaccctggggctggagctggacagggccctgctcccagctagtgggctgggatggctcgtagactatgggaaactccccccggcccctgcccccctggctccctatgaggtccttgggggagccctggagggcgggcttccagtggggggagagcccctggcaggtaagggcaggtggaaggtggagctggggagtggagggcaggggaagatgggggaggaagaactcatccatgtattcaataaatattgagtgcctacaatgtgccaggcactgttttaggtgctgaggatacggctgggaacaagaagaacatggtctgtgccttccagcagctcacactgtggggagtagaccagagata

SEQ ID NO: 104103 - DNA, 7496 bp, Homo sapiens
  Payload ID: 465
  Gene Symbol: ATF6
  Gene Name: activating transcription factor 6
  Uniprot ID: P18850
  ENST ID: ENST00000367942
  CDS Start-End: 68-2080
ttttgtccgcctgccgccgccgtcccagatattaatcacggagttccagggagaaggaacttgtgaaatgggggagccggctggggttgccggcaccatggagtcaccttttagcccgggactctttcacaggctggatgaagattgggattctgctctctttgctgaactcggttatttcacagacactgatgagctgcaattggaagcagcaaatgagacgtatgaaaacaattttgataatcttgattttgatttggatttgatgccttgggagtcagacatttgggacatcaacaaccaaatctgtacagttaaagatattaaggcagaacctcagccactttctccagcctcctcaagttattcagtctcgtctcctcggtcagtggactcttattcttcaactcagcatgttcctgaggagttggatttgtcttctagttctcagatgtctcccctttccttatatggtgaaaactctaatagtctctcttcagcggagccactgaaggaagataagcctgtcactggtcctaggaacaagactgaaaatggactgactccaaagaaaaaaattcaggtgaattcaaaaccttcaattcagcccaagcctttattgcttccagcagcacccaagactcaaacaaactccagtgttccagcaaaaaccatcattattcagacagtaccaacgcttatgccattggcaaagcagcaaccaattatcagtttacaacctgcacccactaaaggccagacggttttgctgtctcagcctactgtggtacaacttcaagcacctggagttctgccctctgctcagccagtccttgctgttgctgggggagtcacacagctccctaatcacgtggtgaatgtggtaccagccccttcagcgaatagcccagtgaatggaaaactttccgtgactaaacctgtcctacaaagtaccatgagaaatgtcggttcagatattgctgtgctaaggagacagcaacgtatgataaaaaatcgagaatccgcttgtcagtctcgcaagaagaagaaagaatatatgctagggttagaggcgagattaaaggctgccctctcagaaaacgagcaactgaagaaagaaaatggaacactgaagcggcagctggatgaagttgtgtcagagaaccagaggcttaaagtccctagtccaaagcgaagagttgtctgtgtgatgatagtattggcatttataatactgaactatggacctatgagcatgttggaacaggattccaggagaatgaaccctagtgtgagccctgcaaatcaaaggaggcaccttctaggattttctgctaaagaggcacaggacacatcagatggtattatccagaaaaacagctacagatatgatcattctgtttcaaatgacaaagccctgatggtgctaactgaagaaccattgctttacattcctccacctccttgtcagcccctaattaacacaacagagtctctcaggttaaatcatgaacttcgaggatgggttcatagacatgaagtagaaaggaccaagtcaagaagaatgacaaataatcaacagaaaacccgtattcttcagggtgctctggaacagggctcaaattctcagctgatggctgttcaatacacagaaaccactagtagtatcagcaggaactcagggagtgagctacaagtgtattatgcttcacccagaagttatcaagacttttttgaagccatccgcagaaggggagacacattttatgttgtgtcatttcgaagggatcacctgctgttaccagctaccacccataacaagaccacaagaccaaaaatgtcaattgtgttaccagcaataaacataaatgagaatgtgatcaatgggcaggactacgaagtgatgatgcagattgactgtcaggtgatggacaccaggatcctccatatcaaaagttcgtcagttcctccttacctccgagatcagcagaggaatcaaaccaacaccttctttggctcccctcccgcagccacagaggcaacccacgttgtcagcaccatccctgagtcattacaatagcaccctgcagctatgctggaaaactgagcgtgggaccctgccagactgaagagcaggtgagcaaaatgctgctttctgccttggtggcaggcagagaactgtctcgtactagaattcaaggaggaaagaagaagaaataaaagaagctgctccatttttcatcatctacccatctatttggaaagcactggaattcagatgcaagagaacaatgtttcttcagtggcaaatgtagccctgcatcctccagtgttacctggtgtagatttttttttctgtacctttctaaacctctcttccctctgtgatggttttgtgtttaaacagtcatcttcttttaaataatatccacctctcctttttgccatttcacttattgattcataaagtgaattttatttaaagctatgccacacatgcatgttcaaatggtttccactgattcgatttttcattcatttaatgcaaacccattctggatattgtgcttatttgagaaaacacatttcaaaaccagaaaagccaaaaacactccaaaaacaagcaaaacaatttggagctttagataaaaggaaaaactcccagttggtaaagtttatctttacttaggatttgtggctcacacctaaacaaagggggtcagggagtgggtacaaatttgagaaaatagaagggtaagggaagggccagtggtggggtttggagagaggagatagctccattaatacacatgtttaaaagatggaaagttcacgcctgtaatcccagcactttgggaggccgaggcgggtggatcacgaggtcaggagatcaagaccatcccggctaaaacggtgaaaccccgtctctactaaaaatacaaaaaattagccgggcgtagtgacgggcgcctgtagtcccagctacttgggaggctgaggcaggagaatggcgtgaacccgggaggcggagcttgcagtgagccgagatcccgccactgcactccagcctgggcgacagagcgagactccgtctcaaaaaaaaaaaaaaaaaaaaaaaaagatggaaagttcgatgtgactgcagtatgagattaaagccacaactattgtttattttggggactctaggccaccaagtattagcacacatacttatgttttctctactaatctggtccaggtcctcatggaccacaggacaaagctttcattttcattcattcttctattgaaattataccaaattcagctgaggaatatggaagtaactttagacttaaacaagacaaaagttttttcactgaagaattgacaagtatttgctccttaaaacaacgcagattagtgaacgtggattcctgctgagggagtgcatcccataatatggcaataattttcagtttctccaacgaaaagatagtgaaggaattaaatcttttgtcctcccatggttaaaaaaaaaaaaaaagctgtgttcatttttactgtactatgcctcttttttcaccatagtagacaattatgtttcatttgatgaattcatagaactggatctcatacagcgatgtcctctctaatgttctacctttcagtttctaaagtgagtcttcctccctctcctacaaaacttttcaattttttgatgtaactcatctacaaatactgtttcttaccccagttgacttgcctttgtcagatttcttcttgttccacactatagcaatcaatttctcttcttccttacaagaaagggaacgagaaattgtagcaacctctcaaggattatatgcagctagttagttttctgcctgtgaaattaggtctggctcctaaataattttaaagaaccatcagcacttctaactctctggacaggtgcctctttgtccaagctagttaaatgctttccaaggaaatcagttcaacttttgtgagcggggaaaagcagggctttattgttgtgttacctgggagtctggagtttgaaaagtgctaattaaccttcctctttttccacattacaaacctttttaagcagcgcagcactccccttagatttggctatcctgggtgattttcagacaagaaccattttctctggggaccattcttctgctgggtgccaaggaatataaggcaaatgcccagaagaccttcaggtgactgggcagtcttatcatgggatatttcttctggccctgccccttcccattctgtaatgtgaattagccacaccagaggctgtgaccatggctagtagacagtggcaacatagtcatccccaagatgctaatcttctgctggaactgtcatacgttatcatggtcaatgtaaacctggtttgtgtggggtgattataaatagagtttccctcctctctgtgacagaatcacaggagaaggacccatctcgtggccttcttgttcttagcgcttcacttttacttcatccctcgattcccagctttttctatcatcattttgccaactcctcagatgcaagactttggttatgtcatactcaccaacgttagtccctctcttccaggtgaaaaggtgggtagcggttgggagggagtctccactgaagagcaggaaggtggtagcagggccggcagctctgccacagagctaggggtgcctgtaaggtgccgcctagagcagcctgggagctttgccttcttttgtctctcactagcccttctactctttgtcattgcctgttcttgagtggatctttgaaatgaggggacaggattctcctaagggtagagtttcaggaaatgagtgaaaggcaattgacaaatgcaaagaagtagtcactttttaaattgctggcaaagctataattaatccctaggcacaattgtagtttttattttaatgtttgtatgcacaaggccctttaggaaatgagaagttgccatgccagattaatttttttttttttttttggtgggattgccttttgggggttgcagccagaaattgtgggtaatgtgtgtatttttttatttattaaattttaaacaggattgtgcaagcttatgagacaattagataaactcatggaggaggcaggtcctcctgttattagatgattttgtgctcttggggctgacaataatacactcttgggaagtgatggtagagactgatgggaatagtctttctgcctggttgcaagtcccaaatttttaagggttaatggaagtaagtggatgtttcctcatgttaactactgaatcagatgttaggagcttgtccctttggggttgacttatgcccagcagtacagggacacagcttcattagagtgttagtgtaaactaactccaaagttaggagttaatgtgaaaggatcatccttgaaacaaatctgctgtttgccatgcttgtagtacagaaacttcacatggagttttgggtgggatttgtgttttcacaagtaaaaaatccctcacgattataaaactcagagcatcatctaatttttttttttaatgactacaagttccagcacaaaactggcatttctttgccatttcttgccagtaagaagttgacacggaggtatttgaaagcaatgttatgtgagtcattcttaagtgttccaagtaagtttagaaacagaaaaggaacttgggattcaaattgatttttcaaatcatttttaaagagacatcatcctgactaaatcttagcctgaaccttcctcccctgtgtgtattccccggtagtcaccgcagcgagatgctggtgagactgccgtggtggcatttagcatcgttaaaactggaaaactctcaagctctttgccactttcctactattttttgattcttgccattttaccaagcttaggttgtgaaacttgacagaaatgtattacaggaaaaacttataattgtatttgactttctaacacattgcaaagtttcaaagtgactttcactttcaacaacatattagaagtaaccacttttgctttcacagcctgaagagttagagcctgatctgatgccccctttcactctgaagtcatgggaaattttccagccatgaaagccctctttccactgcatactgatgggctgactcagcttccttcagccgactgagatcttttcatactattggctatttcataccaattaacctcttaaataagattgtgaattgccaaaattgatagacacttattaccacctgtggactccatattccttaccacaaatgttattttcatcagtcctgagtcattttaacttacagaaattaggattgttgctgctaatatgaataccaattataacttttagaaacaagaataaagcctaaaagagaatgaaatataagaaatgttcgttcccacccctaataacatttggaagtgaatattcccattttcttccacccacagggattgggattgatttttaatttcctaggaaacaatactagactacccaaaaagatgttgccagaatccaaaaggaactatgctcgtaaaagaaatgcagttttctcctacctaaaaaaaagaaagtaaagtgtgttctgttcttatctttttaatgactaagctttaaacagtttattttgggtaagactagaactttcggccatttgttctaatatgtgtgttattagatgcaatagaatttatgaaaagaagaatgacaaaggtatctgattagaaaatttgatcttacgcatgaatccatgtcatggccagccactgtcacatagtgggtgccattctcaacatattggtttgctaactttaagcattagggatttagcacactaaaatacttttaattatattaggtttggtaactaaggagtaaataaatcataatttatcatttgccaaggccaacaaacaacactattgtgctgtttgctctcaatgaagttgaataaaccaggaggcttggcatatcccctttatgttaatcccagctagagattagtaggttgactttcacagcaattgtatattgatccattttaactcatccttgccataatttccaggccagtcaccaggacagaggagatgatggggaaacagagctttagatgaaaactactatgcactactagccttagaggcactggtttcctgttaccactttggcaagtatggatggtctaagtccagtagggcttcatccatggagccattagaactgaggggggagtgttagagatgccatttcaccaggatctttttgctcaggttgtacccatgccaattgaagaacgtgttaaagatgaggaggagagatgtaccattctctcccttaataatgatgttggtttgcaaaacctaaagaaataataacaacagactatttcatactttcaagcaagtctttatactacctgttatttctctaaaattcaaataaagaatttttaaactta

SEQ ID NO: 104104 - DNA, 2620 bp, Homo sapiens
  Payload ID: 466
  Gene Symbol: ATF6B
  Gene Name: activating transcription factor 6 beta
  Uniprot ID: Q99941
  ENST ID: ENST00000293709
  CDS Start-End: 34-2145
aaccgtctcctggttggggggtgggggggaaagatggcggagctgatgctgctcagcgagattgctgacccgacgcgtttcttcaccgacaacctgcttagcccggaggactggggtctgcagaacagcaccttgtattctggcctagatgaagtggccgaggagcagacgcagctcttccgttgcccggagcaggatgtcccgtttgacggcagctccctggacgtggggatggatgtcagcccctctgagcccccatgggaactcctgccgatcttcccagatcttcaggtgaagtctgagccatcttccccctgctcttcctcctccctcagctccgagtcatcgcgtctctccacagagccatccagcgaggctcttggggtaggggaggtgctccatgtgaagacagagtccttggcacccccactgtgtctcctgggagatgacccaacatcctcatttgaaaccgtccagatcaacgttatccccacctctgatgattcctcagatgtccagaccaagatagaacctgtctctccatgttcttccgtcaactctgaggcctccctgctctcagccgactcctccagccaggcttttataggagaggaggtcctggaagtgaagacagagtccctgtccccttcaggatgcctcctgtgggatgtcccagccccctcacttggagctgtccagatcagcatgggcccatcccttgatggctcctcaggcaaagccctgcccacccggaagccgccactgcagcccaaacctgtagtgctaaccactgtcccaatgccatccagagctgtgcctcccagcaccacagtccttctgcagtccctcgtccagccacccccagtgtccccagttgtcctcatccagggtgctattcgagtccagcctgaagggccggctccctctctaccacggcctgagaggaagagcatcgttcccgctcctatgcctggaaactcctgcccgcctgaagtggatgcaaagctgctgaagcggcagcagcgaatgatcaagaaccgggagtcagcctgccagtcccggagaaagaagaaagagtatctgcagggactggaggctcggctgcaagcagtactggctgacaaccagcagctccgccgagagaatgctgccctccggcggcggctggaggccctgctggctgaaaacagcgagctcaagttagggtctggaaacaggaaggtggtctgcatcatggtcttccttctcttcattgccttcaactttggacctgtcagcatcagtgagcctccttcagctcccatctctcctcggatgaacaagggggagcctcaaccccggagacacttgctggggttctcagagcaagagccagttcagggagttgaacctctccaggggtcctcccagggccctaaggagccccagcccagccccacagaccagcccagtttcagcaacctgacagccttccctgggggcgccaaggagctactactaagagacctagaccagctcttcctctcctctgattgccggcacttcaaccgcactgagtccctgaggcttgctgacgagttgagtggctgggtccagcgccaccagagaggccggaggaagatccctcagagggcccaggagagacagaagtctcagccacggaagaagtcacctccagttaaggcagtccccatccaaccccctggacccccagaaagggattctgtgggccagctgcaactatatcgccacccagaccgttcgcagccagcattcttggatgcaattgaccgacgggaagacacattttatgttgtctctttccgaagggaccacctgctgctcccagccatcagccacaacaagacctcccggcccaagatgtccctggtgatgcctgccatggcccccaatgagaccctgtcaggccgtggggccccgggggactatgaggagatgatgcagatcgagtgtgaggtcatggacaccagggtgattcacatcaagacctccacagtgcccccctcgctccgaaaacagccatccccaaccccaggcaatgccacaggtggccccttgccagtctctgcagccagccaggcccaccaggcctcccaccagcccctctacctcaatcatccctgacctctgccattcacactgacttagaacggggggagggggtaccaggtggccaggtgggactgtttcaaatttccctgatccccaggcttggggcaattggtaaaggaaagagcaggtgtgggggttaagcacttatttgaggtgggggtgttcacctctcttctcatcccttttcagaatatagggctcctctcattcctgtgaacccccagtcccggcttctttgtttgaggggattgtgtgaggttcagttgtggggtgggtggtgagctgctgcatattttttattttgtttctctagtgttatggcagtggaggtgggaatttagtccccaggtgggacaagggaagttttttcattttggagctagttactgggagtaagggagggtggggtgggggggagttcaggtttatgtgtgtgcatttcttttttattattattaaataaacaacttggagggagttgaaggaa

SEQ ID NO: 104105 - DNA, 2624 bp, Homo sapiens
  Payload ID: 466
  Gene Symbol: ATF6B
  Gene Name: activating transcription factor 6 beta
  Uniprot ID: Q99941
  ENST ID: ENST00000375201
  CDS Start-End: 47-2149
ggcgggccttgggaaccgtctcctggttggggggtgggggggaaagatggcggagctgatgctgctcagcgagattgctgacccgacgcgtttcttcaccgacaacctgcttagcccggaggactgggacagcaccttgtattctggcctagatgaagtggccgaggagcagacgcagctcttccgttgcccggagcaggatgtcccgtttgacggcagctccctggacgtggggatggatgtcagcccctctgagcccccatgggaactcctgccgatcttcccagatcttcaggtgaagtctgagccatcttccccctgctcttcctcctccctcagctccgagtcatcgcgtctctccacagagccatccagcgaggctcttggggtaggggaggtgctccatgtgaagacagagtccttggcacccccactgtgtctcctgggagatgacccaacatcctcatttgaaaccgtccagatcaacgttatccccacctctgatgattcctcagatgtccagaccaagatagaacctgtctctccatgttcttccgtcaactctgaggcctccctgctctcagccgactcctccagccaggcttttataggagaggaggtcctggaagtgaagacagagtccctgtccccttcaggatgcctcctgtgggatgtcccagccccctcacttggagctgtccagatcagcatgggcccatcccttgatggctcctcaggcaaagccctgcccacccggaagccgccactgcagcccaaacctgtagtgctaaccactgtcccaatgccatccagagctgtgcctcccagcaccacagtccttctgcagtccctcgtccagccacccccagtgtccccagttgtcctcatccagggtgctattcgagtccagcctgaagggccggctccctctctaccacggcctgagaggaagagcatcgttcccgctcctatgcctggaaactcctgcccgcctgaagtggatgcaaagctgctgaagcggcagcagcgaatgatcaagaaccgggagtcagcctgccagtcccggagaaagaagaaagagtatctgcagggactggaggctcggctgcaagcagtactggctgacaaccagcagctccgccgagagaatgctgccctccggcggcggctggaggccctgctggctgaaaacagcgagctcaagttagggtctggaaacaggaaggtggtctgcatcatggtcttccttctcttcattgccttcaactttggacctgtcagcatcagtgagcctccttcagctcccatctctcctcggatgaacaagggggagcctcaaccccggagacacttgctggggttctcagagcaagagccagttcagggagttgaacctctccaggggtcctcccagggccctaaggagccccagcccagccccacagaccagcccagtttcagcaacctgacagccttccctgggggcgccaaggagctactactaagagacctagaccagctcttcctctcctctgattgccggcacttcaaccgcactgagtccctgaggcttgctgacgagttgagtggctgggtccagcgccaccagagaggccggaggaagatccctcagagggcccaggagagacagaagtctcagccacggaagaagtcacctccagttaaggcagtccccatccaaccccctggacccccagaaagggattctgtgggccagctgcaactatatcgccacccagaccgttcgcagccagcattcttggatgcaattgaccgacgggaagacacattttatgttgtctctttccgaagggaccacctgctgctcccagccatcagccacaacaagacctcccggcccaagatgtccctggtgatgcctgccatggcccccaatgagaccctgtcaggccgtggggccccgggggactatgaggagatgatgcagatcgagtgtgaggtcatggacaccagggtgattcacatcaagacctccacagtgcccccctcgctccgaaaacagccatccccaaccccaggcaatgccacaggtggccccttgccagtctctgcagccagccaggcccaccaggcctcccaccagcccctctacctcaatcatccctgacctctgccattcacactgacttagaacggggggagggggtaccaggtggccaggtgggactgtttcaaatttccctgatccccaggcttggggcaattggtaaaggaaagagcaggtgtgggggttaagcacttatttgaggtgggggtgttcacctctcttctcatcccttttcagaatatagggctcctctcattcctgtgaacccccagtcctggcttctttgtttgaggggattgtgtgaggttcagttgtggggtgggtggtgagctgctgcatattttttattttgtttctctagtgttatggcagtggaggtgggaatttagtccccaggtgggacaagggaagttttttcattttggagctagttactgggagtaagggagggtggggtgggggggagttcaggtttatgtgtgtgcatttcttttttattattattaaataaacaacttggagggagttgaaggaa

SEQ ID NO: 104106 - DNA, 2620 bp, Homo sapiens
  Payload ID: 466
  Gene Symbol: ATF6B
  Gene Name: activating transcription factor 6 beta
  Uniprot ID: Q99941
  ENST ID: ENST00000375203
  CDS Start-End: 34-2145
aaccgtctcctggttggggggtgggggggaaagatggcggagctgatgctgctcagcgagattgctgacccgacgcgtttcttcaccgacaacctgcttagcccggaggactggggtctgcagaacagcaccttgtattctggcctagatgaagtggccgaggagcagacgcagctcttccgttgcccggagcaggatgtcccgtttgacggcagctccctggacgtggggatggatgtcagcccctctgagcccccatgggaactcctgccgatcttcccagatcttcaggtgaagtctgagccatcttccccctgctcttcctcctccctcagctccgagtcatcgcgtctctccacagagccatccagcgaggctcttggggtaggggaggtgctccatgtgaagacagagtccttggcacccccactgtgtctcctgggagatgacccaacatcctcatttgaaaccgtccagatcaacgttatccccacctctgatgattcctcagatgtccagaccaagatagaacctgtctctccatgttcttccgtcaactctgaggcctccctgctctcagccgactcctccagccaggcttttataggagaggaggtcctggaagtgaagacagagtccctgtccccttcaggatgcctcctgtgggatgtcccagccccctcacttggagctgtccagatcagcatgggcccatcccttgatggctcctcaggcaaagccctgcccacccggaagccgccactgcagcccaaacctgtagtgctaaccactgtcccaatgccatccagagctgtgcctcccagcaccacagtccttctgcagtccctcgtccagccacccccagtgtccccagttgtcctcatccagggtgctattcgagtccagcctgaagggccggctccctctctaccacggcctgagaggaagagcatcgttcccgctcctatgcctggaaactcctgcccgcctgaagtggatgcaaagctgctgaagcggcagcagcgaatgatcaagaaccgggagtcagcctgccagtcccggagaaagaagaaagagtatctgcagggactggaggctcggctgcaagcagtactggctgacaaccagcagctccgccgagagaatgctgccctccggcggcggctggaggccctgctggctgaaaacagcgagctcaagttagggtctggaaacaggaaggtggtctgcatcatggtcttccttctcttcattgccttcaactttggacctgtcagcatcagtgagcctccttcagctcccatctctcctcggatgaacaagggggagcctcaaccccggagacacttgctggggttctcagagcaagagccagttcagggagttgaacctctccaggggtcctcccagggccctaaggagccccagcccagccccacagaccagcccagtttcagcaacctgacagccttccctgggggcgccaaggagctactactaagagacctagaccagctcttcctctcctctgattgccggcacttcaaccgcactgagtccctgaggcttgctgacgagttgagtggctgggtccagcgccaccagagaggccggaggaagatccctcagagggcccaggagagacagaagtctcagccacggaagaagtcacctccagttaaggcagtccccatccaaccccctggacccccagaaagggattctgtgggccagctgcaactatatcgccacccagaccgttcgcagccagcattcttggatgcaattgaccgacgggaagacacattttatgttgtctctttccgaagggaccacctgctgctcccagccatcagccacaacaagacctcccggcccaagatgtccctggtgatgcctgccatggcccccaatgagaccctgtcaggccgtggggccccgggggactatgaggagatgatgcagatcgagtgtgaggtcatggacaccagggtgattcacatcaagacctccacagtgcccccctcgctccgaaaacagccatccccaaccccaggcaatgccacaggtggccccttgccagtctctgcagccagccaggcccaccaggcctcccaccagcccctctacctcaatcatccctgacctctgccattcacactgacttagaacggggggagggggtaccaggtggccaggtgggactgtttcaaatttccctgatccccaggcttggggcaattggtaaaggaaagagcaggtgtgggggttaagcacttatttgaggtgggggtgttcacctctcttctcatcccttttcagaatatagggctcctctcattcctgtgaacccccagtcctggcttctttgtttgaggggattgtgtgaggttcagttgtggggtgggtggtgagctgctgcatattttttattttgtttctctagtgttatggcagtggaggtgggaatttagtccccaggtgggacaagggaagttttttcattttggagctagttactgggagtaagggagggtggggtgggggggagttcaggtttatgtgtgtgcatttcttttttattattattaaataaacaacttggagggagttgaaggaa

SEQ ID NO: 104107 - DNA, 2624 bp, Homo sapiens
  Payload ID: 466
  Gene Symbol: ATF6B
  Gene Name: activating transcription factor 6 beta
  Uniprot ID: Q99941
  ENST ID: ENST00000383156
  CDS Start-End: 47-2149
ggcgggccttgggaaccgtctcctggttggggggtgggggggaaagatggcggagctgatgctgctcagcgagattgctgacccgacgcgtttcttcaccgacaacctgcttagcccggaggactgggacagcaccttgtattctggcctagatgaagtggccgaggagcagacgcagctcttccgttgcccggagcaggatgtcccgtttgacggcagctccctggacgtggggatggatgtcagcccctctgagcccccatgggaactcctgccgatcttcccagatcttcaggtgaagtctgagccatcttccccctgctcttcctcctccctcagctccgagtcatcgcgtctctccacagagccatccagcgaggctcttggggtaggggaggtgctccatgtgaagacagagtccttggcacccccactgtgtctcctgggagatgacccaacatcctcatttgaaaccgtccagatcaacgttatccccacctctgatgattcctcagatgtccagaccaagatagaacctgtctctccatgttcttccgtcaactctgaggcctccctgctctcagccgactcctccagccaggcttttataggagaggaggtcctggaagtgaagacagagtccctgtccccttcaggatgcctcctgtgggatgtcccagccccctcacttggagctgtccagatcagcatgggcccatcccttgatggctcctcaggcaaagccctgcccacccggaagccgccactgcagcccaaacctgtagtgctaaccactgtcccaatgccatccagagctgtgcctcccagcaccacagtccttctgcagtccctcgtccagccacccccagtgtccccagttgtcctcatccagggtgctattcgagtccagcctgaagggccggctccctctctaccacggcctgagaggaagagcatcgttcccgctcctatgcctggaaactcctgcccgcctgaagtggatgcaaagctgctgaagcggcagcagcgaatgatcaagaaccgggagtcagcctgccagtcccggagaaagaagaaagagtatctgcagggactggaggctcggctgcaagcagtactggctgacaaccagcagctccgccgagagaatgctgccctccggcggcggctggaggccctgctggctgaaaacagcgagctcaagttagggtctggaaacaggaaggtggtctgcatcatggtcttccttctcttcattgccttcaactttggacctgtcagcatcagtgagcctccttcagctcccatctctcctcggatgaacaagggggagcctcaaccccggagacacttgctggggttctcagagcaagagccagttcagggagttgaacctctccaggggtcctcccagggccctaaggagccccagcccagccccacagaccagcccagtttcagcaacctgacagccttccctgggggcgccaaggagctactactaagagacctagaccagctcttcctctcctctgattgccggcacttcaaccgcactgagtccctgaggcttgctgacgagttgagtggctgggtccagcgccaccagagaggccggaggaagatccctcagagggcccaggagagacagaagtctcagccacggaagaagtcacctccagttaaggcagtccccatccaaccccctggacccccagaaagggattctgtgggccagctgcaactatatcgccacccagaccgttcgcagccagcattcttggatgcaattgaccgacgggaagacacattttatgttgtctctttccgaagggaccacctgctgctcccagccatcagccacaacaagacctcccggcccaagatgtccctggtgatgcctgccatggcccccaatgagaccctgtcaggccgtggggccccgggggactatgaggagatgatgcagatcgagtgtgaggtcatggacaccagggtgattcacatcaagacctccacagtgcccccctcgctccgaaaacagccatccccaaccccaggcaatgccacaggtggccccttgccagtctctgcagccagccaggcccaccaggcctcccaccagcccctctacctcaatcatccctgacctctgccattcacactgacttagaacggggggagggggtaccaggtggccaggtgggactgtttcaaatttccctgatccccaggcttggggcaattggtaaaggaaagagcaggtgtgggggttaagcacttatttgaggtgggggtgttcacctctcttctcatcccttttcagaatatagggctcctctcattcctgtgaacccccagtcccggcttctttgtttgaggggattgtgtgaggttcagttgtggggtgggtggtgagctgctgcatattttttattttgtttctctagtgttatggcagtggaggtgggaatttagtccccaggtgggacaagggaagttttttcattttggagctagttactgggagtaagggagggtggggtgggggggagttcaggtttatgtgtgtgcatttcttttttattattattaaataaacaacttggagggagttgaaggaa

SEQ ID NO: 104108 - DNA, 425 bp, Homo sapiens
  Payload ID: 466
  Gene Symbol: ATF6B
  Gene Name: activating transcription factor 6 beta
  ENST ID: ENST00000436157
  CDS Start-End: 1-425
ccagcccagccccacagaccagcccagtttcagcaacctgacagccttccctgggggcgccaaggagctactactaagagacctagaccagctcttcctctcctctgattgccggcacttcaaccgcactgagtccctgaggcttgctgacgagttgagtggctgggtccagcgccaccagagaggccggaggaagatccctcagagggcccaggagagacagtccttagatacttctccttccagaagtctcagccacggaagaagtcacctccagttaaggcagtccccatccaaccccctggacccccagaaagggattctgtgggccagctgcaactatatcgccacccagaccgttcgcagccagcattcttggatgcaattgaccgacgggaagacacattttatgttgtctctttccg

SEQ ID NO: 104109 - DNA, 2624 bp, Homo sapiens
  Payload ID: 466
  Gene Symbol: ATF6B
  Gene Name: activating transcription factor 6 beta
  Uniprot ID: Q99941
  ENST ID: ENST00000439240
  CDS Start-End: 47-2149
ggcgggccttgggaaccgtctcctggttgtggggtgggggggaaagatggcggagctgatgctgctcagcgagattgctgacccgacgcgtttcttcaccgacaacctgcttagcccggaggactgggacagcaccttgtattctggcctagatgaagtggccgaggagcagacgcagctcttccgttgcccggagcaggatgtcccgtttgacggcagctccctggacgtggggatggatgtcagcccctctgagcccccatgggaactcctgccgatcttcccagatcttcaggtgaagtctgagccatcttccccctgctcttcctcctccctcagctccgagtcatcgcgtctctccacagagccatccagcgaggctcttggggtaggggaggtgctccatgtgaagacagagtccttggcacccccactgtgtctcctgggagatgacccaacatcctcatttgaaaccgtccagatcaacgttatccccacctctgatgattcctcagatgtccagaccaagatagaacctgtctctccatgttcttccgtcaactctgaggcctccctgctctcagccgactcctccagccaggcttttataggagaggaggtcctggaagtgaagacagagtccctgtccccttcaggatgcctcctgtgggatgtcccagccccctcacttggagctgtccagatcagcatgggcccatcccttgatggctcctcaggcaaagccctgcccacccggaagccgccactgcagcccaaacctgtagtgctaaccactgtcccaatgccatccagagctgtgcctcccagcaccacagtccttctgcagtccctcgtccagccacccccagtgtccccagttgtcctcatccagggtgctattcgagtccagcctgaagggccggctccctctctaccacggcctgagaggaagagcatcgttcccgctcctatgcctggaaactcctgcccgcctgaagtggatgcaaagctgctgaagcggcagcagcgaatgatcaagaaccgggagtcagcctgccagtcccggagaaagaagaaagagtatctgcagggactggaggctcggctgcaagcagtactggctgacaaccagcagctccgccgagagaatgctgccctccggcggcggctggaggccctgctggctgaaaacagcgagctcaagttagggtctggaaacaggaaggtggtctgcatcatggtcttccttctcttcattgccttcaactttggacctgtcagcatcagtgagcctccttcagctcccatctctcctcggatgaacaagggggagcctcaaccccggagacacttgctggggttctcagagcaagagccagttcagggagttgaacctctccaggggtcctcccagggccctaaggagccccagcccagccccacagaccagcccagtttcagcaacctgacagccttccctgggggcgccaaggagctactactaagagacctagaccagctcttcctctcctctgattgccggcacttcaaccgcactgagtccctgaggcttgctgacgagttgagtggctgggtccagcgccaccagagaggccggaggaagatccctcagagggcccaggagagacagaagtctcagccacggaagaagtcacctccagttaaggcagtccccatccaaccccctggacccccagaaagggattctgtgggccagctgcaactatatcgccacccagaccgttcgcagccagcattcttggatgcaattgaccgacgggaagacacattttatgttgtctctttccgaagggaccacctgctgctcccagccatcagccacaacaagacctcccggcccaagatgtccctggtgatgcctgccatggcccccaatgagaccctgtcaggccgtggggccccgggggactatgaggagatgatgcagatcgagtgtgaggtcatggacaccagggtgattcacatcaagacctccacagtgcccccctcgctccgaaaacagccatccccaaccccaggcaatgccacaggtggccccttgccagtctctgcagccagccaggcccaccaggcctcccaccagcccctctacctcaatcatccctgacctctgccattcacactgacttagaacggggggagggggtaccaggtggccaggtgggactgtttcaaatttccctgatccccaggcttggggcaattggtaaaggaaagagcaggtgtgggggttaagcacttatttgaggtgggggtgttcacctctcttctcatcccttttcagaatatagggctcctctcattcctgtgaacccccagtcctggcttctttgtttgaggggattgtgtgaggttcagttgtggggtgggtggtgagctgctgcatattttttattttgtttctctagtgttatggcagtggaggtgggaatttagtccccaggtgggacaagggaagttttttcattttggagctagttactgggagtaagggagggtggggtgggggggagttcaggtttatgtgtgtgcatttcttttttattattattaaataaacaacttggagggagttgaaggaa

SEQ ID NO: 104110 - DNA, 425 bp, Homo sapiens; identical to SEQ ID NO: 104108
  Payload ID: 466
  Gene Symbol: ATF6B
  Gene Name: activating transcription factor 6 beta
  ENST ID: ENST00000453203
  CDS Start-End: 1-425

SEQ ID NO: 104111 - DNA, 2624 bp, Homo sapiens
  Payload ID: 466
  Gene Symbol: ATF6B
  Gene Name: activating transcription factor 6 beta
  Uniprot ID: Q99941
  ENST ID: ENST00000435768
  CDS Start-End: 47-2149
ggcgggccttgggaaccgtctcctggttggggggtgggggggaaagatggcggagctgatgctgctcagcgagattgctgacccgacgcgtttcttcaccgacaacctgcttagcccggaggactgggacagcaccttgtattctggcctagatgaagtggccgaggagcagacgcagctcttccgttgcccggagcaggatgtcccgtttgacggcagctccctggacgtggggatggatgtcagcccctctgagcccccatgggaactcctgccgatcttcccagatcttcaggtgaagtctgagccatcttccccctgctcttcctcctccctcagctccgagtcatcgcgtctctccacagagccatccagcgaggctcttggggtaggggaggtgctccatgtgaagacagagtccttggcacccccactgtgtctcctgggagatgacccaacatcctcatttgaaaccgtccagatcaacgttatccccacctctgatgattcctcagatgtccagaccaagatagaacctgtctctccatgttcttccgtcaactctgaggcctccctgctctcagccgactcctccagccaggcttttataggagaggaggtcctggaagtgaagacagagtccctgtcgccttcaggatgcctcctgtgggatgtcccagccccctcacttggagctgtccagatcagcatgggcccatcccttgatggctcctcaggcaaagccctgcccacccggaagccgccactgcagcccaaacctgtagtgctaaccactgtcccaatgccatccagagctgtgcctcccagcaccacagtccttctgcagtccctcgtccagccacccccagtgtccccagttgtcctcatccagggtgctattcgagtccagcctgaagggccggctccctctctaccacggcctgagaggaagagcatcgttcccgctcctatgcctggaaactcctgcccgcctgaagtggatgcaaagctgctgaagcggcagcagcgaatgatcaagaaccgggagtcagcctgccagtcccggagaaagaagaaagagtatctgcagggactggaggctcggctgcaagcagtactggctgacaaccagcagctccgccgagagaatgctgccctccggcggcggctggaggccctgctggctgaaaacagcgagctcaagttagggtctggaaacaggaaggtggtctgcatcatggtcttccttctcttcattgccttcaactttggacctgtcagcatcagtgagcctccttcagctcccatctctcctcggatgaacaagggggagcctcaaccccggagacacttgctggggttctcagagcaagagccagttcagggagttgaacctctccaggggtcctcccagggccctaaggagccccagcccagccccacagaccagcccagtttcagcaacctgacagccttccctgggggcgccaaggagctactactaagagacctagaccagctcttcctctcctctgattgccggcacttcaaccgcactgagtccctgaggcttgctgacgagttgagtggctgggtccagcgccaccagagaggccggaggaagatccctcagagggcccaggagagacagaagtctcagccacggaagaagtcacctccagttaaggcagtccccatccaaccccctggacccccagaaagggattctgtgggccagctgcaactatatcgccacccagaccgttcgcagccagcattcttggatgcaattgaccgacgggaagacacattttatgttgtctctttccgaagggaccacctgctgctcccagccatcagccacaacaagacctcccggcccaagatgtccctggtgatgcctgccatggcccccaatgagaccctgtcaggccgtggggccccgggggactatgaggagatgatgcagatcgagtgtgaggtcatggacaccagggtgattcacatcaagacctccacagtgcccccctcgctccgaaaacagccatccccaaccccaggcaatgccacaggtggccccttgccagtctctgcagccagccaggcccaccaggcctcccaccagcccctctacctcaatcatccctgacctctgccattcacactgacttagaacggggggagggggtaccaggtggccaggtgggactgtttcaaatttccctgatccccaggcttggggcaattggtaaaggaaagagcaggtgtgggggttaagcacttatttgaggtgggggtgttcacctctcttctcatcccttttcagaatatagggctcctctcattcctgtgaacccccagtcctggcttctttgtttgaggggattgtgtgaggttcagttgtggggtgggtggtgagctgctgcatattttttattttgtttctctagtgttatggcagtggaggtgggaatttagtccccaggtggaacaagggaagttttttcattttggagctagttactgggagtaagggagggtggggtgggggggagttcaggtttatgtgtgtgcatttcttttttattattattaaataaacaacttggagggagttgaaggaa

SEQ ID NO: 104112 - DNA, 425 bp, Homo sapiens; identical to SEQ ID NO: 104108
  Payload ID: 466
  Gene Symbol: ATF6B
  Gene Name: activating transcription factor 6 beta
  ENST ID: ENST00000417614
  CDS Start-End: 1-425

SEQ ID NO: 104113 - DNA, 2620 bp, Homo sapiens
  Payload ID: 466
  Gene Symbol: ATF6B
  Gene Name: activating transcription factor 6 beta
  Uniprot ID: Q99941
  ENST ID: ENST00000427136
  CDS Start-End: 34-2145
aaccgtctcctggttgtggggtgggggggaaagatggcggagctgatgctgctcagcgagattgctgacccgacgcgtttcttcaccgacaacctgcttagcccggaggactggggtctgcagaacagcaccttgtattctggcctagatgaagtggccgaggagcagacgcagctcttccgttgcccggagcaggatgtcccgtttgacggcagctccctggacgtggggatggatgtcagcccctctgagcccccatgggaactcctgccgatcttcccagatcttcaggtgaagtctgagccatcttccccctgctcttcctcctccctcagctccgagtcatcgcgtctctccacagagccatccagcgaggctcttggggtaggggaggtgctccatgtgaagacagagtccttggcacccccactgtgtctcctgggagatgacccaacatcctcatttgaaaccgtccagatcaacgttatccccacctctgatgattcctcagatgtccagaccaagatagaacctgtctctccatgttcttccgtcaactctgaggcctccctgctctcagccgactcctccagccaggcttttataggagaggaggtcctggaagtgaagacagagtccctgtccccttcaggatgcctcctgtgggatgtcccagccccctcacttggagctgtccagatcagcatgggcccatcccttgatggctcctcaggcaaagccctgcccacccggaagccgccactgcagcccaaacctgtagtgctaaccactgtcccaatgccatccagagctgtgcctcccagcaccacagtccttctgcagtccctcgtccagccacccccagtgtccccagttgtcctcatccagggtgctattcgagtccagcctgaagggccggctccctctctaccacggcctgagaggaagagcatcgttcccgctcctatgcctggaaactcctgcccgcctgaagtggatgcaaagctgctgaagcggcagcagcgaatgatcaagaaccgggagtcagcctgccagtcccggagaaagaagaaagagtatctgcagggactggaggctcggctgcaagcagtactggctgacaaccagcagctccgccgagagaatgctgccctccggcggcggctggaggccctgctggctgaaaacagcgagctcaagttagggtctggaaacaggaaggtggtctgcatcatggtcttccttctcttcattgccttcaactttggacctgtcagcatcagtgagcctccttcagctcccatctctcctcggatgaacaagggggagcctcaaccccggagacacttgctggggttctcagagcaagagccagttcagggagttgaacctctccaggggtcctcccagggccctaaggagccccagcccagccccacagaccagcccagtttcagcaacctgacagccttccctgggggcgccaaggagctactactaagagacctagaccagctcttcctctcctctgattgccggcacttcaaccgcactgagtccctgaggcttgctgacgagttgagtggctgggtccagcgccaccagagaggccggaggaagatccctcagagggcccaggagagacagaagtctcagccacggaagaagtcacctccagttaaggcagtccccatccaaccccctggacccccagaaagggattctgtgggccagctgcaactatatcgccacccagaccgttcgcagccagcattcttggatgcaattgaccgacgggaagacacattttatgttgtctctttccgaagggaccacctgctgctcccagccatcagccacaacaagacctcccggcccaagatgtccctggtgatgcctgccatggcccccaatgagaccctgtcaggccgtggggccccgggggactatgaggagatgatgcagatcgagtgtgaggtcatggacaccagggtgattcacatcaagacctccacagtgcccccctcgctccgaaaacagccatccccaaccccaggcaatgccacaggtggccccttgccagtctctgcagccagccaggcccaccaggcctcccaccagcccctctacctcaatcatccctgacctctgccattcacactgacttagaacggggggagggggtaccaggtggccaggtgggactgtttcaaatttccctgatccccaggcttggggcaattggtaaaggaaagagcaggtgtgggggttaagcacttatttgaggtgggggtgttcacctctcttctcatcccttttcagaatatagggctcctctcattcctgtgaacccccagtcctggcttctttgtttgaggggattgtgtgaggttcagttgtggggtgggtggtgagctgctgcatattttttattttgtttctctagtgttatggcagtggaggtgggaatttagtccccaggtgggacaagggaagttttttcattttggagctagttactgggagtaagggagggtggggtgggggggagttcaggtttatgtgtgtgcatttcttttttattattattaaataaacaacttggagggagttgaaggaa

SEQ ID NO: 104114 - DNA, 2620 bp, Homo sapiens
  Payload ID: 466
  Gene Symbol: ATF6B
  Gene Name: activating transcription factor 6 beta
  Uniprot ID: Q99941
  ENST ID: ENST00000425571
  CDS Start-End: 34-2145
aaccgtctcctggttggggggtgggggggaaagatggcggagctgatgctgctcagcgagattgctgacccgacgcgtttcttcaccgacaacctgcttagcccggaggactggggtctgcagaacagcaccttgtattctggcctagatgaagtggccgaggagcagacgcagctcttccgttgcccggagcaggatgtcccgtttgacggcagctccctggacgtggggatggatgtcagcccctctgagcccccatgggaactcctgccgatcttcccagatcttcaggtgaagtctgagccatcttccccctgctcttcctcctccctcagctccgagtcatcgcgtctctccacagagccatccagcgaggctcttggggtaggggaggtgctccatgtgaagacagagtccttggcacccccactgtgtctcctgggagatgacccaacatcctcatttgaaaccgtccagatcaacgttatccccacctctgatgattcctcagatgtccagaccaagatagaacctgtctctccatgttcttccgtcaactctgaggcctccctgctctcagccgactcctccagccaggcttttataggagaggaggtcctggaagtgaagacagagtccctgtcgccttcaggatgcctcctgtgggatgtcccagccccctcacttggagctgtccagatcagcatgggcccatcccttgatggctcctcaggcaaagccctgcccacccggaagccgccactgcagcccaaacctgtagtgctaaccactgtcccaatgccatccagagctgtgcctcccagcaccacagtccttctgcagtccctcgtccagccacccccagtgtccccagttgtcctcatccagggtgctattcgagtccagcctgaagggccggctccctctctaccacggcctgagaggaagagcatcgttcccgctcctatgcctggaaactcctgcccgcctgaagtggatgcaaagctgctgaagcggcagcagcgaatgatcaagaaccgggagtcagcctgccagtcccggagaaagaagaaagagtatctgcagggactggaggctcggctgcaagcagtactggctgacaaccagcagctccgccgagagaatgctgccctccggcggcggctggaggccctgctggctgaaaacagcgagctcaagttagggtctggaaacaggaaggtggtctgcatcatggtcttccttctcttcattgccttcaactttggacctgtcagcatcagtgagcctccttcagctcccatctctcctcggatgaacaagggggagcctcaaccccggagacacttgctggggttctcagagcaagagccagttcagggagttgaacctctccaggggtcctcccagggccctaaggagccccagcccagccccacagaccagcccagtttcagcaacctgacagccttccctgggggcgccaaggagctactactaagagacctagaccagctcttcctctcctctgattgccggcacttcaaccgcactgagtccctgaggcttgctgacgagttgagtggctgggtccagcgccaccagagaggccggaggaagatccctcagagggcccaggagagacagaagtctcagccacggaagaagtcacctccagttaaggcagtccccatccaaccccctggacccccagaaagggattctgtgggccagctgcaactatatcgccacccagaccgttcgcagccagcattcttggatgcaattgaccgacgggaagacacattttatgttgtctctttccgaagggaccacctgctgctcccagccatcagccacaacaagacctcccggcccaagatgtccctggtgatgcctgccatggcccccaatgagaccctgtcaggccgtggggccccgggggactatgaggagatgatgcagatcgagtgtgaggtcatggacaccagggtgattcacatcaagacctccacagtgcccccctcgctccgaaaacagccatccccaaccccaggcaatgccacaggtggccccttgccagtctctgcagccagccaggcccaccaggcctcccaccagcccctctacctcaatcatccctgacctctgccattcacactgacttagaacggggggagggggtaccaggtggccaggtgggactgtttcaaatttccctgatccccaggcttggggcaattggtaaaggaaagagcaggtgtgggggttaagcacttatttgaggtgggggtgttcacctctcttctcatcccttttcagaatatagggctcctctcattcctgtgaacccccagtcctggcttctttgtttgaggggattgtgtgaggttcagttgtggggtgggtggtgagctgctgcatattttttattttgtttctctagtgttatggcagtggaggtgggaatttagtccccaggtggaacaagggaagttttttcattttggagctagttactgggagtaagggagggtggggtgggggggagttcaggtttatgtgtgtgcatttcttttttattattattaaataaacaacttggagggagttgaaggaa

SEQ ID NO: 104115 - DNA, 425 bp, Homo sapiens; identical to SEQ ID NO: 104108
  Payload ID: 466
  Gene Symbol: ATF6B
  Gene Name: activating transcription factor 6 beta
  ENST ID: ENST00000413319
  CDS Start-End: 1-425

SEQ ID NO: 104116 - DNA, 5218 bp, Homo sapiens
  Payload ID: 467
  Gene Symbol: ATF7
  Gene Name: activating transcription factor 7
  Uniprot ID: P17544
  ENST ID: ENST00000456903
  CDS Start-End: 72-1523
ctttggggggaaggcggggccagaggcttgaagtgtggggagaacttggtctcctctctgctatatgaaatatgggagacgacagaccgtttgtgtgcaatgccccgggctgtggacagagatttacaaacgaggaccacctggcagttcataaacacaagcatgagatgacattgaaatttggcccagcccgaactgactcagtcatcattgcagatcaaacgcctactccaactagattcctgaagaactgtgaggaggtgggactcttcaatgaactagctagctcctttgaacatgaattcaagaaagctgcagatgaggatgagaaaaaggctgctgctgggccccttgacatgtctctgccttccacaccagacatcaaaatcaaagaagaagagccagtggaggtagactcatccccacctgatagccctgcctctagtccctgttccccaccactgaaggagaaggaggttaccccaaagcctgttctgatctctacccccacacccaccattgtacgtcctggctccctgcctctccacttgggctatgatccacttcatccaacccttccctccccaacctctgtcatcacacaggctccaccatccaacaggcaaatggggtctcccactggctccctccctcttgtcatgcatcttgctaatggacagaccatgcctgtgttgccagggcctccagtacagatgccgtctgttatatcgctggccagacctgtgtccatggtgcccaacattcctggtatccctggcccaccagttaacagtagtggctccatttctccctctggccaccctataccatcagaagccaagatgagactgaaagccaccctaactcaccaagtctcctcaatcaatggtggttgtggaatggtggtgggtactgccagcaccatggtgacagcccgcccagagcagagccagattctcatccagcaccctgatgccccatcccctgcccagccacaggtctcaccagctcagcccacccctagtactggggggcgacggcggcgcacagtagatgaagatccagatgagcgacggcagcgctttctggagcgcaaccgggctgcagcctcccgctgccgccaaaagcgaaagctgtgggtgtcctccctagagaagaaggccgaagaactcacttctcagaacattcagctgagtaatgaagtcacattactacgcaatgaggtggcccagttgaaacagctactgttagctcataaagactgcccagtcactgcactacagaaaaagactcaaggctatttagaaagccccaaggaaagctcagagccaacgggttctccagcccctgtgattcagcacagctcagcaacagcccctagcaatggcctcagtgttcgctctgcagctgaagctgtggccacctcggtcctcactcagatggccagccaaaggacagaactgagcatgccgatacaatcgcatgtaatcatgaccccacagtcccagtctgcgggcagatgatgcctcctctggtggagaggtcctcagccagagctcgcccgcccaagagccaagagagatgtcatcttatcccctcccatctgccttggacatggcaatatgggtggggggaattgtgtgttgtgagtaatggacagatatggggctttttagccatgtggtcatgtacgtttgacacctgtgctgggggcctcccagccccggagcctcatagatcatcccccagggtggggtttctgatgcatccacagccaaaggcctttccagatggtccgaacaatcacccctgccccatgcacgtgtatctgtctcttttaacactaacccttggcacttctaggtttggggtttctcagttccctctcttcccactaagccgtggctgttacctttttgttccttaccagcatgccacttcctgccagatagagggaggctagatttgatgacatattacccgctgacccagccccagccaccccatggactcaggactcaggtctcccatagctgcttatttacccgtttcctttttcctcttccttaattctagttaaaacattcacttacggagaatgtaaggttacctttgatgtatgaagtagcagtattttccagtttttccataagctttattccttctctctacctgccaccaaaaagaaagaaaccctcaagagttctaattctttttcatctatttgcagagctatttgggtacctcattttgtcccttgactttagtgtagtggtggggtctttcccaccaccccactaagccttggcaacctcattttgtggccttattattaaagattgcttggtagtgaaaagggaagggcccagaatctgactggctgattctgtctcctcccctccctccttctttagtttaaccatcagggcagacaggaacaaagtatttcaaagcttgttccatcaagttagggattaatcgattcctttatgttttataagagtttaccggccaaagcatattgtcatctttggtcatttttctgctcctgcttctctctcttcattcccctatcaacattaccgcccctgtctctcttctgtaactacttcagactcagccctcctggaggctgtcatgtaggggactctcgagttcctttgttctaccccatctctccccctcacacatctgtctgcttttctgagctagagtcttctgttcacaagtgcccatcaccgtctggactatcttctttctctttcaccaggttcctagcttagccactaggtcttccaggtcctccagagtttcttcaacccatttcttctctcttctctttacatgcagtgctccaggatcttgaagcgtcatagccaagatgctgagtgggtttacttgagtataagattgaaaggagggaggaagaggagagggaaagtgcagaactggtcccagcaaaggaccccaggttctggcctgggaaattggtgactattgctctcaaccattcttactttgaagagttgggttgcagagggagcaattcatctctcttgtccctcttccacgttaaggcttctcatctccccttggctctgaactatgcagtttctaccaggaccataggaagcaattcagagccagaggcctgtggatagataggtcagctttaattgcctttccgtatgaaacccttccagttgtcccagagccactttctgccatctgtgcaagccaagaatgtccttctctccatctttcctacctccatcttaaacatacatacaaaataactgccagcttcctttcttattttgtctccaaaattgactgtcacaggggaatgagaaaatgttctaagctacaagattcccgtttccttaaagtgatatcctgtcctagtgaaccagtcaggtaacaggttctgctgcatttgttttaaatttcccctcctgcttttcagagctggtgctgaacaggccacacccctaaagacaaaggagagaaaacacggttttctcatcctctaccatcaggtacccaacaggaataggccctgaagtgattcagactagcaaatgttatggcagatggtcaggacgcaggttaccacatccagggacttcacttttgcctttaaaaattcacagccgtaacttgtgctcaggacttcccctttagctggctgctccctgggattttctcctgctttagagttttgtttcatttttttattgtcttgatttcccagtagcagccttgccctaaagcttgactgagtttatggctcctaaggagctttcctaagactcttgactatttttcttcccccttcagtcaagtgtttttacagttaagaattaatttgtaactgcatacatgccctgccagtctgtccctgtgttgggtggctaatttatgtagcgggtcttttttatttcttagcccccatgactaattatctagtcctaacttcatttttatcagtgggaagatgtgtacgggacctcagtgaggagcactgccagaaccacagtaacaaaatggcactgaaataaggaagcagcaggtcagaaccccctagatagttcttgagttggttctcagtctcactaaggaggcagaataattgctgccctgaaacttctctgatagtcaaaggtaacttcacttaccttgttattgctaccagccatgtggtcactctccccaaatctttgtcttccagatccatctggaccagaaccaaacatcatggaaggtgtcacttggcccttcctaaagtccatggcgtttctagaggcctaagggaggacactttcagaaaggagctgagtgtatggtgggtgtcctgaattcgttcatgtgaatacaggactcaggcttcccaccccactccaatgtgagtgctcgatacacaagcactctagctagctgccacgtacccaaggccacagagggaggggacagaaccaggtcttctggtctgctcactttctgccccattcccctaacagaaagtttgcttagagttgaaaagtctaagaaagcctcccacaatactagagaggccaacaaaaaaaaagtcatgccccctttacttactcttttgctgctggttatgcatctcaaatctgacttccttagccttcacctccctccttggccctaagcattagaccatgtactctaagtagtggttaaagagggactgagcaaactgaacctcctctcgctcacttctctatccctgttctgttggttttggctcctttcttgattcactgccctctagcaccacccatcctggtagatggagtgcttaaccccaaccgtgccctatgtacagcctgaaccaccaaacagacaccaaaaaaattcttcctgtggtttctggggctcccctgctccacactgagaggctccttaaaggtgctagcccctgatacagctatccccgccagttttctccttttttcataacttccttcccatccccaaatcattaatttttcattaatattgtacattatatacacaggaaggaaatacattattttttttaaatttcataaccagcctgtttagattccagtcttcctagctatatcacatatgccttgttgatatgctctttctgctttctttagacttaatgtttgacgggggtgggggtgtctggaagaacaggaaaggtggggatcctaaggcagat

SEQ ID NO: 104117 - DNA, 6680 bp, Homo sapiens
  Payload ID: 467
  Gene Symbol: ATF7
  Gene Name: activating transcription factor 7
  Uniprot ID: P17544
  ENST ID: ENST00000420353
  CDS Start-End: 151-1602
tcgcgagagttgagcgcgcctggccggacgggaggaaagtatccgttccgccaaggggggaaaggaggagctggagacagattgtaggaccgagcgcgggcaggcgggaggcaacggagctaccagccgctcctctctgctatatgaaatatgggagacgacagaccgtttgtgtgcaatgccccgggctgtggacagagatttacaaacgaggaccacctggcagttcataaacacaagcatgagatgacattgaaatttggcccagcccgaactgactcagtcatcattgcagatcaaacgcctactccaactagattcctgaagaactgtgaggaggtgggactcttcaatgaactagctagctcctttgaacatgaattcaagaaagctgcagatgaggatgagaaaaaggctgctgctgggccccttgacatgtctctgccttccacaccagacatcaaaatcaaagaagaagagccagtggaggtagactcatccccacctgatagccctgcctctagtccctgttccccaccactgaaggagaaggaggttaccccaaagcctgttctgatctctacccccacacccaccattgtacgtcctggctccctgcctctccacttgggctatgatccacttcatccaacccttccctccccaacctctgtcatcacacaggctccaccatccaacaggcaaatggggtctcccactggctccctccctcttgtcatgcatcttgctaatggacagaccatgcctgtgttgccagggcctccagtacagatgccgtctgttatatcgctggccagacctgtgtccatggtgcccaacattcctggtatccctggcccaccagttaacagtagtggctccatttctccctctggccaccctataccatcagaagccaagatgagactgaaagccaccctaactcaccaagtctcctcaatcaatggtggttgtggaatggtggtgggtactgccagcaccatggtgacagcccgcccagagcagagccagattctcatccagcaccctgatgccccatcccctgcccagccacaggtctcaccagctcagcccacccctagtactggggggcgacggcggcgcacagtagatgaagatccagatgagcgacggcagcgctttctggagcgcaaccgggctgcagcctcccgctgccgccaaaagcgaaagctgtgggtgtcctccctagagaagaaggccgaagaactcacttctcagaacattcagctgagtaatgaagtcacattactacgcaatgaggtggcccagttgaaacagctactgttagctcataaagactgcccagtcactgcactacagaaaaagactcaaggctatttagaaagccccaaggaaagctcagagccaacgggttctccagcccctgtgattcagcacagctcagcaacagcccctagcaatggcctcagtgttcgctctgcagctgaagctgtggccacctcggtcctcactcagatggccagccaaaggacagaactgagcatgccgatacaatcgcatgtaatcatgaccccacagtcccagtctgcgggcagatgatgcctcctctggtggagaggtcctcagccagagctcgcccgcccaagagccaagagagatgtcatcttatcccctcccatctgccttggacatggcaatatgggtggggggaattgtgtgttgtgagtaatggacagatatggggctttttagccatgtggtcatgtacgtttgacacctgtgctgggggcctcccagccccggagcctcatagatcatcccccagggtggggtttctgatgcatccacagccaaaggcctttccagatggtccgaacaatcacccctgccccatgcacgtgtatctgtctcttttaacactaacccttggcacttctaggtttggggtttctcagttccctctcttcccactaagccgtggctgttacctttttgttccttaccagcatgccacttcctgccagatagagggaggctagatttgatgacatattacccgctgacccagccccagccaccccatggactcaggactcaggtctcccatagctgcttatttacccgtttcctttttcctcttccttaattctagttaaaacattcacttacggagaatgtaaggttacctttgatgtatgaagtagcagtattttccagtttttccataagctttattccttctctctacctgccaccaaaaagaaagaaaccctcaagagttctaattctttttcatctatttgcagagctatttgggtacctcattttgtcccttgactttagtgtagtggtggggtctttcccaccaccccactaagccttggcaacctcattttgtggccttattattaaagattgcttggtagtgaaaagggaagggcccagaatctgactggctgattctgtctcctcccctccctccttctttagtttaaccatcagggcagacaggaacaaagtatttcaaagcttgttccatcaagttagggattaatcgattcctttatgttttataagagtttaccggccaaagcatattgtcatctttggtcatttttctgctcctgcttctctctcttcattcccctatcaacattaccgcccctgtctctcttctgtaactacttcagactcagccctcctggaggctgtcatgtaggggactctcgagttcctttgttctaccccatctctccccctcacacatctgtctgcttttctgagctagagtcttctgttcacaagtgcccatcaccgtctggactatcttctttctctttcaccaggttcctagcttagccactaggtcttccaggtcctccagagtttcttcaacccatttcttctctcttctctttacatgcagtgctccaggatcttgaagcgtcatagccaagatgctgagtgggtttacttgagtataagattgaaaggagggaggaagaggagagggaaagtgcagaactggtcccagcaaaggaccccaggttctggcctgggaaattggtgactattgctctcaaccattcttactttgaagagttgggttgcagagggagcaattcatctctcttgtccctcttccacgttaaggcttctcatctccccttggctctgaactatgcagtttctaccaggaccataggaagcaattcagagccagaggcctgtggatagataggtcagctttaattgcctttccgtatgaaacccttccagttgtcccagagccactttctgccatctgtgcaagccaagaatgtccttctctccatctttcctacctccatcttaaacatacatacaaaataactgccagcttcctttcttattttgtctccaaaattgactgtcacaggggaatgagaaaatgttctaagctacaagattcccgtttccttaaagtgatatcctgtcctagtgaaccagtcaggtaacaggttctgctgcatttgttttaaatttcccctcctgcttttcagagctggtgctgaacaggccacacccctaaagacaaaggagagaaaacacggttttctcatcctctaccatcaggtacccaacaggaataggccctgaagtgattcagactagcaaatgttatggcagatggtcaggacgcaggttaccacatccagggacttcacttttgcctttaaaaattcacagccgtaacttgtgctcaggacttcccctttagctggctgctccctgggattttctcctgctttagagttttgtttcatttttttattgtcttgatttcccagtagcagccttgccctaaagcttgactgagtttatggctcctaaggagctttcctaagactcttgactatttttcttcccccttcagtcaagtgtttttacagttaagaattaatttgtaactgcatacatgccctgccagtctgtccctgtgttgggtggctaatttatgtagcgggtcttttttatttcttagcccccatgactaattatctagtcctaacttcatttttatcagtgggaagatgtgtacgggacctcagtgaggagcactgccagaaccacagtaacaaaatggcactgaaataaggaagcagcaggtcagaaccccctagatagttcttgagttggttctcagtctcactaaggaggcagaataattgctgccctgaaacttctctgatagtcaaaggtaacttcacttaccttgttattgctaccagccatgtggtcactctccccaaatctttgtcttccagatccatctggaccagaaccaaacatcatggaaggtgtcacttggcccttcctaaagtccatggcgtttctagaggcctaagggaggacactttcagaaaggagctgagtgtatggtgggtgtcctgaattcgttcatgtgaatacaggactcaggcttcccaccccactccaatgtgagtgctcgatacacaagcactctagctagctgccacgtacccaaggccacagagggaggggacagaaccaggtcttctggtctgctcactttctgccccattcccctaacagaaagtttgcttagagttgaaaagtctaagaaagcctcccacaatactagagaggccaacaaaaaaaaagtcatgccccctttacttactcttttgctgctggttatgcatctcaaatctgacttccttagccttcacctccctccttggccctaagcattagaccatgtactctaagtagtggttaaagagggactgagcaaactgaacctcctctcgctcacttctctatccctgttctgttggttttggctcctttcttgattcactgccctctagcaccacccatcctggtagatggagtgcttaaccccaaccgtgccctatgtacagcctgaaccaccaaacagacaccaaaaaaattcttcctgtggtttctggggctcccctgctccacactgagaggctccttaaaggtgctagcccctgatacagctatccccgccagttttctccttttttcataacttccttcccatccccaaatcattaatttttcattaatattgtacattatatacacaggaaggaaatacattattttttttaaatttcataaccagcctgtttagattccagtcttcctagctatatcacatatgccttgttgatatgctctttctgctttctttagacttaatgtttgacgggggtgggggtgtctggaagaacaggaaaggtggggatcctaaggcagattaaaggactccctccaccccactacagcctcccataactctagtcatccctctcatagtacaggactgatttctctgtgtctgtttgtacacacaaatgtgcatacagacataaattcccccaccccataccaaggtggttacctagcaggaatgagcgtaggtggctgctggccaccattaccaccgtctgcatcagctgtgttgtctctctttggggtaaagtcctaccccagaatgagaaaaggctggggagagtagggcaggttaaaggagcttatgtcctctgtagatgtaggtttgtatcatagctactagggtttatttttttaatggggggctaatagcacagagttatctcaccagcagtagctactggtgagtgatgttttagctgtaagaagtggctatgagcaatagtttcactgactttaccttagggcagtgccacagtaatctgggaacttgttagaaatacacattctcaggccccatcccagacttattgaatcacagactctgggggcagggtttaaaagcactccaagtgattctaatgcacactaaaggttgagaaccatttcttagggataagctgggaaatttttacaggtgtggaggatatttcaaatacatcttttgcctttgcactaacatgctttcatttctttcagtctcttcctccattccctttaaagtcttccccatcatatcactgatctcaaaagctagatttgtcttcattttagtcgtatccctaaaaccatgcattggtctggacaggagttgtcccatattcccttgcagactggtcactccatgttctctgttacagtaaggaccagccaagcttcagctgtcccattcctccccctacaacacacacacctttcaggcagggaggagatgagcttccagccccaagagtggaggctgccacatcctaacatagtatctattgaaaaggaagcagtgtgtatctatgattatatctctgttcatctatatatttttgacatgtagcaacacctctccatcttatcaaggaactcaactcggtctgggtctccccagtgcccagtggtggcctttgacaggtaggaggatgcagtgctgcaggctattttgttttttgttacaaaactgtcttttcccttttcccctccacctgattcagcatgatccctgtgagctggttctcacaatctcctgggactgggctgaggcaggggcttcgctctattctccctaaccatactgtcttcctttcccccttgccacttagcagttatccccccagctatgccttctccctccctcccttgccctggcatatattgtgccttatttatgctgcaaatataacattaaactatcaagtgaa

SEQ ID NO: 104118 - DNA, 473 bp, Homo sapiens
  Payload ID: 467
  Gene Symbol: ATF7
  Gene Name: activating transcription factor 7
  ENST ID: ENST00000551480
  CDS Start-End: 239-473
agaggcttgaagtgtggggagaacttggtctcctctctgctatatgaaatatgggagacgacagaccgtttgtgtgcaatgccccgggctgtggacagatcaaacgcctactccaactagattcctgaagaactgtgaggaggtgggactcttcaatgaactagctagctcctttgaacatgaattcaagaaagctgcagatgaggatgagaaaaaggctgctgctgggccccttgacatgtctctgccttccacaccagacatcaaaatcaaagaagaagagccagtggaggtagactcatccccacctgatagccctgcctctagtccctgttccccaccactgaaggagaaggaggttaccccaaagcctgttctgatctctacccccacacccaccattgtacgtcctggctccctgcctctccacttgggctatgatccacttcatccaacccttccctccccaacct

SEQ ID NO: 104119 - DNA, 1892 bp, Homo sapiens
  Payload ID: 467
  Gene Symbol: ATF7
  Gene Name: activating transcription factor 7
  Uniprot ID: P17544
  ENST ID: ENST00000548446
  CDS Start-End: 114-1598
agtatccgttccgccaaggggggaaaggaggagctggagacagattgtaggaccgagcgcgggcaggcgggaggcaacggagctaccagccgctcctctctgctatatgaaatatgggagacgacagaccgtttgtgtgcaatgccccgggctgtggacagagatttacaaacgaggaccacctggcagttcataaacacaagcatgagatgacattgaaatttggcccagcccgaactgactcagtcatcattgcagatcaaacgcctactccaactagattcctgaagaactgtgaggaggtgggactcttcaatgaactagctagctcctttgaacatgaattcaagaaagctgcagatgaggatgagaaaaaggcaagaagcaggactgttgccaaaaaactggtggctgctgctgggccccttgacatgtctctgccttccacaccagacatcaaaatcaaagaagaagagccagtggaggtagactcatccccacctgatagccctgcctctagtccctgttccccaccactgaaggagaaggaggttaccccaaagcctgttctgatctctacccccacacccaccattgtacgtcctggctccctgcctctccacttgggctatgatccacttcatccaacccttccctccccaacctctgtcatcacacaggctccaccatccaacaggcaaatggggtctcccactggctccctccctcttgtcatgcatcttgctaatggacagaccatgcctgtgttgccagggcctccagtacagatgccgtctgttatatcgctggccagacctgtgtccatggtgcccaacattcctggtatccctggcccaccagttaacagtagtggctccatttctccctctggccaccctataccatcagaagccaagatgagactgaaagccaccctaactcaccaagtctcctcaatcaatggtggttgtggaatggtggtgggtactgccagcaccatggtgacagcccgcccagagcagagccagattctcatccagcaccctgatgccccatcccctgcccagccacaggtctcaccagctcagcccacccctagtactggggggcgacggcggcgcacagtagatgaagatccagatgagcgacggcagcgctttctggagcgcaaccgggctgcagcctcccgctgccgccaaaagcgaaagctgtgggtgtcctccctagagaagaaggccgaagaactcacttctcagaacattcagctgagtaatgaagtcacattactacgcaatgaggtggcccagttgaaacagctactgttagctcataaagactgcccagtcactgcactacagaaaaagactcaaggctatttagaaagccccaaggaaagctcagagccaacgggttctccagcccctgtgattcagcacagctcagcaacagcccctagcaatggcctcagtgttcgctctgcagctgaagctgtggccacctcggtcctcactcagatggccagccaaaggacagaactgagcatgccgatacaatcgcatgtaatcatgaccccacagtcccagtctgcgggcagatgatgcctcctctggtggagaggtcctcagccagagctcgcccgcccaagagccaagagagatgtcatcttatcccctcccatctgccttggacatggcaatatgggtggggggaattgtgtgttgcaaatctgagtagcctccaagaggcacacaagcagaggatgggctgtgttgccctgactgccagccccaggcacagaggaccaggcctggtcatcctcacagactctgaccctggctcttcccactcctcttccactccaggacatcctacttaacccctcctgacatgag

SEQ ID NO: 104120 - DNA, 774 bp, Homo sapiens
  Payload ID: 467
  Gene Symbol: ATF7
  Gene Name: activating transcription factor 7
  Uniprot ID: P17544
  ENST ID: ENST00000548118
  CDS Start-End: 68-421
ggggggaaggcggggccagaggcttgaagtgtggggagaacttggtctcctctctgctatatgaaatatgggagacgacagaccgtttgtgtgcaatgccccgggctgtggacagagatttacaaacgaggaccacctggcagttcataaacacaagcatgagatgacattgaaatttggcccagcccgaactgactcagtcatcattgcagatcaaacgcctactccaactagattcctgaagaactgtgaggaggtgggactcttcaatgaactagctagctcctttgaacatgaattcaagaaagctgcagatgaggatgagaaaaaggcaagaagcaggactgttgccaaaaaactggtggtattcagacctaggctatttttattgtgctttgggataattttcttaattggttaaaacacaaaatcatgggcttagtagagtaaaaccagtaaaaccagatagtagtcactaatcccagtcagccattcaggtctttaggagttccagatgatggatcagcacaagtctgtcgtcaccgaaaattagtcctcttgttcttccaggggagtattagtttaataatcggttttttaaaaaatatttatattataaatatgttgaagatgttaaaaggtgataaattactcagattttgttggataacatatttgttgccaaattccactcttttctgagctgatcagacttctcagctacactgtttttttgaatcagcaagtcaataaacatttatcaaatttccactc

SEQ ID NO: 104121 - DNA, 860 bp, Homo sapiens
  Payload ID: 467
  Gene Symbol: ATF7
  Gene Name: activating transcription factor 7
  Uniprot ID: P17544
  ENST ID: ENST00000591397
  CDS Start-End: 154-507
ttctcgcgagagttgagcgcgcctggccggacgggaggaaagtatccgttccgccaaggggggaaaggaggagctggagacagattgtaggaccgagcgcgggcaggcgggaggcaacggagctaccagccgctcctctctgctatatgaaatatgggagacgacagaccgtttgtgtgcaatgccccgggctgtggacagagatttacaaacgaggaccacctggcagttcataaacacaagcatgagatgacattgaaatttggcccagcccgaactgactcagtcatcattgcagatcaaacgcctactccaactagattcctgaagaactgtgaggaggtgggactcttcaatgaactagctagctcctttgaacatgaattcaagaaagctgcagatgaggatgagaaaaaggcaagaagcaggactgttgccaaaaaactggtggtattcagacctaggctatttttattgtgctttgggataattttcttaattggttaaaacacaaaatcatgggcttagtagagtaaaaccagtaaaaccagatagtagtcactaatcccagtcagccattcaggtctttaggagttccagatgatggatcagcacaagtctgtcgtcaccgaaaattagtcctcttgttcttccaggggagtattagtttaataatcggttttttaaaaaatatttatattataaatatgttgaagatgttaaaaggtgataaattactcagattttgttggataacatatttgttgccaaattccactcttttctgagctgatcagacttctcagctacactgtttttttgaatcagcaagtcaataaacatttatcaaatttccactc

SEQ ID NO: 104122 - DNA, 531 bp, Homo sapiens
  Payload ID: 467
  Gene Symbol: ATF7
  Gene Name: activating transcription factor 7
  ENST ID: ENST00000588232
  CDS Start-End: 295-531
gttccgccaaggggggaaaggaggagctggagacagattgtaggaccgagcgcgggcaggcgggaggcaacggagctaccagccgctcctctctgctatatgaaatatgggagacgacagaccgtttgtgtgcaatgccccgggctgtggacagatcaaacgcctactccaactagattcctgaagaactgtgaggaggtgggactcttcaatgaactagctagctcctttgaacatgaattcaagaaagctgcagatgaggatgagaaaaaggctgctgctgggccccttgacatgtctctgccttccacaccagacatcaaaatcaaagaagaagagccagtggaggtagactcatccccacctgatagccctgcctctagtccctgttccccaccactgaaggagaaggaggttaccccaaagcctgttctgatctctacccccacacccaccattgtacgtcctggctccctgcctctccacttgggctatgatccacttcatccaacccttccctccccaacctct

SEQ ID NO: 104123 - DNA, 531 bp, Homo sapiens
  Payload ID: 467
  Gene Symbol: ATF7
  Gene Name: activating transcription factor 7
  ENST ID: ENST00000588078
  CDS Start-End: 43-531
gaagtgtggggagaacttggtctcctctctgctatatgaaatatgggagacgacagaccgtttgtgtgcaatgccccgggctgtggacagagatttacaaacgaggaccacctggcagttcataaacacaagcatgagatgacattgaaatttggcccagcccgaactgactcagtcatcattgcagatcaaacgcctactccaactagattcctgaagaactgtgaggaggtgggactcttcaatgaactagctagctcctttgaacatgaattcaagaaagctgcagatgaggatgagaaaaaggcaagaagcaggactgttgccaaaaaactggtggctgctgctgggccccttgacatgtctctgccttccacaccagacatcaaaatcaaagaagaagagccagtggaggtagactcatccccacctgatagccctgcctctagtccctgttccccaccactgaaggagaaggaggttaccccaaagcctgttctgatctctacccccacacccaccattgtacgt

SEQ ID NO: 104124 - DNA, 8878 bp, Homo sapiens
  Payload ID: 468
  Gene Symbol: ATF7IP
  Gene Name: activating transcription factor 7 interacting protein
  Uniprot ID: Q6VMQ6
  ENST ID: ENST00000261168
  CDS Start-End: 204-4016
aatttgcataacggccccggcgcgtgcaagggagaagcgggtttgtttttgaatctgcggaggcggcggcggtggcagcggcggcgcggcgactgaagcgcgcgaaaagctgaggcggcaacgtcggggacggctgcgcgggacggctctgtaggaaggaacttggttccccctccctcagcttccgccccaaaagattcagaatggacagtttagaagaacctcagaaaaaagtctttaaggctcgaaaaacgatgagagtgagtgatcgtcagcaacttgaagcagtgtacaaggtcaaagaagaactgttgaaaactgatgtcaagctgttaaatggcaaccatgaaaatggagatttggacccaacctcacctttggaaaacatggattacattaaagacaaggaagaggtgaatggcattgaagagatttgttttgatcctgaaggaagtaaagcagaatggaaggaaacaccctgtatcctaagtgttaatgtaaaaaacaagcaggatgatgatttaaattgtgaacctttgtctccccataatataactccagaaccagtctctaaactgcctgctgaaccagtttctggtgatccagcccctggtgatctggatgccggagatccagcctccggagtactggcctctggtgattccacctctggtgatcccacctctagcgagccctcctctagtgatgctgcctctggtgatgcaacctctggtgatgccccttctggtgatgtgtcccctggtgatgccacctctggtgatgccactgctgatgatctctcctctggtgatcccacctctagtgatcccatcccaggtgaaccggtccctgttgaacccatttctggtgattgtgccgctgatgatatagcctctagtgaaataacttctgttgatctggcttctggagcaccagcttccactgatccagcctctgatgatctggcctctggtgatctatcctctagtgaactggcctctgatgatctggccactggtgaactggcctctgatgagctgacttctgaatcaacctttgatcgtacctttgaaccaaagtctgtaccagtttgtgaaccagttcctgaaattgacaatatagaaccaagtagcaataaagatgatgattttcttgaaaaaaatggagctgatgaaaaattagagcaaattcagagtaaagactcattggatgagaaaaataaagctgataataatattgatgctaatgaagaaactctagaaacagatgatacaactatttgttcagatcgacctcctgaaaatgaaaagaaggtagaggaagatattatcacagagcttgctcttggagaagatgctatatctagcagtatggaaattgaccaaggtgaaaagaatgaagatgaaacttctgcagatcttgtagaaacgattaatgaaaatgttattgaagataacaaaagtgagaatatcttagaaaatacagactctatggagacagatgaaatcattcctattttggaaaagcttgcaccttctgaggatgaacttacttgcttttctaaaacatctctccttccaatcgatgagacaaatccagatttggaagagaaaatggaaagttcttttggttcaccatctaaacaagaaagtagtgagagtttgccaaaagaagcctttctggtcctctctgatgaagaggatatttcgggtgaaaaagatgagtctgaagttatatcgcaaaatgaaacgtgctctccagcagaagtagaaagtaatgaaaaggacaacaaacctgaggaagaagagcaagtaatacatgaagatgatgaaagaccttctgagaaaaatgaattttctagacgaaaacgttctaaatcagaagacatggacaatgtacagtctaaacgtcgtcgatatatggaagaagaatatgaggcagaatttcaagtaaagattacagccaaaggagacattaaccagaaacttcaaaaggttatacagtggttgctggaagaaaaattgtgtgcgctgcagtgtgctgtatttgataagactttggcagaattgaaaacacgagtggaaaagattgaatgtaacaagaggcataaaacagttctcactgaactacaggccaagatagccaggttaaccaaacgctttgaagcagccaaagaagatcttaagaaaagacatgaacatccacccaacccaccagtatcaccaggaaaaactgtaaatgatgtcaacagcaataataacatgtcttacagaaatgcaggcacagtgagacagatgctggagtccaaaagaaatgtaagcgagagtgcaccaccatcctttcaaactcctgtgaatacagtatcttcaaccaatcttgtcactcctccagcagttgtcagtagtcaacctaaattgcagactccagtgacttcgggttccctcacagcaacgtcagttcttcctgcacccaatacagctactgtagttgctactactcaggtgcctagtggaaatccccagcctacaatctctttacagcctttgccagtgattttgcatgtacctgttgcagtatcctcccagcctcagcttctacagagccatccagggactttggtgactaatcaaccatctggcaatgttgaattcatttctgtgcaaagcccacctacagtgagtggtcttaccaaaaatccagtatccttgccatccttgccaaatcccactaaaccaaacaacgttccttctgtgcccagtcctagtattcaaaggaaccctactgccagtgctgcaccattgggaacaacacttgctgtgcaggctgttccaacagcacactctattgtacaagccacaaggacttctttacccacagtgggcccatcaggactctatagtccatcaactaatcgaggtcctatacagatgaaaattccaatttctgcatttagtacttcgtctgctgcagaacagaacagcaataccaccccaagaattgaaaaccagacaaacaaaacaatagatgcttctgtcagtaagaaagcagctgatagcacatcacagtgtggaaaagccactggcagtgattcaagtggtgtcattgatctcacaatggatgatgaagagagtggagcttcacaagaccccaaaaaactaaatcacactcctgtatcaaccatgagttcttctcagcctgtgtcacgaccattgcaacccatacaaccagcaccgcctcttcaaccatctggggtgccaacaagtggaccatctcagaccaccatacacttactacctacagctccaactaccgtgaatgtaacacatcgtccagtaactcaggtgaccacaagactccctgtaccaagagctcctgcaaaccaccaggtggtttatacaactcttcctgcaccaccagctcaggctcccttgcgaggaactgttatgcaggctcctgctgttcggcaggtcaatccccaaaatagtgttacagttcgagtgcctcaaacaaccacatatgttgtaaacaatggactaaccctgggatcaacaggacctcagctcacagtgcatcaccgaccaccacaagtgcatactgagcccccacgccccgtgcacccagcacccttaccagaagctccacaaccacagcgtctgcccccagaagctgccagcacatctctgcctcagaagccacacttgaagttagcacgcgttcagagtcaaaatggcatagtactgtcatggagtgtcctggaggtggatcgaagctgtgccactgttgatagctaccatctctatgcttaccatgaggaacccagtgccactgtgccctcacaatggaaaaagattggggaagtcaaggcacttcccttgcccatggcatgtactctcacccagtttgtatctggtagcaaatactactttgcagtacgagccaaggatatttatggacgttttgggcctttctgtgatcctcagtcaacagatgtgatctcttctacccagagcagttaaaccttggagcctttatattttcctcttttaaaatttccaccttttggtcttgtttttaatcttgtgcatgataccccatgtaaaatccaccttgtgcaagatttcttggacagatgtgtgtatacactacatttgtttataaccagaagcaaaataaactcagcccacaaagctagaatcttttcctggacagtttaggctttggggtttggaaatgtaaatgtgtaccttgctttagttttgaggctggggaatatgtgtgggtgtttatgtgtgtttttccttatgtaggtgttattgcattggagtctcccattttcattctcaaatttacctcttaaagtacgaagtaagtagatcaaaggatttgagatgtgtaactggcatgattctgcttttgaaggatctatagtatcattttagttaagtgggtcaaacagaatcaaaacaaaacccaaagaaataaataaaaaacaaaatggctaaatagtttaaaataggttaattcgaacacaggaaaggatctatttgttgtttcttttgtctggtctcctgagttgttaattaggtgaaaaaagatctgcaatggccccctccctttcctaatctggcttttacatttattttgtgccttaaagattaactacaaagataaacatggccaaaaataaataaataaatatggccatatgtccgttgttgcttagtcttcccttgcagccttttacccttgatttctccttcatctctaccaaatatagcacaactcctcaagtaattttttttttttaagatggagttttgctcttgttgcccaggctagagtgcggtggcacaatcttggctcactgcaacctctgcctcctgggttcaagcaattcttctgtctcagccccagagtagctgggattacaggcacctgtcaccatgcccggctaatttttgtatttttagtagagatggggtttcaccatgttggccaggctggtcttgaactcctgacctcaggtgatccacccgcctcggcctcccagagtgctgcgattacagttgtgagccactgtatccagcctactcaagtgatttttaaaccaaggtgtgtgtatgtacatggatgtgtatgtacacacacacacaggtgcatgcatagtctcatcttagccgggcatggtggcgacaatcacatttaactccaaaaatttgacgtgctattttcttctaaaactatagatgcttttatttttggtcactatttaactttgtgtaaagtggaccaagagaaaaccatattgtggaagacagtttttcacacattttagtatccgtgttgcacactgtgttagagattatgaaaaccattctagttcagtttatcacccaaagctatcacccaacactaactccttagtattctttcaaaggaagcaaatagtaagattacaatatagaatgagctaaaatatcaaggggaaagcttcatttcctctttattctctttatcgtccttcccattttaaccttttaactttgttttgatggtgccaagttgagtctgatgtacccattgttagctttggatagaatttaaagtatatcccagaattagctgggcatgttggtgcatgcctgtaatcccagctactcaggaggcaaggctggagaatcgcttgaacccgggaggcggaggttgcagtgagctgagattgcgccattgcactccatcctgggagacaagagcgaaactctgcctcaaaaaaaaaagaatttaaagtatatcctttgaggtcattttatgtaacaattagatataacctcctgtgtatctctctgttcctcttcaaagttattaaaattcagcttaggtcatggatttttaatatgagggccagctgtactggtgtcaggtaggtgttttgggtgtagataatttaggactggagggctgagttaagttttaggaggagaatgtggttgagaatattttgaaaggaatttatggagtttgtgaaataacttcgaagtcctcttcctttacaatatttgaattcatatttgtaccttctcaaaatagtgattcatttttcctagaattacaggagggagctcttttactaatgttgttttgtttgcaactttgatggcttataataggaagtattctagttgtaaagaaaactctttagagacttttgactggtcagtatactgaggtgtgagatttgattcatgatgaagaaagcctatagattgccaaaaaattaattctccaaaccacctttcactctcagaaaatgagaccacaaaggagtatgctataaatcaaatttgccaaccaattatgtagatattactcattctaggactaatgatgatggtaaagaagttgccagtgttatggcaatgaaaatttcagaaaggaggagttgatgatcttctagatgtatatgaacacctgtctatatctgcatgtatatgttttgacctgcagtggttgcaatgttgatatgtgttcaagattattcctgtctacaaaactgaaggcccatgttcaaattgttctttattgggtgtttttatggtcacgtggtaacaattttcttacctaacctacaaaaggttctcttgatgaacatttttatttatatttactaatcttttttaaaaaaagctttcatagcattatataatcagatgaagaaagcccagtagaataaaaaaaaaattcattagcctagcctatattatgttttctgtcaaaggaaaacaaattctcaaataggaattctaaaaatatttactaaagtaaaataactacttaaaatgttttattccagttggaaggaaggtacagggagaaatcgcaattatttaggggagaagtatatttattataagatggtgtcctcaaattagcctaccatggcacgtaggggcagcagctatattagatttactagaggtgctaagttagaacactaggcttttattgaggcaggttttaatattgatagatgctttttgtttggtttgtttcttctgggagagaatggaggacttaagtagaagtagctactgataacagactttctagtagcagtttccactccacggttacctttttagtttcatagtatcttttcacaaagtattacaaataagctagattctcccagtttgggaatgcaagtttgctacatttttagcctggcaatatttgtgtaggtattgccttattggaaattctggaaacctgatactgcaacctgcaatgtaggatgtttgtatggcatttaaaggtaatggtgatgtttattattctatactttgcattctgtgagagtaattttcactctgtcttaagtgtgagtaagcctcttctaaaaatcttgttcttgccaagaaatttataaatcacatacgaagacgtctgttgctaacagttaactttatgaggtaactatatccttctatttctctggactcatttttaaaaaatatgccgaatactgcatactgtttaaggtagtatataagtttatgagagaagtggagagctttcttccttgaaaagtcggtatttgttgagataccatttgcctcacagagaggtgttccccactcccatccccattgccagataataaatattttgagaaaagtgacctaaaacagctgaaatcttaggtgcatctgtctgcagacctccttaagcaggctgtatcttacaattcccttactgcactgggtaagtgttaacttagtttttgttgtttgctcttttgctttaaatattctccaaattaccatttatgcaacatggttagggttaatactgcatggtattcatttatcttgtttcatgaactttccagtactgtacaaggtcaacaaagtaatgcctgtggtatcctcatctctcacttttttactctgtgattttagcacagtaaggtactgcaaagaccttccttccaaatgttctccttgactttatttcttgggccaattcagtatcctcaacatcctaagattttgttgttttatcactgacctgtggttggcctgttttattctaatttccagaaaagtcaagtcccagtatttgcaatatcaaataactctaaaaccgatgtgtgattctaccttccttactatttttactgggcaaatgccctatttttttaattattattatttttaacttttgggacacacaaaaatcagcaattctcatgaagcgtttgttagtgtggcagacttgtctaattcctgaaactcattcatccccttgagccagccaatggggaggaataggataatgcaaacacatgttttgttttctcattttcaaataatttaccatgttaaaataaacttttctttgttttttatttgtagagtcagctaagtacccatatttaaatgccgtctttattatttttttgaggtctttgtttttgtctgtttttgttttgttttgttttgtaaataaggtaactgggcaatcaaacaccttttggggattctggctttagtattttatcagccattttaaaattaaatataaaaatcctttgtaagaaacttgcatcctaatttttctttattgcaattgaaagtgtaaataataagacaatgtaagtaagaccttcctaatgtctaatacaaactgggctccagcaagtggccctatttttattagggttttgaaggtttgtgtgtgtgtgtgcgtgcgtgtgtgtgtttttcttttttaaatgtatagtagagtggtgtctgtataagtgttacctgtagtggggttttgtccagcaagcctgaaatttatactttgaaataaaactactgggtttttaacattc

SEQ ID NO: 104125 - DNA, 1727 bp, Homo sapiens
  Payload ID: 468
  Gene Symbol: ATF7IP
  Gene Name: activating transcription factor 7 interacting protein
  ENST ID: ENST00000396279
  CDS Start-End: 182-1727
aaggtaaccaaaactaagaaattgatgttaggtaatttgcccagtctcacacagtaggtttcctgggagagttggaattcaaatctgtgaatctgtctacagtctacagagttcatgttcttaattgggttattaaaagtgatgaatttttttaaaggaatgcttacttttaatattcagaatggacagtttagaagaacctcagaaaaaagtctttaaggctcgaaaaacgatgagagtgagtgatcgtcagcaacttgaagcagtgtacaaggtcaaagaagaactgttgaaaactgatgtcaagctgttaaatggcaaccatgaaaatggagatttggacccaacctcacctttggaaaacatggattacattaaagacaaggaagaggtgaatggcattgaagagatttgttttgatcctgaaggaagtaaagcagaatggaaggaaacaccctgtatcctaagtgttaatgtaaaaaacaagcaggatgatgatttaaattgtgaacctttgtctccccataatataactccagaaccagtctctaaactgcctgctgaaccagtttctggtgatccagcccctggtgatctggatgccggagatccagcctccggagtactggcctctggtgattccacctctggtgatcccacctctagcgagccctcctctagtgatgctgcctctggtgatgcaacctctggtgatgccccttctggtgatgtgtcccctggtgatgccacctctggtgatgccactgctgatgatctctcctctggtgatcccacctctagtgatcccatcccaggtgaaccggtccctgttgaacccatttctggtgattgtgccgctgatgatatagcctctagtgaaataacttctgttgatctggcttctggagcaccagcttccactgatccagcctctgatgatctggcctctggtgatctatcctctagtgaactggcctctgatgatctggccactggtgaactggcctctgatgagctgacttctgaatcaacctttgatcgtacctttgaaccaaagtctgtaccagtttgtgaaccagttcctgaaattgacaatatagaaccaagtagcaataaagatgatgattttcttgaaaaaaatggagctgatgaaaaattagagcaaattcagagtaaagactcattggatgagaaaaataaagctgataataatattgatgctaatgaagaaactctagaaacagatgatacaactatttgttcagatcgacctcctgaaaatgaaaagaaggtagaggaagatattatcacagagcttgctcttggagaagatgctatatctagcagtatggaaattgaccaaggtgaaaagaatgaagatgaaacttctgcagatcttgtagaaacgattaatgaaaatgttattgaagataacaaaagtgagaatatcttagaaaatacagactctatggagacagatgaaatcattcctattttggaaaagcttgcaccttctgaggatgaacttacttgcttttctaaaacatctctccttccaatcgatgagacaaatccagatttggaagagaaaatggaaagttcttttggttcaccatctaaacaagaaagtagtgagagtttgccaaaagaagcctttctggtcctctctgatgaagaggatatttcgggtgaaaaagatgagtctgaagttatatcgcaaaatgaaa

SEQ ID NO: 104126 - DNA, 555 bp, Homo sapiens
  Payload ID: 468
  Gene Symbol: ATF7IP
  Gene Name: activating transcription factor 7 interacting protein
  ENST ID: ENST00000428217
  CDS Start-End: 180-555
aggtgttggtattagtccctttttaagggaggacagactattacaagataaagctgtaattgataaagaagttggcctggtgtggtggctcacacctgtaatcccagcactttgggaggccgaggcaggtggatcacgaggtcagaagatcaagaccatcctggctaacacgattcagaatggacagtttagaagaacctcagaaaaaagtctttaaggctcgaaaaacgatgagagtgagtgatcgtcagcaacttgaagcagtgtacaaggtcaaagaagaactgttgaaaactgatgtcaagctgttaaatggcaaccatgaaaatggagatttggacccaacctcacctttggaaaacatggattacattaaagacaaggaagaggtgaatggcattgaagagatttgttttgatcctgaaggaagtaaagcagaatggaaggaaacaccctgtatcctaagtgttaatgtaaaaaacaagcaggatgatgatttaaattgtgaacctttgtctccccataatataactccagaaccagtctctaaactgc

SEQ ID NO: 104127 - DNA, 619 bp, Homo sapiens
  Payload ID: 468
  Gene Symbol: ATF7IP
  Gene Name: activating transcription factor 7 interacting protein
  ENST ID: ENST00000535738
  CDS Start-End: 1-346
cactcctgtatcaaccatgagttcttctcagcctgtgtcacgaccattgcaacccatacaaccagcaccgcctcttcaaccatctggggtgccaacaagtggaccatctcagaccaccatacacttactacctacagctccaactaccgtgaatgtaacacatcgtccagtaactcaggtgaccacaagactccctgtaccaagagctcctgcaaaccaccaggtggtttatacaactcttcctgcaccaccagctcaggctcccttgcgaggaactgttatgcaggctcctgctgttcggcaggtcaatccccaaaatagagagttaaacagagaaaattgttgatgtatactagttgatttgtgctctgagtgttgtctttaatttaactttatttatggcctgtattagtatagtacacaatttgatattggtatattctctactctattaagaaacaccttacctagttagagtgggaatggtcaattgtgatttaccccagatgatggaaatcatggtaaaggatagccttcaatgagagtcttaaagatatggaaagtggctgagaaaagaagggaaaatgttaaagaaagcttgtagtttcttgtatatatc

SEQ ID NO: 104128 - DNA, 580 bp, Homo sapiens
  Payload ID: 468
  Gene Symbol: ATF7IP
  Gene Name: activating transcription factor 7 interacting protein
  ENST ID: ENST00000542508
  CDS Start-End: 484-580
agaatctcaagctgaattggcttccagcaagtaggctaggcttattattttatgcgcttcagccaaagaccagcaggaacacctttgtaattgaaaaagttaggtttactatttgctgcagggaggaaataatgttcactatggggaaactgtaaggcacatcaatcagtaagaggatgttagaaaaaacctagtataggatttgagtatagtataggttgggttattttggggagagattaaggaagtagatccttatcgtggattgggtgacatcagaaagtgggggcacttctattcttgggtatctcaataaattttatctatatagggaggacagactattacaagataaagctgtaattgataaagaagttggcctggtgtggtggctcacacctgtaatcccagcactttgggaggccgaggcaggtggatcacgaggtcagaagatcaagaccatcctggctaacacgattcagaatggacagtttagaagaacctcagaaaaaagtctttaaggctcgaaaaacgatgagagtgagtgatcgtcagcaacttgaagcagtgtacaaggtca

SEQ ID NO: 104129 - DNA, 550 bp, Homo sapiens
  Payload ID: 468
  Gene Symbol: ATF7IP
  Gene Name: activating transcription factor 7 interacting protein
  ENST ID: ENST00000534828
  CDS Start-End: 95-550
ttcttctttttttctcaagagaatatttgacctgatgtaattcttggatctctgaggtcttctacacagaagtatatttagagagcaattcagaatggacagtttagaagaacctcagaaaaaagtctttaaggctcgaaaaacgatgagagtgagtgatcgtcagcaacttgaagcagtgtacaaggtcaaagaagaactgttgaaaactgatgtcaagctgttaaatggcaaccatgaaaatggagatttggacccaacctcacctttggaaaacatggattacattaaagacaaggaagaggtgaatggcattgaagagatttgttttgatcctgaaggaagtaaagcagaatggaaggaaacaccctgtatcctaagtgttaatgtaaaaaacaagcaggatgatgatttaaattgtgaacctttgtctccccataatataactccagaaccagtctctaaactgcctgctgaaccagtttctggtgatccagcccctggtgatctggatgccggagatccagcctccggagtactggcctctggt

SEQ ID NO: 104130 - DNA, 573 bp, Homo sapiens
  Payload ID: 468
  Gene Symbol: ATF7IP
  Gene Name: activating transcription factor 7 interacting protein
  ENST ID: ENST00000539057
  CDS Start-End: 44-573
aaactaagagtatggctgcagcaagctccctcttggattcagaatggacagtttagaagaacctcagaaaaaagtctttaaggctcgaaaaacgatgagagtgagtgatcgtcagcaacttgaagcagtgtacaaggtcaaagaagaactgttgaaaactgatgtcaagctgttaaatggcaaccatgaaaatggagatttggacccaacctcacctttggaaaacatggattacattaaagacaaggaagaggtgaatggcattgaagagatttgttttgatcctgaaggaagtaaagcagaatggaaggaaacaccctgtatcctaagtgttaatgtaaaaaacaagcaggatgatgatttaaattgtgaacctttgtctccccataatataactccagaaccagtctctaaactgcctgctgaaccagtttctggtgatccagcccctggtgatctggatgccggagatccagcctccggagtactggcctctggtgattccacctctggtgatcccacctctagcgagccctcctctagtgatgctgcctctggtgatgcaacctctgg

SEQ ID NO: 104131 - DNA, 4847 bp, Homo sapiens
  Payload ID: 468
  Gene Symbol: ATF7IP
  Gene Name: activating transcription factor 7 interacting protein
  Uniprot ID: Q6VMQ6
  ENST ID: ENST00000544627
  CDS Start-End: 321-4157
gacgggattcacaggcattatgttacaaaactggcttgctgccttctgttttctttttctgtgtcctgtgtagctgcattgtttgttgcagtatatgcattagctgttgtctatgttcagtttcctgcaggctgacaaagtgggaggggctttgtttgttacatagctgagttttcactgtgtgagttcttgagtgcacattgcagccatcttaattacacttttgtgcaactgagactgtgcagctgtctcaaaatggctgctaacctagtctttgtagctgcttaggcagcaagtatgtcagtgaggagacttgtcacatgcatcaggaccagagattcagaatggacagtttagaagaacctcagaaaaaagtctttaaggctcgaaaaacgatgagagtgagtgatcgtcagcaacttgaagcagtgtacaaggtcaaagaagaactgttgaaaactgatgtcaagctgttaaatggcaaccatgaaaatggagatttggacccaacctcacctttggaaaacatggattacattaaagacaaggaagaggtgaatggcattgaagagatttgttttgatcctgaaggaagtaaagcagaatggaaggaaacaccctgtatcctaagtgttaatgtaaaaaacaagcaggatgatgatttaaattgtgaacctttgtctccccataatataactccagaaccagtctctaaactgcctgctgaaccagtttctggtgatccagcccctggtgatctggatgccggagatccagcctccggagtactggcctctggtgattccacctctggtgatcccacctctagcgagccctcctctagtgatgctgcctctggtgatgcaacctctggtgatgccccttctggtgatgtgtcccctggtgatgccacctctggtgatgccactgctgatgatctctcctctggtgatcccacctctagtgatcccatcccaggtgaaccggtccctgttgaacccatttctggtgattgtgccgctgatgatatagcctctagtgaaataacttctgttgatctggcttctggagcaccagcttccactgatccagcctctgatgatctggcctctggtgatctatcctctagtgaactggcctctgatgatctggccactggtgaactggcctctgatgagctgacttctgaatcaacctttgatcgtacctttgaaccaaagtctgtaccagtttgtgaaccagttcctgaaattgacaatatagaaccaagtagcaataaagatgatgattttcttgaaaaaaatggagctgatgaaaaattagagcaaattcagagtaaagactcattggatgagaaaaataaagctgataataatattgatgctaatgaagaaactctagaaacagatgatacaactatttgttcagatcgacctcctgaaaatgaaaagaaggtagaggaagatattatcacagagcttgctcttggagaagatgctatatctagcagtatggaaattgaccaaggtgaaaagaatgaagatgaaacttctgcagatcttgtagaaacgattaatgaaaatgttattgaagataacaaaagtgagaatatcttagaaaatacagactctatggagacagatgaaatcattcctattttggaaaagcttgcaccttctgaggatgaacttacttgcttttctaaaacatctctccttccaatcgatgagacaaatccagatttggaagagaaaatggaaagttcttttggttcaccatctaaacaagaaagtagtgagagtttgccaaaagaagcctttctggtcctctctgatgaagaggatatttcgggtgaaaaagatgagtctgaagttatatcgcaaaatgaaacgtgctctccagcagaagtagaaagtaatgaaaaggacaacaaacctgaggaagaagagcaagtaatacatgaagatgatgaaagaccttctgagaaaaatgaattttctagacgaaaacgttctaaatcagaagacatggacaatgtacagtctaaacgtcgtcgatatatggaagaagaatatgaggcagaatttcaagtaaagattacagccaaaggagacattaaccagaaacttcaaaaggttatacagtggttgctggaagaaaaattgtgtgcgctgcagtgtgctgtatttgataagactttggcagaattgaaaacacgagtggaaaagattgaatgtaacaagaggcataaaacagttctcactgaactacaggccaagatagccaggttaaccaaacgctttgaagcagccaaagaagatcttaagaaaagacatgaacatccacccaacccaccagtatcaccaggaaaaactgtaaatgatgtcaacagcaataataacatgtcttacagaaatgcaggcacagtgagacagatgctggagtccaaaagaaatgtaagcgagagtgcaccaccatcctttcaaactcctgtgaatacagtatcttcaaccaatcttgtcactcctccagcagttgtcagtagtcaacctaaattgcagactccagtgacttcgggttccctcacagcaacgtcagttcttcctgcacccaatacagctactgtagttgctactactcaggtgcctagtggaaatccccagcctacaatctctttacagcctttgccagtgattttgcatgtacctgttgcagtatcctcccagcctcagcttctacagagccatccagggactttggtgactaatcaaccatctggcaatgttgaattcatttctgtgcaaagcccacctacagtgagtggtcttaccaaaaatccagtatccttgccatccttgccaaatcccactaaaccaaacaacgttccttctgtgcccagtcctagtattcaaaggaaccctactgccagtgctgcaccattgggaacaacacttgctgtgcaggctgttccaacagcacactctattgtacaagccacaaggacttctttacccacagtgggcccatcaggactctatagtccatcaactaatcgaggtcctatacagatgaaaattccaatttctgcatttagtacttcgtctgctgcagaacagaacagcaataccaccccaagaattgaaaaccagacaaacaaaacaatagatgcttctgtcagtaagaaagcagctgatagcacatcacagtgtggaaaagccactggcagtgattcaagtggtgtcattgatctcacaatggatgatgaagagagtggagcttcacaagaccccaaaaaactaaatcacactcctgtatcaaccatgagttcttctcagcctgtgtcacgaccattgcaacccatacaaccagcaccgcctcttcaaccatctggggtgccaacaagtggaccatctcagaccaccatacacttactacctacagctccaactaccgtgaatgtaacacatcgtccagtaactcaggtgaccacaagactccctgtaccaagagctcctgcaaaccaccaggtggtttatacaactcttcctgcaccaccagctcaggctcccttgcgaggaactgttatgcaggctcctgctgttcggcaggtcaatccccaaaatagtgttacagttcgagtgcctcaaacaaccacatatgttgtaaacaatggactaaccctgggatcaacaggacctcagctcacagtgcatcaccgaccaccacaagtgcatactgagcccccacgccccgtgcacccagcacccttaccagaagctccacaaccacagcgtctgcccccagaagctgccagcacatctctgcctcagaagccacacttgaagttagcacgcgttcagagtcaaaatggcatagtactgtcatggagtgtcctggaggtggatcgaagctgtgccactgttgatagctaccatctctatgcttaccatgaggaacccagtgccactgtgccctcacaatggaaaaagattggggaagtcaaggcacttcccttgcccatggcatgtactctcacccagtttgtatctggtagcaaatactactttgcagtacgagccaaggatatttatggacgttttgggcctttctgtgatcctcagtcaacagatgtgatctcttctacccagagcagttaaaccttggagcctttatattttcctcttttaaaatttccaccttttggtcttgtttttaatcttgtgcatgataccccatgtaaaatccaccttgtgcaagatttcttggacagatgtgtgtatacactacatttgtttataaccagaagcaaaataaactcagcccacaaagctagaatcttttcctggacagtttaggctttggggtttggaaatgtaaatgtgtaccttgctttagttttgaggctggggaatatgtgtgggtgtttatgtgtgtttttccttatgtaggtgttattgcattggagtctcccattttcattctcaaatttacctcttaaagtacgaagtaagtagatcaaaggatttgagatgtgtaactggcatgattctgcttttgaaggatctatagtatcattttagttaagtgggtcaaacagaatcaaaacaaaacccaaagaaataaataaaaaacaaaatggctaaatagtttaaaataggttaattcgaacacaggaaaggatctatttgttgtttcttttgtctggtctcctgagttgttaattaggtgaaaaaagatctgcaatggccccctccctttcctaatctggcttttacatttattttgtgccttaaagattaactacaaagataaacatggccaaaaataaataaataaatatggccata

SEQ ID NO: 104132 - DNA, 558 bp, Homo sapiens
  Payload ID: 468
  Gene Symbol: ATF7IP
  Gene Name: activating transcription factor 7 interacting protein
  ENST ID: ENST00000538511
  CDS Start-End: 270-558
atctgcggaggcggcggcggtggcagcggcggcgcggcgactgaagcgcgcgaaaagctgaggcggcaacgtcggggacggctgcgcgggacggctctgtaggaaggaacttggttccccctccctcagcttccgccccaaaagcagaagtagaaagtaatgaaaaggacaacaaacctgaggaagaagagcaagtaatacatgaagatgatgaaagaccttctgagaaaaatgaattttctagacgaaaacgttctaaatcagaagacatggacaatgtacagtctaaacgtcgtcgatatatggaagaagaatatgaggcagaatttcaagtaaagattacagccaaaggagacattaaccagaaacttcaaaaggttatacagtggttgctggaagaaaaattgtgtgcgctgcagtgtgctgtatttgataagactttggcagaattgaaaacacgagtggaaaagattgaatgtaacaagaggcataaaacagttctcactgaactacaggccaagatagccaggttaaccaaacgctttgaagcagccaaag

SEQ ID NO: 104133 - DNA, 570 bp, Homo sapiens
  Payload ID: 468
  Gene Symbol: ATF7IP
  Gene Name: activating transcription factor 7 interacting protein
  ENST ID: ENST00000541056
  CDS Start-End: 63-570
agtttctgttgctgtgaaagaactgataagatggctgcagggggctccctttgggattcagaatggacagtttagaagaacctcagaaaaaagtctttaaggctcgaaaaacgatgagagtgagtgatcgtcagcaacttgaagcagtgtacaaggtcaaagaagaactgttgaaaactgatgtcaagctgttaaatggcaaccatgaaaatggagatttggacccaacctcacctttggaaaacatggattacattaaagacaaggaagaggtgaatggcattgaagagatttgttttgatcctgaaggaagtaaagcagaatggaaggaaacaccctgtatcctaagtgttaatgtaaaaaacaagcaggatgatgatttaaattgtgaacctttgtctccccataatataactccagaaccagtctctaaactgcctgctgaaccagtttctggtgatccagcccctggtgatctggatgccggagatccagcctccggagtactggcctctggtgattccacctctggtgatcccacctctagcgagccctcctctagtgatgctg

SEQ ID NO: 104134 - DNA, 571 bp, Homo sapiens
  Payload ID: 468
  Gene Symbol: ATF7IP
  Gene Name: activating transcription factor 7 interacting protein
  ENST ID: ENST00000536279
  CDS Start-End: 304-571
gatgttaggtaatttgcccagtctcacacagtaggtttcctgggagagttggaattcaaatctgtgaatctgtctacagtctacagagttcatgttcttaattgggttattaaaagtgatgaatttttttaaaggaatgcttacttttaatggaggacagactattacaagataaagctgtaattgataaagaagttggcctggtgtggtggctcacacctgtaatcccagcactttgggaggccgaggcaggtggatcacgaggtcagaagatcaagaccatcctggctaacacgattcagaatggacagtttagaagaacctcagaaaaaagtctttaaggctcgaaaaacgatgagagtgagtgatcgtcagcaacttgaagcagtgtacaaggtcaaagaagaactgttgaaaactgatgtcaagctgttaaatggcaaccatgaaaatggagatttggacccaacctcacctttggaaaacatggattacattaaagacaaggaagaggtgaatggcattgaagagatttgttttgatcctgaaggaagtaaagcagaatggaagg

SEQ ID NO: 104135 - DNA, 4887 bp, Homo sapiens
  Payload ID: 468
  Gene Symbol: ATF7IP
  Gene Name: activating transcription factor 7 interacting protein
  Uniprot ID: Q6VMQ6
  ENST ID: ENST00000543189
  CDS Start-End: 143-3460
ggcggcggcggtggcagcggcggcgcggcgactgaagcgcgcgaaaagctgaggcggcaacgtcggggacggctgcgcgggacggctctgtaggaaggaacttggttccccctccctcagcttccgccccaaaagattcagaatggacagtttagaagaacctcagaaaaaagtctttaaggctcgaaaaacgatgagagtgagtgatcgtcagcaacttgaagcagtgtacaaggtcaaagaagaactgttgaaaactgatgtcaagctgttaaatggcaaccatgaaaatggagatttggacccaacctcacctttggaaaacatggattacattaaagacaaggaagaggtgaatggcattgaagagatttgttttgatcctgaaggaagtaaagcagaatggaaggaaacaccctgtatcctaagtgttaatgtaaaaaacaagcaggatgatgatttaaattgtgaacctttgtctccccataatataactccagaaccagtctctaaactgcctgctgaaccagtttctggtgatccagcccctggtgatctggatgccggagatccagcctccggagtactggcctctggtgattccacctctggtgatcccacctctagcgagccctcctctagtgatgctgcctctggtgatgcaacctctggtgatgccccttctggtgatgtgtcccctggtgatgccacctctggtgatgccactgctgatgatctctcctctggtgatcccacctctagtgatcccatcccaggtgaaccggtccctgttgaacccatttctggtgattgtgccgctgatgatatagcctctagtgaaataacttctgttgatctggcttctggagcaccagcttccactgatccagcctctgatgatctggcctctggtgatctatcctctagtgaactggcctctgatgatctggccactggtgaactggcctctgatgagctgacttctgaatcaacctttgatcgtacctttgaaccaaagtctgtaccagtttgtgaaccagttcctgaaattgacaatatagaaccaagtagcaataaagatgatgattttcttgaaaaaaatggagctgatgaaaaattagagcaaattcagagtaaagactcattggatgagaaaaataaagctgataataatattgatgctaatgaagaaactctagaaacagatgatacaactatttgttcagatcgacctcctgaaaatgaaaagaaggtagaggaagatattatcacagagcttgctcttggagaagatgctatatctagcagtatggaaattgaccaaggtgaaaagaatgaagatgaaacttctgcagatcttgtagaaacgattaatgaaaatgttattgaagataacaaaagtgagaatatcttagaaaatacagactctatggagacagatgaaatcattcctattttggaaaagcttgcaccttctgaggatgaacttacttgcttttctaaaacatctctccttccaatcgatgagacaaatccagatttggaagagaaaatggaaagttcttttggttcaccatctaaacaagaaagtagtgagagtttgccaaaagaagcctttctggtcctctctgatgaagaggatatttcgggtgaaaaagatgagtctgaagttatatcgcaaaatgaaacgtgctctccagaagtagaaagtaatgaaaaggacaacaaacctgaggaagaagagcaagtaatacatgaagatgatgaaagaccttctgagaaaaatgaattttctagacgaaaacgttctaaatcagaagacatggacaatgtacagtctaaacgtcgtcgatatatggaagaagaatatgaggcagaatttcaagtaaagattacagccaaaggagacattaaccagaaacttcaaaaggttatacagtggttgctggaagaaaaattgtgtgcgctgcagtgtgctgtatttgataagactttggcagaattgaaaacacgagtggaaaagattgaatgtaacaagaggcataaaacagttctcactgaactacaggccaagatagccaggttaaccaaacgctttgaagcagccaaagaagatcttaagaaaagacatgaacatccacccaacccaccagtatcaccaggaaaaactgtaaatgatgtcaacagcaataataacatgtcttacagaaatgcaggcacagtgagacagatgctggagtccaaaagaaatgtaagcgagagtgcaccaccatcctttcaaactcctgtgaatacagtatcttcaaccaatcttgtcactcctccagcagttgtcagtagtcaacctaaattgcagactccagtgacttcgggttccctcacagcaacgtcagttcttcctgcacccaatacagctactgtagttgctactactcaggtgcctagtggaaatccccagcctacaatctctttacagcctttgccagtgattttgcatgtacctgttgcagtatcctcccagcctcagcttctacagagccatccagggactttggtgactaatcaaccatctggcaatgttgaattcatttctgtgcaaagcccacctacagtgagtggtcttaccaaaaatccagtatccttgccatccttgccaaatcccactaaaccaaacaacgttccttctgtgcccagtcctagtattcaaaggaaccctactgccagtgctgcaccattgggaacaacacttgctgtgcaggctgttccaacagcacactctattgtacaagccacaaggacttctttacccacagtgggcccatcaggactctatagtccatcaactaatcgaggtcctatacagatgaaaattccaatttctgcatttagtacttcgtctgctgcagaacagaacagcaataccaccccaagaattgaaaaccagacaaacaaaacaatagatgcttctgtcagtaagaaagcagctgatagcacatcacagtgtggaaaagccactggcagtgattcaagtggtgtcattgatctcacaatggatgatgaagagagtggagcttcacaagaccccaaaaaactaaatcacactcctgtatcaaccatgagttcttctcagcctgtgtcacgaccattgcaacccatacaaccagcaccgcctcttcaaccatctggggtgccaacaagtggaccatctcagaccaccatacacttactacctacagctccaactaccgtgaatgtaacacatcgtccagtaactcaggtgaccacaagactccctgtaccaagagctcctgcaaaccaccaggtggtttatacaactcttcctgcaccaccagctcaggctcccttgcgaggaactgttatgcaggctcctgctgttcggcaggtcaatccccaaaatagtaagagatttttcttgtatatggccccaagatacatgtagttctcttcagcatttagttggaatggcatataataatgttaaattttgcaaaaatttcttataatgtcatattaaaagtattgttataagttcaagagatctgtactacaacatagaaactatagtatagttaaaatcaatgtagtatattcttgaaaatagctgatagagcagattttaagtattgtcaccacacacaaaaaaggtaagtatgtgagatcatgcatatgtcagctagatttagccattctgcagtgtatgcatatttcaaacatgttgtataccataaatatatataatttttgtcaattaaaaaatagttttcaaaaaagaaatggcagtataaccaaaactaatctattattatttttcttcccttaggagagttaaacagagaaaattgttgatgtatactagttgatttgtgctctgagtgttgtctttaatttaactttatttatggcctgtattagtatagtacacaatttgatattggtatattctctactctattaagaaacaccttacctagttagagtgggaatggtcaattgtgatttaccccagatgatggaaatcatggtaaaggatagccttcaatgagagtcttaaagatatggaaagtggctgagaaaagaagggaaaatgttaaagaaagcttgtagtttcttgtatatatcatatattagttacatacatatgttacatgcatgttacatatgtagatgacattttaaaattatatattaaccacatgtatataagcagtagtagaatatatcacataaacacaagcttatataaaaggtatatttaaactttaaagtaaagaaaaataataaaatgaactacgtatgaactcttcatcaggttaagaagtagaaatttttcagtatcctgtaagtggtcttgtattcctgtcttgactacatcccttttcctttccatcaaaggtaaccactgttcctacttttctattagtcattctgcttttctttatgattttgccaccaaaattgatatcatttaaacatactagggttctctagaggacagaactaacaggataaatagatatataaaggggagtttactaagtattaacttacatgatcacaaggtccctcaataggctgtctgcaagctgagcaaggaaagccagactgaatccccaaactgaagaatttggagtccagtgtcgaagggcaggaagcatccagcacaggagaaagatgtaggctggaaggctagccagtctctccatttcatgtttttctgcctgctttgtattcattgacagctgattagattgtgcccaccagattaaaggtggatctgccttctccagcccattttctgcctgctttgtattcattgatagctgattagattgtgcacaccagattaaaggtggatctgccttcccc

SEQ ID NO: 104136 - DNA, 575 bp, Homo sapiens
  Payload ID: 468
  Gene Symbol: ATF7IP
  Gene Name: activating transcription factor 7 interacting protein
  ENST ID: ENST00000542514
  CDS Start-End: 179-575
aaccaaaactaagaaattgatgttagggaggacagactattacaagataaagctgtaattgataaagaagttggcctggtgtggtggctcacacctgtaatcccagcactttgggaggccgaggcaggtggatcacgaggtcagaagatcaagaccatcctggctaacacgattcagaatggacagtttagaagaacctcagaaaaaagtctttaaggctcgaaaaacgatgagagtgagtgatcgtcagcaacttgaagcagtgtacaaggtcaaagaagaactgttgaaaactgatgtcaagctgttaaatggcaaccatgaaaatggagatttggacccaacctcacctttggaaaacatggattacattaaagacaaggaagaggtgaatggcattgaagagatttgttttgatcctgaaggaagtaaagcagaatggaaggaaacaccctgtatcctaagtgttaatgtaaaaaacaagcaggatgatgatttaaattgtgaacctttgtctccccataatataactccagaaccagtctctaaactgcctgctgaaccagtttctggtg

SEQ ID NO: 104137 - DNA, 574 bp, Homo sapiens
  Payload ID: 468
  Gene Symbol: ATF7IP
  Gene Name: activating transcription factor 7 interacting protein
  ENST ID: ENST00000542991
  CDS Start-End: 398-574
agacctaatagttggcagcatagaaagcagtacaaagaattctgattctaggcattttcactttgaaatagtcattttgaagatatactctgtgtgttctgtgagcttcattgacatattgtctgacgttttttggcttttgtggtaaatgggatgtatgctgcacaaactacccaacagatgtgaaccactatttgaaaggaattttaatatgtagccaacctactgtattcttgttttttttttaatgaatatgaatcaaacaagaaatttagactcgagaaggctgacctagaagtctgcattagcttttaatgtttatacaaatgaactaagtagcagtggtttacagaagaggaagtccttttcacagtgtcaagctgcccacagattcagaatggacagtttagaagaacctcagaaaaaagtctttaaggctcgaaaaacgatgagagtgagtgatcgtcagcaacttgaagcagtgtacaaggtcaaagaagaactgttgaaaactgatgtcaagctgttaaatggcaaccatgaaaatggagatttggacccaacctcacctttg

SEQ ID NO: 104138 - DNA, 4142 bp, Homo sapiens
  Payload ID: 468
  Gene Symbol: ATF7IP
  Gene Name: activating transcription factor 7 interacting protein
  Uniprot ID: Q6VMQ6
  ENST ID: ENST00000540793
  CDS Start-End: 156-3968
tagtatacaacaagcagtaggttttctatgtcttaaacattacatgaaatgtgctgcttgcatctcttctaagatcaatttgtattaagtctacaattaggtggcttctgtttcagttattaaactctctttctcttttttcttaaagattcagaatggacagtttagaagaacctcagaaaaaagtctttaaggctcgaaaaacgatgagagtgagtgatcgtcagcaacttgaagcagtgtacaaggtcaaagaagaactgttgaaaactgatgtcaagctgttaaatggcaaccatgaaaatggagatttggacccaacctcacctttggaaaacatggattacattaaagacaaggaagaggtgaatggcattgaagagatttgttttgatcctgaaggaagtaaagcagaatggaaggaaacaccctgtatcctaagtgttaatgtaaaaaacaagcaggatgatgatttaaattgtgaacctttgtctccccataatataactccagaaccagtctctaaactgcctgctgaaccagtttctggtgatccagcccctggtgatctggatgccggagatccagcctccggagtactggcctctggtgattccacctctggtgatcccacctctagcgagccctcctctagtgatgctgcctctggtgatgcaacctctggtgatgccccttctggtgatgtgtcccctggtgatgccacctctggtgatgccactgctgatgatctctcctctggtgatcccacctctagtgatcccatcccaggtgaaccggtccctgttgaacccatttctggtgattgtgccgctgatgatatagcctctagtgaaataacttctgttgatctggcttctggagcaccagcttccactgatccagcctctgatgatctggcctctggtgatctatcctctagtgaactggcctctgatgatctggccactggtgaactggcctctgatgagctgacttctgaatcaacctttgatcgtacctttgaaccaaagtctgtaccagtttgtgaaccagttcctgaaattgacaatatagaaccaagtagcaataaagatgatgattttcttgaaaaaaatggagctgatgaaaaattagagcaaattcagagtaaagactcattggatgagaaaaataaagctgataataatattgatgctaatgaagaaactctagaaacagatgatacaactatttgttcagatcgacctcctgaaaatgaaaagaaggtagaggaagatattatcacagagcttgctcttggagaagatgctatatctagcagtatggaaattgaccaaggtgaaaagaatgaagatgaaacttctgcagatcttgtagaaacgattaatgaaaatgttattgaagataacaaaagtgagaatatcttagaaaatacagactctatggagacagatgaaatcattcctattttggaaaagcttgcaccttctgaggatgaacttacttgcttttctaaaacatctctccttccaatcgatgagacaaatccagatttggaagagaaaatggaaagttcttttggttcaccatctaaacaagaaagtagtgagagtttgccaaaagaagcctttctggtcctctctgatgaagaggatatttcgggtgaaaaagatgagtctgaagttatatcgcaaaatgaaacgtgctctccagcagaagtagaaagtaatgaaaaggacaacaaacctgaggaagaagagcaagtaatacatgaagatgatgaaagaccttctgagaaaaatgaattttctagacgaaaacgttctaaatcagaagacatggacaatgtacagtctaaacgtcgtcgatatatggaagaagaatatgaggcagaatttcaagtaaagattacagccaaaggagacattaaccagaaacttcaaaaggttatacagtggttgctggaagaaaaattgtgtgcgctgcagtgtgctgtatttgataagactttggcagaattgaaaacacgagtggaaaagattgaatgtaacaagaggcataaaacagttctcactgaactacaggccaagatagccaggttaaccaaacgctttgaagcagccaaagaagatcttaagaaaagacatgaacatccacccaacccaccagtatcaccaggaaaaactgtaaatgatgtcaacagcaataataacatgtcttacagaaatgcaggcacagtgagacagatgctggagtccaaaagaaatgtaagcgagagtgcaccaccatcctttcaaactcctgtgaatacagtatcttcaaccaatcttgtcactcctccagcagttgtcagtagtcaacctaaattgcagactccagtgacttcgggttccctcacagcaacgtcagttcttcctgcacccaatacagctactgtagttgctactactcaggtgcctagtggaaatccccagcctacaatctctttacagcctttgccagtgattttgcatgtacctgttgcagtatcctcccagcctcagcttctacagagccatccagggactttggtgactaatcaaccatctggcaatgttgaattcatttctgtgcaaagcccacctacagtgagtggtcttaccaaaaatccagtatccttgccatccttgccaaatcccactaaaccaaacaacgttccttctgtgcccagtcctagtattcaaaggaaccctactgccagtgctgcaccattgggaacaacacttgctgtgcaggctgttccaacagcacactctattgtacaagccacaaggacttctttacccacagtgggcccatcaggactctatagtccatcaactaatcgaggtcctatacagatgaaaattccaatttctgcatttagtacttcgtctgctgcagaacagaacagcaataccaccccaagaattgaaaaccagacaaacaaaacaatagatgcttctgtcagtaagaaagcagctgatagcacatcacagtgtggaaaagccactggcagtgattcaagtggtgtcattgatctcacaatggatgatgaagagagtggagcttcacaagaccccaaaaaactaaatcacactcctgtatcaaccatgagttcttctcagcctgtgtcacgaccattgcaacccatacaaccagcaccgcctcttcaaccatctggggtgccaacaagtggaccatctcagaccaccatacacttactacctacagctccaactaccgtgaatgtaacacatcgtccagtaactcaggtgaccacaagactccctgtaccaagagctcctgcaaaccaccaggtggtttatacaactcttcctgcaccaccagctcaggctcccttgcgaggaactgttatgcaggctcctgctgttcggcaggtcaatccccaaaatagtgttacagttcgagtgcctcaaacaaccacatatgttgtaaacaatggactaaccctgggatcaacaggacctcagctcacagtgcatcaccgaccaccacaagtgcatactgagcccccacgccccgtgcacccagcacccttaccagaagctccacaaccacagcgtctgcccccagaagctgccagcacatctctgcctcagaagccacacttgaagttagcacgcgttcagagtcaaaatggcatagtactgtcatggagtgtcctggaggtggatcgaagctgtgccactgttgatagctaccatctctatgcttaccatgaggaacccagtgccactgtgccctcacaatggaaaaagattggggaagtcaaggcacttcccttgcccatggcatgtactctcacccagtttgtatctggtagcaaatactactttgcagtacgagccaaggatatttatggacgttttgggcctttctgtgatcctcagtcaacagatgtgatctcttctacccagagcagttaaaccttggagcctttatattttcctcttttaaaatttccaccttttggtcttgtttttaatcttgtgcatgataccccatgtaaaatccaccttgtgcaagatttcttggacagatgtgtgtatacactacatttgtttataaccagaagcaaaataaactcagcccacaaagct

SEQ ID NO: 104139 - DNA, 577 bp, Homo sapiens
  Payload ID: 468
  Gene Symbol: ATF7IP
  Gene Name: activating transcription factor 7 interacting protein
  ENST ID: ENST00000545723
  CDS Start-End: 148-577
gcggaggcggcggcggtggcagcggcggcgcggcgactgaagcgcgcgaaaagctgaggcggcaacgtcggggacggctgcgcgggacggctctgtaggaaggaacttggttccccctccctcagcttccgccccaaaagattcagaatggacagtttagaagaacctcagaaaaaagtctttaaggctcgaaaaacgatgagagtgagtgatcgtcagcaacttgaagcagtgtacaaggtcaaagaagaactgttgaaaactgatgtcaagctgttaaatggcaaccatgaaaatggagatttggacccaacctcacctttggaaaacatggattacattaaagacaaggaagaggtgaatggcattgaagagatttgttttgatcctgaaggaagtaaagcagaatttcaagtaaagattacagccaaaggagacattaaccagaaacttcaaaaggttatacagtggttgctggaagaaaaattgtgtgcgctgcagtgtgctgtatttgataagactttggcagaattgaaaacacgagtggaaaagattgaatgtaacaagaggcataaaa

SEQ ID NO: 104140 - DNA, 564 bp, Homo sapiens
  Payload ID: 468
  Gene Symbol: ATF7IP
  Gene Name: activating transcription factor 7 interacting protein
  ENST ID: ENST00000542967
  CDS Start-End: 37-564
aatgacgtcacatatgagatagaatggagattcagaatggacagtttagaagaacctcagaaaaaagtctttaaggctcgaaaaacgatgagagtgagtgatcgtcagcaacttgaagcagtgtacaaggtcaaagaagaactgttgaaaactgatgtcaagctgttaaatggcaaccatgaaaatggagatttggacccaacctcacctttggaaaacatggattacattaaagacaaggaagaggtgaatggcattgaagagatttgttttgatcctgaaggaagtaaagcagaatggaaggaaacaccctgtatcctaagtgttaatgtaaaaaacaagcaggatgatgatttaaattgtgaacctttgtctccccataatataactccagaaccagtctctaaactgcctgctgaaccagtttctggtgatccagcccctggtgatctggatgccggagatccagcctccggagtactggcctctggtgattccacctctggtgatcccacctctagcgagccctcctctagtgatgctgcctctggtgatgcaacctct

SEQ ID NO: 104141 - DNA, 572 bp, Homo sapiens
  Payload ID: 468
  Gene Symbol: ATF7IP
  Gene Name: activating transcription factor 7 interacting protein
  ENST ID: ENST00000535132
  CDS Start-End: 264-572
tttctcaagagaatatttgacctgatgtaattcttggatctctgaggtcttctacacagaagtatatttagagagcacctcattatgttgcccaggctggtcttgaactccaggggtcaagagagtttcccacttcagcctcccaaagtgctgagattacaagcatgagccaccatgtccagcctgtactgcctttcctttttcctttatgatttctacagcacttgtctgcccagaaaatattacctgttgtaagattcagaatggacagtttagaagaacctcagaaaaaagtctttaaggctcgaaaaacgatgagagtgagtgatcgtcagcaacttgaagcagtgtacaaggtcaaagaagaactgttgaaaactgatgtcaagctgttaaatggcaaccatgaaaatggagatttggacccaacctcacctttggaaaacatggattacattaaagacaaggaagaggtgaatggcattgaagagatttgttttgatcctgaaggaagtaaagcagaatggaaggaaacaccctgtatcctaagtgttaatgtaaaaaacaagcag

SEQ ID NO: 104142 - DNA, 8774 bp, Homo sapiens
  Payload ID: 468
  Gene Symbol: ATF7IP
  Gene Name: activating transcription factor 7 interacting protein
  Uniprot ID: Q6VMQ6
  ENST ID: ENST00000536444
  CDS Start-End: 107-3916
gcgcgcgaaaagctgaggcggcaacgtcggggacggctgcgcgggacggctctgtaggaaggaacttggttccccctccctcagcttccgccccaaaagattcagaatggacagtttagaagaacctcagaaaaaagtctttaaggctcgaaaaacgatgagagtgagtgatcgtcagcaacttgaagcagtgtacaaggtcaaagaagaactgttgaaaactgatgtcaagctgttaaatggcaaccatgaaaatggagatttggacccaacctcacctttggaaaacatggattacattaaagacaaggaagaggtgaatggcattgaagagatttgttttgatcctgaaggaagtaaagcagaatggaaggaaacaccctgtatcctaagtgttaatgtaaaaaacaagcaggatgatgatttaaattgtgaacctttgtctccccataatataactccagaaccagtctctaaactgcctgctgaaccagtttctggtgatccagcccctggtgatctggatgccggagatccagcctccggagtactggcctctggtgattccacctctggtgatcccacctctagcgagccctcctctagtgatgctgcctctggtgatgcaacctctggtgatgccccttctggtgatgtgtcccctggtgatgccacctctggtgatgccactgctgatgatctctcctctggtgatcccacctctagtgatcccatcccaggtgaaccggtccctgttgaacccatttctggtgattgtgccgctgatgatatagcctctagtgaaataacttctgttgatctggcttctggagcaccagcttccactgatccagcctctgatgatctggcctctggtgatctatcctctagtgaactggcctctgatgatctggccactggtgaactggcctctgatgagctgacttctgaatcaacctttgatcgtacctttgaaccaaagtctgtaccagtttgtgaaccagttcctgaaattgacaatatagaaccaagtagcaataaagatgatgattttcttgaaaaaaatggagctgatgaaaaattagagcaaattcagagtaaagactcattggatgagaaaaataaagctgataataatattgatgctaatgaagaaactctagaaacagatgatacaactatttgttcagatcgacctcctgaaaatgaaaagaaggtagaggaagatattatcacagagcttgctcttggagaagatgctatatctagcagtatggaaattgaccaaggtgaaaagaatgaagatgaaacttctgcagatcttgtagaaacgattaatgaaaatgttattgaagataacaaaagtgagaatatcttagaaaatacagactctatggagacagatgaaatcattcctattttggaaaagcttgcaccttctgaggatgaacttacttgcttttctaaaacatctctccttccaatcgatgagacaaatccagatttggaagagaaaatggaaagttcttttggttcaccatctaaacaagaaagtagtgagagtttgccaaaagaagcctttctggtcctctctgatgaagaggatatttcgggtgaaaaagatgagtctgaagttatatcgcaaaatgaaacgtgctctccagaagtagaaagtaatgaaaaggacaacaaacctgaggaagaagagcaagtaatacatgaagatgatgaaagaccttctgagaaaaatgaattttctagacgaaaacgttctaaatcagaagacatggacaatgtacagtctaaacgtcgtcgatatatggaagaagaatatgaggcagaatttcaagtaaagattacagccaaaggagacattaaccagaaacttcaaaaggttatacagtggttgctggaagaaaaattgtgtgcgctgcagtgtgctgtatttgataagactttggcagaattgaaaacacgagtggaaaagattgaatgtaacaagaggcataaaacagttctcactgaactacaggccaagatagccaggttaaccaaacgctttgaagcagccaaagaagatcttaagaaaagacatgaacatccacccaacccaccagtatcaccaggaaaaactgtaaatgatgtcaacagcaataataacatgtcttacagaaatgcaggcacagtgagacagatgctggagtccaaaagaaatgtaagcgagagtgcaccaccatcctttcaaactcctgtgaatacagtatcttcaaccaatcttgtcactcctccagcagttgtcagtagtcaacctaaattgcagactccagtgacttcgggttccctcacagcaacgtcagttcttcctgcacccaatacagctactgtagttgctactactcaggtgcctagtggaaatccccagcctacaatctctttacagcctttgccagtgattttgcatgtacctgttgcagtatcctcccagcctcagcttctacagagccatccagggactttggtgactaatcaaccatctggcaatgttgaattcatttctgtgcaaagcccacctacagtgagtggtcttaccaaaaatccagtatccttgccatccttgccaaatcccactaaaccaaacaacgttccttctgtgcccagtcctagtattcaaaggaaccctactgccagtgctgcaccattgggaacaacacttgctgtgcaggctgttccaacagcacactctattgtacaagccacaaggacttctttacccacagtgggcccatcaggactctatagtccatcaactaatcgaggtcctatacagatgaaaattccaatttctgcatttagtacttcgtctgctgcagaacagaacagcaataccaccccaagaattgaaaaccagacaaacaaaacaatagatgcttctgtcagtaagaaagcagctgatagcacatcacagtgtggaaaagccactggcagtgattcaagtggtgtcattgatctcacaatggatgatgaagagagtggagcttcacaagaccccaaaaaactaaatcacactcctgtatcaaccatgagttcttctcagcctgtgtcacgaccattgcaacccatacaaccagcaccgcctcttcaaccatctggggtgccaacaagtggaccatctcagaccaccatacacttactacctacagctccaactaccgtgaatgtaacacatcgtccagtaactcaggtgaccacaagactccctgtaccaagagctcctgcaaaccaccaggtggtttatacaactcttcctgcaccaccagctcaggctcccttgcgaggaactgttatgcaggctcctgctgttcggcaggtcaatccccaaaatagtgttacagttcgagtgcctcaaacaaccacatatgttgtaaacaatggactaaccctgggatcaacaggacctcagctcacagtgcatcaccgaccaccacaagtgcatactgagcccccacgccccgtgcacccagcacccttaccagaagctccacaaccacagcgtctgcccccagaagctgccagcacatctctgcctcagaagccacacttgaagttagcacgcgttcagagtcaaaatggcatagtactgtcatggagtgtcctggaggtggatcgaagctgtgccactgttgatagctaccatctctatgcttaccatgaggaacccagtgccactgtgccctcacaatggaaaaagattggggaagtcaaggcacttcccttgcccatggcatgtactctcacccagtttgtatctggtagcaaatactactttgcagtacgagccaaggatatttatggacgttttgggcctttctgtgatcctcagtcaacagatgtgatctcttctacccagagcagttaaaccttggagcctttatattttcctcttttaaaatttccaccttttggtcttgtttttaatcttgtgcatgataccccatgtaaaatccaccttgtgcaagatttcttggacagatgtgtgtatacactacatttgtttataaccagaagcaaaataaactcagcccacaaagctagaatcttttcctggacagtttaggctttggggtttggaaatgtaaatgtgtaccttgctttagttttgaggctggggaatatgtgtgggtgtttatgtgtgtttttccttatgtaggtgttattgcattggagtctcccattttcattctcaaatttacctcttaaagtacgaagtaagtagatcaaaggatttgagatgtgtaactggcatgattctgcttttgaaggatctatagtatcattttagttaagtgggtcaaacagaatcaaaacaaaacccaaagaaataaataaaaaacaaaatggctaaatagtttaaaataggttaattcgaacacaggaaaggatctatttgttgtttcttttgtctggtctcctgagttgttaattaggtgaaaaaagatctgcaatggccccctccctttcctaatctggcttttacatttattttgtgccttaaagattaactacaaagataaacatggccaaaaataaataaataaatatggccatatgtccgttgttgcttagtcttcccttgcagccttttacccttgatttctccttcatctctaccaaatatagcacaactcctcaagtaattttttttttttaagatggagttttgctcttgttgcccaggctagagtgcggtggcacaatcttggctcactgcaacctctgcctcctgggttcaagcaattcttctgtctcagccccagagtagctgggattacaggcacctgtcaccatgcccggctaatttttgtatttttagtagagatggggtttcaccatgttggccaggctggtcttgaactcctgacctcaggtgatccacccgcctcggcctcccagagtgctgcgattacagttgtgagccactgtatccagcctactcaagtgatttttaaaccaaggtgtgtgtatgtacatggatgtgtatgtacacacacacacaggtgcatgcatagtctcatcttagccgggcatggtggcgacaatcacatttaactccaaaaatttgacgtgctattttcttctaaaactatagatgcttttatttttggtcactatttaactttgtgtaaagtggaccaagagaaaaccatattgtggaagacagtttttcacacattttagtatccgtgttgcacactgtgttagagattatgaaaaccattctagttcagtttatcacccaaagctatcacccaacactaactccttagtattctttcaaaggaagcaaatagtaagattacaatatagaatgagctaaaatatcaaggggaaagcttcatttcctctttattctctttatcgtccttcccattttaaccttttaactttgttttgatggtgccaagttgagtctgatgtacccattgttagctttggatagaatttaaagtatatcccagaattagctgggcatgttggtgcatgcctgtaatcccagctactcaggaggcaaggctggagaatcgcttgaacccgggaggcggaggttgcagtgagctgagattgcgccattgcactccatcctgggagacaagagcgaaactctgcctcaaaaaaaaaagaatttaaagtatatcctttgaggtcattttatgtaacaattagatataacctcctgtgtatctctctgttcctcttcaaagttattaaaattcagcttaggtcatggatttttaatatgagggccagctgtactggtgtcaggtaggtgttttgggtgtagataatttaggactggagggctgagttaagttttaggaggagaatgtggttgagaatattttgaaaggaatttatggagtttgtgaaataacttcgaagtcctcttcctttacaatatttgaattcatatttgtaccttctcaaaatagtgattcatttttcctagaattacaggagggagctcttttactaatgttgttttgtttgcaactttgatggcttataataggaagtattctagttgtaaagaaaactctttagagacttttgactggtcagtatactgaggtgtgagatttgattcatgatgaagaaagcctatagattgccaaaaaattaattctccaaaccacctttcactctcagaaaatgagaccacaaaggagtatgctataaatcaaatttgccaaccaattatgtagatattactcattctaggactaatgatgatggtaaagaagttgccagtgttatggcaatgaaaatttcagaaaggaggagttgatgatcttctagatgtatatgaacacctgtctatatctgcatgtatatgttttgacctgcagtggttgcaatgttgatatgtgttcaagattattcctgtctacaaaactgaaggcccatgttcaaattgttctttattgggtgtttttatggtcacgtggtaacaattttcttacctaacctacaaaaggttctcttgatgaacatttttatttatatttactaatcttttttaaaaaaagctttcatagcattatataatcagatgaagaaagcccagtagaataaaaaaaaaattcattagcctagcctatattatgttttctgtcaaaggaaaacaaattctcaaataggaattctaaaaatatttactaaagtaaaataactacttaaaatgttttattccagttggaaggaaggtacagggagaaatcgcaattatttaggggagaagtatatttattataagatggtgtcctcaaattagcctaccatggcacgtaggggcagcagctatattagatttactagaggtgctaagttagaacactaggcttttattgaggcaggttttaatattgatagatgctttttgtttggtttgtttcttctgggagagaatggaggacttaagtagaagtagctactgataacagactttctagtagcagtttccactccacggttacctttttagtttcatagtatcttttcacaaagtattacaaataagctagattctcccagtttgggaatgcaagtttgctacatttttagcctggcaatatttgtgtaggtattgccttattggaaattctggaaacctgatactgcaacctgcaatgtaggatgtttgtatggcatttaaaggtaatggtgatgtttattattctatactttgcattctgtgagagtaattttcactctgtcttaagtgtgagtaagcctcttctaaaaatcttgttcttgccaagaaatttataaatcacatacgaagacgtctgttgctaacagttaactttatgaggtaactatatccttctatttctctggactcatttttaaaaaatatgccgaatactgcatactgtttaaggtagtatataagtttatgagagaagtggagagctttcttccttgaaaagtcggtatttgttgagataccatttgcctcacagagaggtgttccccactcccatccccattgccagataataaatattttgagaaaagtgacctaaaacagctgaaatcttaggtgcatctgtctgcagacctccttaagcaggctgtatcttacaattcccttactgcactgggtaagtgttaacttagtttttgttgtttgctcttttgctttaaatattctccaaattaccatttatgcaacatggttagggttaatactgcatggtattcatttatcttgtttcatgaactttccagtactgtacaaggtcaacaaagtaatgcctgtggtatcctcatctctcacttttttactctgtgattttagcacagtaaggtactgcaaagaccttccttccaaatgttctccttgactttatttcttgggccaattcagtatcctcaacatcctaagattttgttgttttatcactgacctgtggttggcctgttttattctaatttccagaaaagtcaagtcccagtatttgcaatatcaaataactctaaaaccgatgtgtgattctaccttccttactatttttactgggcaaatgccctatttttttaattattattatttttaacttttgggacacacaaaaatcagcaattctcatgaagcgtttgttagtgtggcagacttgtctaattcctgaaactcattcatccccttgagccagccaatggggaggaataggataatgcaaacacatgttttgttttctcattttcaaataatttaccatgttaaaataaacttttctttgttttttatttgtagagtcagctaagtacccatatttaaatgccgtctttattatttttttgaggtctttgtttttgtctgtttttgttttgttttgttttgtaaataaggtaactgggcaatcaaacaccttttggggattctggctttagtattttatcagccattttaaaattaaatataaaaatcctttgtaagaaacttgcatcctaatttttctttattgcaattgaaagtgtaaataataagacaatgtaagtaagaccttcctaatgtctaatacaaactgggctccagcaagtggccctatttttattagggttttgaaggtttgtgtgtgtgtgtgcgtgcgtgtgtgtgtttttcttttttaaatgtatagtagagtggtgtctgtataagtgttacctgtagtggggttttgtccagcaagcctgaaatttatactttgaaataaaactactgggtttttaac

SEQ ID NO: 104143 - DNA, 568 bp, Homo sapiens
  Payload ID: 468
  Gene Symbol: ATF7IP
  Gene Name: activating transcription factor 7 interacting protein
  ENST ID: ENST00000545769
  CDS Start-End: 63-568
atttagttctcatggcaacctttgtgacaggtgttggtattagtccctttttaagattcagaatggacagtttagaagaacctcagaaaaaagtctttaaggctcgaaaaacgatgagagtgagtgatcgtcagcaacttgaagcagtgtacaaggtcaaagaagaactgttgaaaactgatgtcaagctgttaaatggcaaccatgaaaatggagatttggacccaacctcacctttggaaaacatggattacattaaagacaaggaagaggtgaatggcattgaagagatttgttttgatcctgaaggaagtaaagcagaatggaaggaaacaccctgtatcctaagtgttaatgtaaaaaacaagcaggatgatgatttaaattgtgaacctttgtctccccataatataactccagaaccagtctctaaactgcctgctgaaccagtttctggtgatccagcccctggtgatctggatgccggagatccagcctccggagtactggcctctggtgattccacctctggtgatcccacctctagcgagccctcctctagtgatgc

SEQ ID NO: 104144 - DNA, 3396 bp, Homo sapiens
  Payload ID: 469
  Gene Symbol: ATF7IP2
  Gene Name: activating transcription factor 7 interacting protein 2
  Uniprot ID: Q5U623
  ENST ID: ENST00000324570
  CDS Start-End: 27-1658
atgtcttaaattccaggatatgaaagatggcaagtccagatagaagtaaacggaagatattaaaagccaaaaagacaatgcccctaagttgccggaagcaagtagagatgctgaataagtcaaggaatgttgaagcgctgaaaacagcaattgggagtaatgttccaagcggtaatcagagtttcagtcctagtgtcataactaggacgactgaaataaccaaatgtagcccttctgaaaatggtgcatcctcattggactctaataaaaattcaatatcagagaaaagtaaagtattctctcagaattgcataaaaccagtagaagaaattgttcattcagaaacaaaattggaacaagttgtttgttcgtaccaaaagccaagtagaacaacagaatcccccagcagagtcttcacagaagaggcaaaagattcactgaacacttctgaaaacgattctgagcatcagacaaatgtaacaagatccctttttgagcatgagggggcttgtagtctaaagtccagttgctgtccacccagtgtattgagtggtgttgttcagatgccagagtctacagtaaccagtaccgtgggtgacaagaaaactgaccagatggttttccatttagaaacaaactccaattcagaatcacatgataaaaggcaaagtgacaacattttatgttcagaagactcaggttttgtgcctgttgagaaaacacctaatttggtgaattcagtcacttctaacaactgtgctgatgacattttgaaaactgatgagtgtagtagaaccagtatttcaaattgtgaaagtgcagactcaacatggcagtcatcacttgacactaataacaacagccattatcaaaagaagaggatgttttcagaaaacgaggaaaatgttaaacgcatgaaaacttcagagcaaattaatgaaaatatttgtgtaagtttggaaaggcaaacagcattcctggaacaggtcagacatttgattcagcaggagatctatagcataaattatgaactatttgataagaaactgaaagaattgaaccaacgcattgggaagacagagtgcagaaataagcatgaaggaatagctgataaacttttggcaaaaatagcaaaacttcaaagacgtattaaaacagtattattatttcaaaggaattgtttgaaaccaaacatgttatccagtaatggagcctctaaggttgcaaattcagaggctatgattttggataagaatcttgagtcagttaatagtccaattgaaaagtcttctgtgaattatgagccttctaacccttccgaaaaaggaagtaaaaaaattaatttgtcatcagatcaaaataagtctgtttctgaaagtaacaatgatgatgttatgttgatttctgtggaaagtcctaatttgacaactccaattacatcaaatccaacagataccagaaaaattacatcaggaaattctagcaattctcccaatgctgaagttatgaaagtccagtatcccccctggagtcacattcgaaagctgcttcaaactcaaaggaaacaaccccattggcacaaaatgcagtccaggttcctgagtcctttgagcacctgccacctctcccagaaccaccagcaccactacctgaattagtagacaaaacccgagacacacttcctccccagaagcctgagctcaaagtgaaacgggttttcagacccaatggcattgccctgacttggaatataaccaaaatcaatcccaagtgtgctcctgtagaaagctaccacctcttcctgtgtcatgagaactctaataataagttgatttggaagaagattggagaaattaaagctttaccactccccatggcctgtactttatctcagtttttagcttccaacagatactattttactgtccaatcaaaagatatttttggacgatatggaccattctgtgatataaaatctatccctgggttttctgaaaatcttacgtaaaaggtgtttaataatgatatactactttttttttcatatttgtttgtttgcaatgttactgtaatactatttgccattgtaaaaggccagctcagattgtgagccctttctattgggacagtcctcttctatatgttttaagtggccagtaatttaatgaatttctggtttgtattaaatatgtccttccaatggataagttctaaaacatacgctatcattggcccatgttgctgaggtgcattgtgaacaatacctttagtgactgtggaactgctgcttctatcagaagacctaggatacaagcagccactgtttcctccgttaacaatcagcttttagtaacctgctgtggtcagcatagctacaggaaaagtcagcccttgactgagggccagatcatccctggagtgcacctctactaagattttatgaaaagatgacatgttgggctgcatgataaaagttaattataaaaattaaaagatttttttttttgagatggaatattgctctgttgcccaggctggagtacagtggtcactgcaacctccatctccctggttcaagcaattctcctatgtcagcctcccaagtagctgggactatagtcacttgccaccatgcccggctaatttatttttagtagagatgaggtttcaccttgttggtcaggctggtctcaaactcctgacctcaggggatccacccgcctcggcctcccgaagtgctgggattataggcgtaagccaccatgcctggccaaaaattaaaagattttatgaaacgaaatggcttcccattctttctattcagcttctaagtgggctattcatttgtgctctcctcttttttgttttgttttgcactttgtcaatcatttggggaaatagcctggaggtctttcctgaatctgtttgtagacataataaaatttgtgtgctgtgtacacaaaaacataatgtatcttatgaaagcattacccaacctgtttgagttgagaatgcatttgtccacctttgatttgaggctttagtttgctgatttcctaaatgctaccctttgatcatttcctggccaccatcacaatactaaggggctcagatgtgtcttgtgcccacctcttcctgagaagagatggaagtggagctgtgactagtacaagcagcccaagaaactctgaacggggcccaatggaggcaaacttgagcaaataattgggatgataagaaacaaaaataatcccaactgtttgaaagttcgaaagaggggcattcttttctggtacatggtgagagttcaggctccagagactcaaaacggaatggttttccttggcattttgtaaatgctctcacatctgtagcaataaagctgttattttctgc

SEQ ID NO: 104145 - DNA, 3463 bp, Homo sapiens
  Payload ID: 469
  Gene Symbol: ATF7IP2
  Gene Name: activating transcription factor 7 interacting protein 2
  Uniprot ID: Q5U623
  ENST ID: ENST00000356427
  CDS Start-End: 27-2075
atgtcttaaattccaggatatgaaagatggcaagtccagatagaagtaaacggaagatattaaaagccaaaaagacaatgcccctaagttgccggaagcaagtagagatgctgaataagtcaaggaatgttgaagcgctgaaaacagcaattgggagtaatgttccaagcggtaatcagagtttcagtcctagtgtcataactaggacgactgaaataaccaaatgtagcccttctgaaaatggtgcatcctcattggactctaataaaaattcaatatcagagaaaagtaaagtattctctcagaattgcataaaaccagtagaagaaattgttcattcagaaacaaaattggaacaagttgtttgttcgtaccaaaagccaagtagaacaacagaatcccccagcagagtcttcacagaagaggcaaaagattcactgaacacttctgaaaacgattctgagcatcagacaaatgtaacaagatccctttttgagcatgagggggcttgtagtctaaagtccagttgctgtccacccagtgtattgagtggtgttgttcagatgccagagtctacagtaaccagtaccgtgggtgacaagaaaactgaccagatggttttccatttagaaacaaactccaattcagaatcacatgataaaaggcaaagtgacaacattttatgttcagaagactcaggttttgtgcctgttgagaaaacacctaatttggtgaattcagtcacttctaacaactgtgctgatgacattttgaaaactgatgagtgtagtagaaccagtatttcaaattgtgaaagtgcagactcaacatggcagtcatcacttgacactaataacaacagccattatcaaaagaagaggatgttttcagaaaacgaggaaaatgttaaacgcatgaaaacttcagagcaaattaatgaaaatatttgtgtaagtttggaaaggcaaacagcattcctggaacaggtcagacatttgattcagcaggagatctatagcataaattatgaactatttgataagaaactgaaagaattgaaccaacgcattgggaagacagagtgcagaaataagcatgaaggaatagctgataaacttttggcaaaaatagcaaaacttcaaagacgtattaaaacagtattattatttcaaaggaattgtttgaaaccaaacatgttatccagtaatggagcctctaaggttgcaaattcagaggctatgattttggataagaatcttgagtcagttaatagtccaattgaaaagtcttctgtgaattatgagccttctaacccttccgaaaaaggaagtaaaaaaattaatttgtcatcagatcaaaataagtctgtttctgaaagtaacaatgatgatgttatgttgatttctgtggaaagtcctaatttgacaactccaattacatcaaatccaacagataccagaaaaattacatcaggaaattctagcaattctcccaatgctgaagttatggctgtacagaagaaacttgattctataattgatttgacaaaagaaggcctatccaactgcaatacagaaagtccagtatcccccctggagtcacattcgaaagctgcttcaaactcaaaggaaacaaccccattggcacaaaatgcagtccaggttcctgagtcctttgagcacctgccacctctcccagaaccaccagcaccactacctgaattagtagacaaaacccgagacacacttcctccccagaagcctgagctcaaagtgaaacgggttttcagacccaatggcattgccctgacttggaatataaccaaaatcaatcccaagtgtgctcctgtagaaagctaccacctcttcctgtgtcatgagaactctaataataagttgatttggaagaagattggagaaattaaagctttaccactccccatggcctgtactttatctcagtttttagcttccaacagatactattttactgtccaatcaaaagatatttttggacgatatggaccattctgtgatataaaatctatccctgggttttctgaaaatcttacgtaaaaggtgtttaataatgatatactactttttttttcatatttgtttgtttgcaatgttactgtaatactatttgccattgtaaaaggccagctcagattgtgagccctttctattgggacagtcctcttctatatgttttaagtggccagtaatttaatgaatttctggtttgtattaaatatgtccttccaatggataagttctaaaacatacgctatcattggcccatgttgctgaggtgcattgtgaacaatacctttagtgactgtggaactgctgcttctatcagaagacctaggatacaagcagccactgtttcctccgttaacaatcagcttttagtaacctgctgtggtcagcatagctacaggaaaagtcagcccttgactgagggccagatcatccctggagtgcacctctactaagattttatgaaaagatgacatgttgggctgcatgataaaagttaattataaaaattaaaagatttttttttttgagatggaatattgctctgttgcccaggctggagtacagtggtcactgcaacctccatctccctggttcaagcaattctcctatgtcagcctcccaagtagctgggactatagtcacttgccaccatgcccggctaatttatttttagtagagatgaggtttcaccttgttggtcaggctggtctcaaactcctgacctcaggggatccacccgcctcggcctcccgaagtgctgggattataggcgtaagccaccatgcctggccaaaaattaaaagattttatgaaacgaaatggcttcccattctttctattcagcttctaagtgggctattcatttgtgctctcctcttttttgttttgttttgcactttgtcaatcatttggggaaatagcctggaggtctttcctgaatctgtttgtagacataataaaatttgtgtgctgtgtacacaaaaacataatgtatcttatgaaagcattacccaacctgtttgagttgagaatgcatttgtccacctttgatttgaggctttagtttgctgatttcctaaatgctaccctttgatcatttcctggccaccatcacaatactaaggggctcagatgtgtcttgtgcccacctcttcctgagaagagatggaagtggagctgtgactagtacaagcagcccaagaaactctgaacggggcccaatggaggcaaacttgagcaaataattgggatgataagaaacaaaaataatcccaactgtttgaaagttcgaaagaggggcattcttttctggtacatggtgagagttcaggctccagagactcaaaacggaatggttttccttggcattttgtaaatgctctcacatctgtagcaataaagctgttattttctgc

SEQ ID NO: 104146 - DNA, 3641 bp, Homo sapiens
  Payload ID: 469
  Gene Symbol: ATF7IP2
  Gene Name: activating transcription factor 7 interacting protein 2
  Uniprot ID: Q5U623
  ENST ID: ENST00000396559
  CDS Start-End: 271-1902
agcattgttaacggctgcggttcgaagtggctgtgggtattgctgcggctggtgcgtcgtcgctctaggttttcttccgccgtctgtgacagcttcttgatctgtccccaggaatcctgctttttttttttctttgagacacggtctcactctgtcacccttgctggagtgcagtggtgcaatcacagatcacggcagtgtctaattcctgggctcaagtgaaccttttgcatcagcctcctgaatagctgagaccacaggatatgaaagatggcaagtccagatagaagtaaacggaagatattaaaagccaaaaagacaatgcccctaagttgccggaagcaagtagagatgctgaataagtcaaggaatgttgaagcgctgaaaacagcaattgggagtaatgttccaagcggtaatcagagtttcagtcctagtgtcataactaggacgactgaaataaccaaatgtagcccttctgaaaatggtgcatcctcattggactctaataaaaattcaatatcagagaaaagtaaagtattctctcagaattgcataaaaccagtagaagaaattgttcattcagaaacaaaattggaacaagttgtttgttcgtaccaaaagccaagtagaacaacagaatcccccagcagagtcttcacagaagaggcaaaagattcactgaacacttctgaaaacgattctgagcatcagacaaatgtaacaagatccctttttgagcatgagggggcttgtagtctaaagtccagttgctgtccacccagtgtattgagtggtgttgttcagatgccagagtctacagtaaccagtaccgtgggtgacaagaaaactgaccagatggttttccatttagaaacaaactccaattcagaatcacatgataaaaggcaaagtgacaacattttatgttcagaagactcaggttttgtgcctgttgagaaaacacctaatttggtgaattcagtcacttctaacaactgtgctgatgacattttgaaaactgatgagtgtagtagaaccagtatttcaaattgtgaaagtgcagactcaacatggcagtcatcacttgacactaataacaacagccattatcaaaagaagaggatgttttcagaaaacgaggaaaatgttaaacgcatgaaaacttcagagcaaattaatgaaaatatttgtgtaagtttggaaaggcaaacagcattcctggaacaggtcagacatttgattcagcaggagatctatagcataaattatgaactatttgataagaaactgaaagaattgaaccaacgcattgggaagacagagtgcagaaataagcatgaaggaatagctgataaacttttggcaaaaatagcaaaacttcaaagacgtattaaaacagtattattatttcaaaggaattgtttgaaaccaaacatgttatccagtaatggagcctctaaggttgcaaattcagaggctatgattttggataagaatcttgagtcagttaatagtccaattgaaaagtcttctgtgaattatgagccttctaacccttccgaaaaaggaagtaaaaaaattaatttgtcatcagatcaaaataagtctgtttctgaaagtaacaatgatgatgttatgttgatttctgtggaaagtcctaatttgacaactccaattacatcaaatccaacagataccagaaaaattacatcaggaaattctagcaattctcccaatgctgaagttatgaaagtccagtatcccccctggagtcacattcgaaagctgcttcaaactcaaaggaaacaaccccattggcacaaaatgcagtccaggttcctgagtcctttgagcacctgccacctctcccagaaccaccagcaccactacctgaattagtagacaaaacccgagacacacttcctccccagaagcctgagctcaaagtgaaacgggttttcagacccaatggcattgccctgacttggaatataaccaaaatcaatcccaagtgtgctcctgtagaaagctaccacctcttcctgtgtcatgagaactctaataataagttgatttggaagaagattggagaaattaaagctttaccactccccatggcctgtactttatctcagtttttagcttccaacagatactattttactgtccaatcaaaagatatttttggacgatatggaccattctgtgatataaaatctatccctgggttttctgaaaatcttacgtaaaaggtgtttaataatgatatactactttttttttcatatttgtttgtttgcaatgttactgtaatactatttgccattgtaaaaggccagctcagattgtgagccctttctattgggacagtcctcttctatatgttttaagtggccagtaatttaatgaatttctggtttgtattaaatatgtccttccaatggataagttctaaaacatacgctatcattggcccatgttgctgaggtgcattgtgaacaatacctttagtgactgtggaactgctgcttctatcagaagacctaggatacaagcagccactgtttcctccgttaacaatcagcttttagtaacctgctgtggtcagcatagctacaggaaaagtcagcccttgactgagggccagatcatccctggagtgcacctctactaagattttatgaaaagatgacatgttgggctgcatgataaaagttaattataaaaattaaaagatttttttttttgagatggaatattgctctgttgcccaggctggagtacagtggtcactgcaacctccatctccctggttcaagcaattctcctatgtcagcctcccaagtagctgggactatagtcacttgccaccatgcccggctaatttatttttagtagagatgaggtttcaccttgttggtcaggctggtctcaaactcctgacctcaggggatccacccgcctcggcctcccgaagtgctgggattataggcgtaagccaccatgcctggccaaaaattaaaagattttatgaaacgaaatggcttcccattctttctattcagcttctaagtgggctattcatttgtgctctcctcttttttgttttgttttgcactttgtcaatcatttggggaaatagcctggaggtctttcctgaatctgtttgtagacataataaaatttgtgtgctgtgtacacaaaaacataatgtatcttatgaaagcattacccaacctgtttgagttgagaatgcatttgtccacctttgatttgaggctttagtttgctgatttcctaaatgctaccctttgatcatttcctggccaccatcacaatactaaggggctcagatgtgtcttgtgcccacctcttcctgagaagagatggaagtggagctgtgactagtacaagcagcccaagaaactctgaacggggcccaatggaggcaaacttgagcaaataattgggatgataagaaacaaaaataatcccaactgtttgaaagttcgaaagaggggcattcttttctggtacatggtgagagttcaggctccagagactcaaaacggaatggttttccttggcattttgtaaatgctctcacatctgtagcaataaagctgttattttctgca

SEQ ID NO: 104147 - DNA, 3665 bp, Homo sapiens
  Payload ID: 469
  Gene Symbol: ATF7IP2
  Gene Name: activating transcription factor 7 interacting protein 2
  Uniprot ID: Q5U623
  ENST ID: ENST00000396560
  CDS Start-End: 228-2276
agcattgttaacggctgcggttcgaagtggctgtgggtattgctgcggctggtgcgtcgtcgctctaggaatcctgctttttttttttctttgagacacggtctcactctgtcacccttgctggagtgcagtggtgcaatcacagatcacggcagtgtctaattcctgggctcaagtgaaccttttgcatcagcctcctgaatagctgagaccacaggatatgaaagatggcaagtccagatagaagtaaacggaagatattaaaagccaaaaagacaatgcccctaagttgccggaagcaagtagagatgctgaataagtcaaggaatgttgaagcgctgaaaacagcaattgggagtaatgttccaagcggtaatcagagtttcagtcctagtgtcataactaggacgactgaaataaccaaatgtagcccttctgaaaatggtgcatcctcattggactctaataaaaattcaatatcagagaaaagtaaagtattctctcagaattgcataaaaccagtagaagaaattgttcattcagaaacaaaattggaacaagttgtttgttcgtaccaaaagccaagtagaacaacagaatcccccagcagagtcttcacagaagaggcaaaagattcactgaacacttctgaaaacgattctgagcatcagacaaatgtaacaagatccctttttgagcatgagggggcttgtagtctaaagtccagttgctgtccacccagtgtattgagtggtgttgttcagatgccagagtctacagtaaccagtaccgtgggtgacaagaaaactgaccagatggttttccatttagaaacaaactccaattcagaatcacatgataaaaggcaaagtgacaacattttatgttcagaagactcaggttttgtgcctgttgagaaaacacctaatttggtgaattcagtcacttctaacaactgtgctgatgacattttgaaaactgatgagtgtagtagaaccagtatttcaaattgtgaaagtgcagactcaacatggcagtcatcacttgacactaataacaacagccattatcaaaagaagaggatgttttcagaaaacgaggaaaatgttaaacgcatgaaaacttcagagcaaattaatgaaaatatttgtgtaagtttggaaaggcaaacagcattcctggaacaggtcagacatttgattcagcaggagatctatagcataaattatgaactatttgataagaaactgaaagaattgaaccaacgcattgggaagacagagtgcagaaataagcatgaaggaatagctgataaacttttggcaaaaatagcaaaacttcaaagacgtattaaaacagtattattatttcaaaggaattgtttgaaaccaaacatgttatccagtaatggagcctctaaggttgcaaattcagaggctatgattttggataagaatcttgagtcagttaatagtccaattgaaaagtcttctgtgaattatgagccttctaacccttccgaaaaaggaagtaaaaaaattaatttgtcatcagatcaaaataagtctgtttctgaaagtaacaatgatgatgttatgttgatttctgtggaaagtcctaatttgacaactccaattacatcaaatccaacagataccagaaaaattacatcaggaaattctagcaattctcccaatgctgaagttatggctgtacagaagaaacttgattctataattgatttgacaaaagaaggcctatccaactgcaatacagaaagtccagtatcccccctggagtcacattcgaaagctgcttcaaactcaaaggaaacaaccccattggcacaaaatgcagtccaggttcctgagtcctttgagcacctgccacctctcccagaaccaccagcaccactacctgaattagtagacaaaacccgagacacacttcctccccagaagcctgagctcaaagtgaaacgggttttcagacccaatggcattgccctgacttggaatataaccaaaatcaatcccaagtgtgctcctgtagaaagctaccacctcttcctgtgtcatgagaactctaataataagttgatttggaagaagattggagaaattaaagctttaccactccccatggcctgtactttatctcagtttttagcttccaacagatactattttactgtccaatcaaaagatatttttggacgatatggaccattctgtgatataaaatctatccctgggttttctgaaaatcttacgtaaaaggtgtttaataatgatatactactttttttttcatatttgtttgtttgcaatgttactgtaatactatttgccattgtaaaaggccagctcagattgtgagccctttctattgggacagtcctcttctatatgttttaagtggccagtaatttaatgaatttctggtttgtattaaatatgtccttccaatggataagttctaaaacatacgctatcattggcccatgttgctgaggtgcattgtgaacaatacctttagtgactgtggaactgctgcttctatcagaagacctaggatacaagcagccactgtttcctccgttaacaatcagcttttagtaacctgctgtggtcagcatagctacaggaaaagtcagcccttgactgagggccagatcatccctggagtgcacctctactaagattttatgaaaagatgacatgttgggctgcatgataaaagttaattataaaaattaaaagatttttttttttgagatggaatattgctctgttgcccaggctggagtacagtggtcactgcaacctccatctccctggttcaagcaattctcctatgtcagcctcccaagtagctgggactatagtcacttgccaccatgcccggctaatttatttttagtagagatgaggtttcaccttgttggtcaggctggtctcaaactcctgacctcaggggatccacccgcctcggcctcccgaagtgctgggattataggcgtaagccaccatgcctggccaaaaattaaaagattttatgaaacgaaatggcttcccattctttctattcagcttctaagtgggctattcatttgtgctctcctcttttttgttttgttttgcactttgtcaatcatttggggaaatagcctggaggtctttcctgaatctgtttgtagacataataaaatttgtgtgctgtgtacacaaaaacataatgtatcttatgaaagcattacccaacctgtttgagttgagaatgcatttgtccacctttgatttgaggctttagtttgctgatttcctaaatgctaccctttgatcatttcctggccaccatcacaatactaaggggctcagatgtgtcttgtgcccacctcttcctgagaagagatggaagtggagctgtgactagtacaagcagcccaagaaactctgaacggggcccaatggaggcaaacttgagcaaataattgggatgataagaaacaaaaataatcccaactgtttgaaagttcgaaagaggggcattcttttctggtacatggtgagagttcaggctccagagactcaaaacggaatggttttccttggcattttgtaaatgctctcacatctgtagcaataaagctgttattttctgca

SEQ ID NO: 104148 - DNA, 1907 bp, Homo sapiens
  Payload ID: 469
  Gene Symbol: ATF7IP2
  Gene Name: activating transcription factor 7 interacting protein 2
  ENST ID: ENST00000535850
  CDS Start-End: 222-1499
gttaacggctgcggttcgaagtggctgtgggtattgctgcggctggtgcgtcgtcgctctaggaatcctgctttttttttttctttgagacacggtctcactctgtcacccttgctggagtgcagtggtgcaatcacagatcacggcagtgtctaattcctgggctcaagtgaaccttttgcatcagcctcctgaatagctgagaccacaggatatgaaagatggcaagtccagatagaagtaaacggaagatattaaaagccaaaaagacaatgcccctaagttgccggaagcaagtagagatgctgaataagtcaaggaatgttgaagcgctgaaaacagcaattgggagtaatgttccaagcggtaatcagagtttcagtcctagtgtcataactaggacgactgaaataaccaaatgtagcccttctgaaaatggtgcatcctcattggactctaataaaaattcaatatcagagaaaagtaaagtattctctcagaattgcataaaaccagtagaagaaattgttcattcagaaacaaaattggaacaagttgtttgttcgtaccaaaagccaagtagaacaacagaatcccccagcagagtcttcacagaagaggcaaaagattcactgaacacttctgaaaacgattctgagcatcagacaaatgtaacaagatccctttttgagcatgagggggcttgtagtctaaagtccagttgctgtccacccagtgtattgagtggtgttgttcagatgccagagtctacagtaaccagtaccgtgggtgacaagaaaactgaccagatggttttccatttagaaacaaactccaattcagaatcacatgataaaaggcaaagtgacaacattttatgttcagaagactcaggttttgtgcctgttgagaaaacacctaatttggtgaattcagtcacttctaacaactgtgctgatgacattttgaaaactgatgagtgtagtagaaccagtatttcaaattgtgaaagtgcagactcaacatggcagtcatcacttgacactaataacaacagccattatcaaaagaagaggatgttttcagaaaacgaggaaaatgttaaacgcatgaaaacttcagagcaaattaatgaaaatatttgtgtaagtttggaaaggcaaacagcattcctggaacaggtcagacatttgattcagcaggagatctatagcataaattatgaactatttgataagaaactgaaagaattgaaccaacgcattgggaagacagagtgcagaaataagcatgaaggaatagctgataaacttttggcaaaaatagcaaaacttcaaagacgtattaaaacagtattattatttcaaaggaattgtttgaaaccaaacatgttatccagtaatggagcctctaagataccagaaaaattacatcaggaaattctagcaattctcccaatgctgaagttatggctgtacagaagaaacttgattctataattgatttgacaaaagaaggcctatccaactgcaatacagaaagtccagtatcccccctggagtcacattcgaaagctgcttcaaactcaaaggaaacaaccccattggcacaaaatgcagtccaggttcctgagtcctttgagcacctgccacctctcccagaaccaccagcaccactacctgaattagtagacaaaacccgagacacacttcctccccagaagcctgagctcaaagtgaaacgggttttcagacccaatggcattgccctgacttggaatataaccaaaatcaatcccaagtgtgctcctgtagaaagctaccacctcttcctgtgtcatgagaactctaataataagttgatttggaagaagattggagaaattaaagctttaccactccccatgg

SEQ ID NO: 104149 - DNA, 998 bp, Homo sapiens
  Payload ID: 469
  Gene Symbol: ATF7IP2
  Gene Name: activating transcription factor 7 interacting protein 2
  ENST ID: ENST00000543967
  CDS Start-End: 81-761
ttgttaacggctgcggttcgaagtggctgtgggtattgctgcggctggtgcgtcgtcgctctagtaacaatgatgatgttatgttgatttctgtggaaagtcctaatttgacaactccaattacatcaaatccaacagataccagaaaaattacatcaggaaattctagcaattctcccaatgctgaagttatggctgtacagaagaaacttgattctataattgatttgacaaaagaaggcctatccaactgcaatacagaaagtccagtatcccccctggagtcacattcgaaagctgcttcaaactcaaaggaaacaaccccattggcacaaaatgcagtccaggttcctgagtcctttgagcacctgccacctctcccagaaccaccagcaccactacctgaattagtagacaaaacccgagacacacttcctccccagaagcctgagctcaaagtgaaacgggttttcagacccaatggcattgccctgacttggaatataaccaaaatcaatcccaagtgtgctcctgtagaaagctaccacctcttcctgtgtcatgagaactctaataataagttgatttggaagaagattggagaaattaaagctttaccactccccatggcctgtactttatctcagtttttagcttccaacagatactattttactgtccaatcaaaagatatttttggacgatatggaccattctgtgatataaaatctatccctgggttttctgaaaatcttacgtaaaaggtgtttaataatgatatactactttttttttcatatttgtttgtttgcaatgttactgtaatactatttgccattgtaaaaggccagctcagattgtgagccctttctattgggacagtcctcttctatatgttttaagtggccagtaatttaatgaatttctggtttgtattaaatatgtccttccaatggataagttctaaaacatacgctatcattggcccatgttgctga

SEQ ID NO: 104150 - DNA, 564 bp, Homo sapiens
  Payload ID: 469
  Gene Symbol: ATF7IP2
  Gene Name: activating transcription factor 7 interacting protein 2
  ENST ID: ENST00000569939
  CDS Start-End: 486-564
gttaacggctgcggttcgaagtggctgtgggtattgctgcggctggtgcgtcgtcgctctagccagtaaatgacctgcgacataactatttgcaaaacaaatggggaagaccaagataaagataagttatatcacaggaaagcaattgaaaatgcaaaaatgaagcatctgaatgaaggactaataacactgaattcagcttttgtgaatcttatctgcagatatgtacagaccacatcctaagattgacttctgcctcaacagaaatacatgagccagtgccttattggaaatgatttgcgtgttttaagaactggtgtatataggaatcctgctttttttttttctttgagacacggtctcactctgtcacccttgctggagtgcagtggtgcaatcacagatcacggcagtgtctaattcctgggctcaagtgaaccttttgcatcagcctcctgaatagctgagaccacaggatatgaaagatggcaagtccagatagaagtaaacggaagatattaaaagccaaaaagacaatgcccctaagttgccggaagcaagtag

SEQ ID NO: 104151 - DNA, 3406 bp, Homo sapiens
  Payload ID: 469
  Gene Symbol: ATF7IP2
  Gene Name: activating transcription factor 7 interacting protein 2
  ENST ID: ENST00000568027
  CDS Start-End: 127-1323
tctcactctgtcacccttgctggagtgcagtggtgcaatcacagatcacggcagtgtctaattcctgggctcaagtgaaccttttgcatcagcctcctgaatagctgagaccacaggatatgaaagatggcaagtccagatagaagtaaacggaagatattaaaagccaaaaagacaatgcccctaagttgccggaagcaagtagagatgctgaataagtcaaggaatgttgaagcgctgaaaacagcaattgggagtaatgttccaagcggtaatcagagtttcagtcctagtgtcataactaggacgactgaaataaccaaatgtagcccttctgaaaatggtgcatcctcattggactctaataaaaattcaatatcagagaaaagtaaagtattctctcagaattgcataaaaccagtagaagaaattgttcattcagaaacaaaattggaacaagttgtttgttcgtaccaaaagccaagtagaacaacagaatcccccagcagagtcttcacagaagaggcaaaagattcactgaacacttctgaaaacgattctgagcatcagacaaatgtaacaagatccctttttgagcatgagggggcttgtagtctaaagtccagttgctgtccacccagtgtattgagtggtgttgttcagatgccagagtctacagtaaccagtaccgtgggtgacaagaaaactgaccagatggttttccatttagaaacaaactccaattcagaatcacatgataaaaggcaaagtgacaacattttatgttcagaagactcaggttttgtgcctgttgagaaaacacctaatttggtgaattcagtcacttctaacaactgtgctgatgacattttgaaaactgatgagtgtagtagaaccagtatttcaaattgtgaaagtgcagactcaacatggcagtcatcacttgacactaataacaacagccattatcaaaagaagaggatgttttcagaaaacgaggaaaatgttaaacgcatgaaaacttcagagcaaattaatgaaaatatttgtgtaagtttggaaaggcaaacagcattcctggaacaggtcagacatttgattcagcaggagatctatagcataaattatgaactatttgataagaaactgaaagaattgaaccaacgcattgggaagacagagtgcagaaataagcatgaaggaatagctgataaacttttggcaaaaatagcaaaacttcaaagacgtattaaaacagtattattatttcaaaggaattgtttgaaaccaaacatgttatccagtaatggagcctctaagtaacaatgatgatgttatgttgatttctgtggaaagtcctaatttgacaactccaattacatcaaatccaacagataccagaaaaattacatcaggaaattctagcaattctcccaatgctgaagttatggctgtacagaagaaacttgattctataattgatttgacaaaagaaggcctatccaactgcaatacagaaagtccagtatcccccctggagtcacattcgaaagctgcttcaaactcaaaggaaacaaccccattggcacaaaatgcagtccaggttcctgagtcctttgagcacctgccacctctcccagaaccaccagcaccactacctgaattagtagacaaaacccgagacacacttcctccccagaagcctgagctcaaagtgaaacgggttttcagacccaatggcattgccctgacttggaatataaccaaaatcaatcccaagtgtgctcctgtagaaagctaccacctcttcctgtgtcatgagaactctaataataagttgatttggaagaagattggagaaattaaagctttaccactccccatggcctgtactttatctcagtttttagcttccaacagatactattttactgtccaatcaaaagatatttttggacgatatggaccattctgtgatataaaatctatccctgggttttctgaaaatcttacgtaaaaggtgtttaataatgatatactactttttttttcatatttgtttgtttgcaatgttactgtaatactatttgccattgtaaaaggccagctcagattgtgagccctttctattgggacagtcctcttctatatgttttaagtggccagtaatttaatgaatttctggtttgtattaaatatgtccttccaatggataagttctaaaacatacgctatcattggcccatgttgctgaggtgcattgtgaacaatacctttagtgactgtggaactgctgcttctatcagaagacctaggatacaagcagccactgtttcctccgttaacaatcagcttttagtaacctgctgtggtcagcatagctacaggaaaagtcagcccttgactgagggccagatcatccctggagtgcacctctactaagattttatgaaaagatgacatgttgggctgcatgataaaagttaattataaaaattaaaagatttttttttttgagatggaatattgctctgttgcccaggctggagtacagtggtcactgcaacctccatctccctggttcaagcaattctcctatgtcagcctcccaagtagctgggactatagtcacttgccaccatgcccggctaatttatttttagtagagatgaggtttcaccttgttggtcaggctggtctcaaactcctgacctcaggggatccacccgcctcggcctcccgaagtgctgggattataggcgtaagccaccatgcctggccaaaaattaaaagattttatgaaacgaaatggcttcccattctttctattcagcttctaagtgggctattcatttgtgctctcctcttttttgttttgttttgcactttgtcaatcatttggggaaatagcctggaggtctttcctgaatctgtttgtagacataataaaatttgtgtgctgtgtacacaaaaacataatgtatcttatgaaagcattacccaacctgtttgagttgagaatgcatttgtccacctttgatttgaggctttagtttgctgatttcctaaatgctaccctttgatcatttcctggccaccatcacaatactaaggggctcagatgtgtcttgtgcccacctcttcctgagaagagatggaagtggagctgtgactagtacaagcagcccaagaaactctgaacggggcccaatggaggcaaacttgagcaaataattgggatgataagaaacaaaaataatcccaactgtttgaaagttcgaaagaggggcattcttttctggtacatggtgagagttcaggctccagagactcaaaacggaatggttttccttggcattttgtaaatgctctcacatctgtagcaataaagctgttattttctgca

SEQ ID NO: 104152 - DNA, 559 bp, Homo sapiens
  Payload ID: 469
  Gene Symbol: ATF7IP2
  Gene Name: activating transcription factor 7 interacting protein 2
  ENST ID: ENST00000569900
  CDS Start-End: 337-559
gttaacggctgcggttcgaagtggctgtgggtattgctgcggctggtgcgtcgtcgctctagccagtaaatgacctgcgacataactatttgcaaaacaaatggggaagaccaagataaagataagttatatcacaggaaagcaattgaaaatgcaaaaatgaagcatctgaatgaaggactaataacactgaattcagcttttgtgaatcttatctgcagatatgtacagaccacatcctaagattgacttctgcctcaacagaaatacatgagccagtgccttattggaaatgatttgcgtgttttaagaactggtgtatataggatatgaaagatggcaagtccagatagaagtaaacggaagatattaaaagccaaaaagacaatgcccctaagttgccggaagcaagtagagatgctgaataagtcaaggaatgttgaagcgctgaaaacagcaattgggagtaatgttccaagcggtaatcagagtttcagtcctagtgtcataactaggacgactgaaataaccaaatgtagcccttctgaaaatggtgcat

SEQ ID NO: 104153 - DNA, 558 bp, Homo sapiens
  Payload ID: 469
  Gene Symbol: ATF7IP2
  Gene Name: activating transcription factor 7 interacting protein 2
  ENST ID: ENST00000562102
  CDS Start-End: 307-558
attgttaacggctgcggttcgaagtggctgtgggtattgctgcggctggtgcgtcgtcgctctaggtaaatcagggatttcttcttggtttggatccactgctggttttcttccgccgtctgtgacagcttcttgatctgtccccaggaatcctgctttttttttttctttgagacacggtctcactctgtcacccttgctggagtgcagtggtgcaatcacagatcacggcagtgtctaattcctgggctcaagtgaaccttttgcatcagcctcctgaatagctgagaccacaggatatgaaagatggcaagtccagatagaagtaaacggaagatattaaaagccaaaaagacaatgcccctaagttgccggaagcaagtagagatgctgaataagtcaaggaatgttgaagcgctgaaaacagcaattgggagtaatgttccaagcggtaatcagagtttcagtcctagtgtcataactaggacgactgaaataaccaaatgtagcccttctgaaaatggtgcatcctcattggactctaataaaaattcaata

SEQ ID NO: 104154 - DNA, 625 bp, Homo sapiens
  Payload ID: 469
  Gene Symbol: ATF7IP2
  Gene Name: activating transcription factor 7 interacting protein 2
  ENST ID: ENST00000562527
  CDS Start-End: 574-625
agcattgttaacggctgcggttcgaagtggctgtgggtattgctgcggctggtgcgtcgtcgctctagccagtaaatgacctgcgacataactatttgcaaaacaaatggggaagaccaagataaagataagttatatcacaggaaagcaattgaaaatgcaaaaatgaagcatctgaatgaaggactaataacactgaattcagcttttgtgaatcttatctgcagatatgtacagaccacatcctaagattgacttctgcctcaacagaaatacatgagccagtgccttattggaaatgatttgcgtgttttaagaactggtgtatataggtaaatcagggatttcttcttggtttggatccactgctggttttcttccgccgtctgtgacagcttcttgatctgtccccaggaatcctgctttttttttttctttgagacacggtctcactctgtcacccttgctggagtgcagtggtgcaatcacagatcacggcagtgtctaattcctgggctcaagtgaaccttttgcatcagcctcctgaatagctgagaccacaggatatgaaagatggcaagtccagatagaagtaaacggaagatattaaaagccaaaaagacaa

SEQ ID NO: 104155 - DNA, 2819 bp, Homo sapiens
  Payload ID: 470
  Gene Symbol: AICDA
  Gene Name: activation-induced cytidine deaminase
  Uniprot ID: Q9GZX7
  ENST ID: ENST00000229335
  CDS Start-End: 105-701
ggccaatgcactgtcagactaagacagagaaccatcattaattgaagtgagatttttctggcctgagacttgcagggaggcaagaagacactctggacaccactatggacagcctcttgatgaaccggaggaagtttctttaccaattcaaaaatgtccgctgggctaagggtcggcgtgagacctacctgtgctacgtagtgaagaggcgtgacagtgctacatccttttcactggactttggttatcttcgcaataagaacggctgccacgtggaattgctcttcctccgctacatctcggactgggacctagaccctggccgctgctaccgcgtcacctggttcacctcctggagcccctgctacgactgtgcccgacatgtggccgactttctgcgagggaaccccaacctcagtctgaggatcttcaccgcgcgcctctacttctgtgaggaccgcaaggctgagcccgaggggctgcggcggctgcaccgcgccggggtgcaaatagccatcatgaccttcaaagattatttttactgctggaatacttttgtagaaaaccacgaaagaactttcaaagcctgggaagggctgcatgaaaattcagttcgtctctccagacagcttcggcgcatccttttgcccctgtatgaggttgatgacttacgagacgcatttcgtactttgggactttgatagcaacttccaggaatgtcacacacgatgaaatatctctgctgaagacagtggataaaaaacagtccttcaagtcttctctgtttttattcttcaactctcactttcttagagtttacagaaaaaatatttatatacgactctttaaaaagatctatgtcttgaaaatagagaaggaacacaggtctggccagggacgtgctgcaattggtgcagttttgaatgcaacattgtcccctactgggaataacagaactgcaggacctgggagcatcctaaagtgtcaacgtttttctatgacttttaggtaggatgagagcagaaggtagatcctaaaaagcatggtgagaggatcaaatgtttttatatcaacatcctttattatttgattcatttgagttaacagtggtgttagtgatagatttttctattcttttcccttgacgtttactttcaagtaacacaaactcttccatcaggccatgatctataggacctcctaatgagagtatctgggtgattgtgaccccaaaccatctctccaaagcattaatatccaatcatgcgctgtatgttttaatcagcagaagcatgtttttatgtttgtacaaaagaagattgttatgggtggggatggaggtatagaccatgcatggtcaccttcaagctactttaataaaggatcttaaaatgggcaggaggactgtgaacaagacaccctaataatgggttgatgtctgaagtagcaaatcttctggaaacgcaaactcttttaaggaagtccctaatttagaaacacccacaaacttcacatatcataattagcaaacaattggaaggaagttgcttgaatgttggggagaggaaaatctattggctctcgtgggtctcttcatctcagaaatgccaatcaggtcaaggtttgctacattttgtatgtgtgtgatgcttctcccaaaggtatattaactatataagagagttgtgacaaaacagaatgataaagctgcgaaccgtggcacacgctcatagttctagctgcttgggaggttgaggagggaggatggcttgaacacaggtgttcaaggccagcctgggcaacataacaagatcctgtctctcaaaaaaaaaaaaaaaaaaaagaaagagagagggccgggcgtggtggctcacgcctgtaatcccagcactttgggaggccgagccgggcggatcacctgtggtcaggagtttgagaccagcctggccaacatggcaaaaccccgtctgtactcaaaatgcaaaaattagccaggcgtggtagcaggcacctgtaatcccagctacttgggaggctgaggcaggagaatcgcttgaacccaggaggtggaggttgcagtaagctgagatcgtgccgttgcactccagcctgggcgacaagagcaagactctgtctcagaaaaaaaaaaaaaaaagagagagagagagaaagagaacaatatttgggagagaaggatggggaagcattgcaaggaaattgtgctttatccaacaaaatgtaaggagccaataagggatccctatttgtctcttttggtgtctatttgtccctaacaactgtctttgacagtgagaaaaatattcagaataaccatatccctgtgccgttattacctagcaacccttgcaatgaagatgagcagatccacaggaaaacttgaatgcacaactgtcttattttaatcttattgtacataagtttgtaaaagagttaaaaattgttacttcatgtattcatttatattttatattattttgcgtctaatgattttttattaacatgatttccttttctgatatattgaaatggagtctcaaagcttcataaatttataactttagaaatgattctaataacaacgtatgtaattgtaacattgcagtaatggtgctacgaagccatttctcttgatttttagtaaacttttatgacagcaaatttgcttctggctcactttcaatcagttaaataaatgataaataattttggaagctgtgaagataaaataccaaataaaataatataaaagtgatttatatgaagttaaaataaaaaatcagtatgatggaataaacttg

SEQ ID NO: 104156 - DNA, 1075 bp, Homo sapiens
  Payload ID: 470
  Gene Symbol: AICDA
  Gene Name: activation-induced cytidine deaminase
  ENST ID: ENST00000543081
  CDS Start-End: 1-434
acagcctcttgatgaaccggaggaagtttctttaccaattcaaaaatgtccgctgggctaagggtcggcgtgagacctacctgtgctacgtagtgaagaggcgtgacagtgctacatccttttcactggactttggttatcttcgcaataagaacggctgccacgtggaattgctcttcctccgctacatctcggactgggacctagaccctggccgctgctaccgcgtcacctggttcacctcctggagcccctgctacgactgtgcccgacatgtggccgactttctgcgagggaaccccaacctcagtctgaggatcttcaccgcgcgcctctacttctgtgaggaccgcaaggctgagcccgaggggctgcggcggctgcaccgcgccggggtgcaaatagccatcatgaccttcaaagcccctgtatgaggttgatgacttacgagacgcatttcgtactttgggactttgatagcaacttccaggaatgtcacacacgatgaaatatctctgctgaagacagtggataaaaaacagtccttcaagtcttctctgtttttattcttcaactctcactttcttagagtttacagaaaaaatatttatatacgactctttaaaaagatctatgtcttgaaaatagagaaggaacacaggtctggccagggacgtgctgcaattggtgcagttttgaatgcaacattgtcccctactgggaataacagaactgcaggacctgggagcatcctaaagtgtcaacgtttttctatgacttttaggtaggatgagagcagaaggtagatcctaaaaagcatggtgagaggatcaaatgtttttatatcaacatcctttattatttgattcatttgagttaacagtggtgttagtgatagatttttctattcttttcccttgacgtttactttcaagtaacacaaactcttccatcaggccatgatctataggacctcctaatgagagtatctgggtgattgtgaccccaaaccatctctccaaagcattaatatccaatcatgcgctgtatgttttaatcagcagaagcatgtttt

SEQ ID NO: 104157 - DNA, 206 bp, Homo sapiens
  Payload ID: 470
  Gene Symbol: AICDA
  Gene Name: activation-induced cytidine deaminase
  ENST ID: ENST00000544516
  CDS Start-End: 1-206
acagcctcttgatgaaccggaggaagtttctttaccaattcaaaaatgtccgctgggctaagggtcggcgtgagacctacctgtgctacgtagtgaagaggcgtgacagtgctacatccttttcactggactttggttatcttcgcaataagcccctgtatgaggttgatgacttacgagacgcatttcgtactttgggactttga

SEQ ID NO: 104158 - DNA, 592 bp, Homo sapiens
  Payload ID: 470
  Gene Symbol: AICDA
  Gene Name: activation-induced cytidine deaminase
  ENST ID: ENST00000545512
  CDS Start-End: 1-592
acagcctcttgatgaaccggaggaagtttctttaccaattcaaaaatgtccgctgggctaagggtcggcgtgagacctacctgtgctacgtagtgaagaggcgtgacagtgctacatccttttcactggactttggttatcttcgcaataagaacggctgccacgtggaattgctcttcctccgctacatctcggactgggacctagaccctggccgctgctaccgcgtcacctggttcacctcctggagcccctgctacgactgtgcccgacatgtggccgactttctgcgagggaaccccaacctcagtctgaggatcttcaccgcgcgcctctacttctgtgaggaccgcaaggctgagcccgaggggctgcggcggctgcaccgcgccggggtgcaaatagccatcatgaccttcaaagattatttttactgctggaatacttttgtagaaaaccacgaaagaactttcaaagcctgggaagggctgcatgaaaattcagttcgtctctccagacagcttcggcgcatccttttgcccctgtatgaggttgatgacttacgagacgcatttcgtactttgggactttg

SEQ ID NO: 104159 - DNA, 667 bp, Homo sapiens
  Payload ID: 470
  Gene Symbol: AICDA
  Gene Name: activation-induced cytidine deaminase
  Uniprot ID: Q9GZX7
  ENST ID: ENST00000537228
  CDS Start-End: 101-667
aatgcactgtcagactaagacagagaaccatcattaattgaagtgagatttttctggcctgagacttgcagggaggcaagaagacactctggacaccactatggacagcctcttgatgaaccggaggaagtttctttaccaattcaaaaatgtccgctgggctaagggtcggcgtgagacctacctgtgctacgtagtgaagaggcgtgacagtgctacatccttttcactggactttggttatcttcgcaataagaacggctgccacgtggaattgctcttcctccgctacatctcggactgggacctagaccctggccgctgctaccgcgtcacctggttcacctcctggagcccctgctacgactgtgcccgacatgtggccgactttctgcgagggaaccccaacctcagtctgaggatcttcaccgcgcgcctctacttctgtgaggaccgcaaggctgagcccgaggggctgcggcggctgcaccgcgccggggtgcaaatagccatcatgaccttcaaagaaaaccacgaaagaactttcaaagcctgggaagggctgcatgaaaattcagttcgtctctccagacagcttcggcgcatccttttgcccctgtatgaggttgatgacttacgagacgcatttcgtactttgggactttga

SEQ ID NO: 104160 - DNA, 2949 bp, Homo sapiens
  Payload ID: 471
  Gene Symbol: ABT1
  Gene Name: activator of basal transcription 1
  Uniprot ID: Q9ULW3
  ENST ID: ENST00000274849
  CDS Start-End: 32-850
tacggccgtcgtgccgctcgtgtcagtcaacatggaggcagaggaatcggagaaggccgcaacggagcaagagccgctggaagggacagaacagacactagatgcggaggaggagcaggaggaatccgaagaagcggcctgtggcagcaagaaacgggtagtgccaggtattgtgtacctgggccatatcccgccgcgcttccggcccctgcacgtccgcaaccttctcagcgcctatggcgaggtcggacgcgtcttctttcaggctgaggaccggttcgtgagacgcaagaagaaggcagcagcagctgccggaggaaaaaagcggtcctacaccaaggactacaccgagggatgggtggagttccgtgacaagcgcatagccaagcgcgtggcggccagtctacacaacacgcctatgggtgcccgcaggcgcagccccttccgttatgatctttggaacctcaagtacttgcaccgtttcacctggtcccacctcagcgagcacctcgcctttgagcgccaggtgcgcaggcagcgcttgagagcggaggttgctcaagccaagcgtgagaccgacttctatcttcaaagtgtggaacggggacaacgctttcttgcggccgatggggaccctgctcgcccagatggctcctggacatttgcccagcgtcctactgagcaggaactgagggcccgtaaagcagcacggccagggggacgtgaacgggctcgcctggcaactgcccaggacaaggcccgctccaacaaagggctcctggccaggatctttggagccccgccaccctcagagagcatggagggaccttcccttgtcagggactcctgagggcctgggtggccccttccatttcctggccctgctctgcttcctgtctacctcatactagaatgatcgtgactacccgggcagacattttactgtgtttctcagaccaagtgtctactgatggcccaaacatggagttttgtgggcttccactgtccccactccgaactcctgtatgtgcctggctgagtcacctaattcatactgtcatactagcataattatgactattgcatatgcttgttttgtttgactcttggctgcctacgtctgtagggtcccctgaaaatcccacttcctgcccccagaaagggcctttatttccaactaggaggataatgcctagtccaggcaatctttctctgtttagcagtcacaggtgagggtggtattagcatcttttttatgtagaaaaaattgagttaatggggtggactgggttgggaagaaatacatttcctaatgtatttatagaaaataaaaatatttttatgtgcctttttatttttgttggtggggaggtcattggacaagttccaactttcatcttgtgttcccttcaccttcatatcctgatcttagagcccccctccccctgccacccaccttactgtttaacctggatttttttttctatttaatttttgtctaatatcttagcccagtttatcaatcagttatcttaagtcagcattttctaagccattgtttgaggaaacagtgacaataggtaataacacatcttagtattaagagttttacaggccactagtataagataggcatcgtggtagatgcatataaagggtggaatgggagccatggcaggtcatagagtcctctcaatgggaacctgattgatgatcacagtcttcagtggtgagtcagtcctcaccaagttttccagatcattcctacaaagtaaactgggagaataataagtctgaaagagtgtggagtgctcccacaattacaaagaatgcttcctgggtggagtgttgagttggaaccattgtaaaggtgggcaaagcctagtagagaaccagtgcacctcaggtgcacttacatatggtggggctgaggcaaagcagccctgtaggcttcaaagaatcagtgtaagccactaaaaggaactgaaaacctaggtgtcacaataaacagtctacacagtctcacgtagaccaaaattctgatcattttccaggctgttgcatgaagtgatagagtatgattataatttctgtttgcttgtgctgtttgtttttgtttttcatctgtcaatgtgatgatctgtgttttatagggtagagtggatttgtctactttggctgtaaaataccctaatcacattatgatcttgacaggtgcactttactggggagaataaaaaggaccatacggtaaagctggtataacatttctcacaacccacatacctcttatacttggcacacaaactacgtttccatttagaaactttcgtcttgtttctgtttttaattcttgtgggtttgtttcatgtgaattgtttcctcagatcattgatgtcttaaagtgaaacagaaaaatccagaatcagaatttgacaggctggcatattcatttattcagaattccaagtgcccattgctacttctgctagataaagagataccaaggtgaagaagaaactttccctctagttgctaacagcttagaaagtacagtagacatactggggttttatttaagactttcttgaatgaagaaataaattgcattcccacggtggacagcgttagataacagtatgttcaagggctggtatttcagggtccatctccaaaacagttctgtacaaagagctcacacctgcggccaggcaagctaagtaagtcacaggtggagtgaggaatgagaataaatgggtggaagaaaatatcctaggaactttcatcttgactttaagcccattgagtgtaggaaaataattttttacatccacaattttgtttctatttaaacagcacttgtttttttatatgaagtaactcatttaatccacaactatataatattgttatccccccattaaaactgagctcagagagatgactcaa

SEQ ID NO: 104161 - DNA, 2673 bp, Homo sapiens
  Payload ID: 472
  Gene Symbol: ABR
  Gene Name: active BCR-related
  Uniprot ID: Q12979
  ENST ID: ENST00000291107
  CDS Start-End: 33-2501
ttcctgtctgccctccgcgggctccggctgccatggaggaggaagaggaggcgataggcttgctggacaaggttctggaggacgaagatgtgtttctcctggaggagtgcgagctgggaaccccgaccagccccggctcagggtcccccttcctggtggctgtgaaggtggaagcagggaaaggcctggagatgaggaagctggttctctcggggttcttggccagcgaagagatctacattaaccagctggaagccctgttgctgcccatgaaacccctgaaggccaccgccaccacctcccagcccgtgctcaccatccagcagatcgagaccatcttctacaagatccaggacatctatgagatccacaaggagttctatgacaacctgtgccccaaggtgcaacagtgggacagccaggtcaccatgggccacctcttccagaagctggccagccagctcggtgtgtacaaagcgtttgtcgataactataaagtcgctctggagacagctgagaagtgcagccagtccaacaaccagttccagaagatctcagaggaactcaaagtgaaaggtcccaaggactccaaggacagccacacgtctgtcaccatggaagctctgctctacaagcccattgaccgggtcactcggagcaccctagtcctacacgacctgctgaagcacacacctgtggaccaccccgactacccgctgctgcaggatgccctccgcatctcccagaacttcctgtccagcatcaacgaggacatcgacccccgccggactgcagtgacaacgcccaagggggagacgcgacagctggtgaaggacggcttcctggtggaagtgtcagagagctcccggaagctgcggcacgtcttcctctttacagatgtcctactgtgtgccaagctgaagaagacctctgcagggaagcaccagcagtatgactgtaagtggtacatccccctggccgacctggtgtttccatcccccgaggagtctgaggccagcccccaggtgcaccccttcccagaccatgagctggaggacatgaagatgaagatctctgccctcaagagtgaaatccagaaggagaaagccaacaaaggccagagccgggccatcgagcgcctgaagaagaagatgtttgagaatgagttcctgctgctgctcaactcccccacaatcccgttcaggatccacaatcggaatggaaagagttacctgttcctactgtcctcggactacgagaggtcagagtggagagaagcaattcagaaactacagaagaaggatctccaggcctttgtcctgagctcagtggagctccaggtgctcacaggatcctgtttcaagcttaggactgtacacaacattcctgtcaccagcaataaagacgacgatgagtctccaggactctatggcttccttcatgtcatcgtccactctgccaagggatttaagcaatcagccaacctgtactgtaccctggaggtggattccttcggctattttgtcagcaaagccaaaaccagggtgttccgggacacagcggagcccaagtgggatgaggagtttgagatcgagctggagggctcccagtccctgaggatcctgtgctatgagaagtgctatgacaagaccaaggtcaacaaggacaacaatgagatcgtggacaagatcatgggcaaaggacagatccagctggacccacaaaccgtggagaccaagaactggcacacggacgtgattgagatgaacgggatcaaagtggaattttccatgaaattcaccagccgagatatgagcctgaagaggaccccgtccaaaaagcagaccggcgtcttcggtgtgaagatcagcgtggtgacgaagcgggagcgctccaaggtgccctacatcgtccggcagtgtgtggaggaggtggagaagaggggtatcgaggaggttggcatctacaggatatcgggcgtggccacggacatccaggcgctcaaggccgtcttcgatgccaataacaaggacatcctgctgatgctgagtgacatggacatcaacgccatcgccgggacgctcaagctgtacttccgggaactgcccgagccgctcctcacggaccgactctacccagccttcatggagggcatcgccctgtcagaccctgctgccaaggaaaactgcatgatgcacctgctccgctccctgcccgaccccaacctcatcaccttcctcttcctgctggaacacttgaaaagggttgccgagaaggagcccatcaacaaaatgtcacttcacaacctggctaccgtgtttggacccacgttactgagaccctcagaagtggagagcaaagcacacctcacctcggctgcggacatctggtcccatgacgtcatggcgcaggtccaggtcctcctctactacctgcagcacccccccatttccttcgcagaactcaagcggaacacactgtacttctccaccgacgtgtagcccgaggcagggtggctgcgggcgggtggtggaaccagcccctccagcctggggtccaactcagacttgaaagactgcaatagaaaactcccaaacccagcactccagactcgagggaagccagcttccaagaactggaatgcgtacgtcttttgtgccaccttgtacaaag

SEQ ID NO: 104162 - DNA, 5289 bp, Homo sapiens
  Payload ID: 472
  Gene Symbol: ABR
  Gene Name: active BCR-related
  Uniprot ID: Q12979
  ENST ID: ENST00000302538
  CDS Start-End: 148-2727
gccccgcgctcctcccggggacctggttcccggcctcctcgcccctccgcgctcgcaacttcggcctcccccggctcccgcccgctctccctcctttgttgcgcgatgagggtcgggtttcggatctgaccgagccgccgccgcgggatggagccgctcagccaccggggcctgccgcgcctgtcctggatcgacaccctctacagcaacttcagctacgggacggacgagtacgacggagaggggaatgaggagcagaaggggcccccggagggctcagagaccatgccgtacatcgatgagtcgcccaccatgtccccgcagctcagcgcccgcagccagggcgggggggatggcgtctccccgactccacctgagggactggctcctggggtggaagcagggaaaggcctggagatgaggaagctggttctctcggggttcttggccagcgaagagatctacattaaccagctggaagccctgttgctgcccatgaaacccctgaaggccaccgccaccacctcccagcccgtgctcaccatccagcagatcgagaccatcttctacaagatccaggacatctatgagatccacaaggagttctatgacaacctgtgccccaaggtgcaacagtgggacagccaggtcaccatgggccacctcttccagaagctggccagccagctcggtgtgtacaaagcgtttgtcgataactataaagtcgctctggagacagctgagaagtgcagccagtccaacaaccagttccagaagatctcagaggaactcaaagtgaaaggtcccaaggactccaaggacagccacacgtctgtcaccatggaagctctgctctacaagcccattgaccgggtcactcggagcaccctagtcctacacgacctgctgaagcacacacctgtggaccaccccgactacccgctgctgcaggatgccctccgcatctcccagaacttcctgtccagcatcaacgaggacatcgacccccgccggactgcagtgacaacgcccaagggggagacgcgacagctggtgaaggacggcttcctggtggaagtgtcagagagctcccggaagctgcggcacgtcttcctctttacagatgtcctactgtgtgccaagctgaagaagacctctgcagggaagcaccagcagtatgactgtaagtggtacatccccctggccgacctggtgtttccatcccccgaggagtctgaggccagcccccaggtgcaccccttcccagaccatgagctggaggacatgaagatgaagatctctgccctcaagagtgaaatccagaaggagaaagccaacaaaggccagagccgggccatcgagcgcctgaagaagaagatgtttgagaatgagttcctgctgctgctcaactcccccacaatcccgttcaggatccacaatcggaatggaaagagttacctgttcctactgtcctcggactacgagaggtcagagtggagagaagcaattcagaaactacagaagaaggatctccaggcctttgtcctgagctcagtggagctccaggtgctcacaggatcctgtttcaagcttaggactgtacacaacattcctgtcaccagcaataaagacgacgatgagtctccaggactctatggcttccttcatgtcatcgtccactctgccaagggatttaagcaatcagccaacctgtactgtaccctggaggtggattccttcggctattttgtcagcaaagccaaaaccagggtgttccgggacacagcggagcccaagtgggatgaggagtttgagatcgagctggagggctcccagtccctgaggatcctgtgctatgagaagtgctatgacaagaccaaggtcaacaaggacaacaatgagatcgtggacaagatcatgggcaaaggacagatccagctggacccacaaaccgtggagaccaagaactggcacacggacgtgattgagatgaacgggatcaaagtggaattttccatgaaattcaccagccgagatatgagcctgaagaggaccccgtccaaaaagcagaccggcgtcttcggtgtgaagatcagcgtggtgacgaagcgggagcgctccaaggtgccctacatcgtccggcagtgtgtggaggaggtggagaagaggggtatcgaggaggttggcatctacaggatatcgggcgtggccacggacatccaggcgctcaaggccgtcttcgatgccaataacaaggacatcctgctgatgctgagtgacatggacatcaacgccatcgccgggacgctcaagctgtacttccgggaactgcccgagccgctcctcacggaccgactctacccagccttcatggagggcatcgccctgtcagaccctgctgccaaggaaaactgcatgatgcacctgctccgctccctgcccgaccccaacctcatcaccttcctcttcctgctggaacacttgaaaagggttgccgagaaggagcccatcaacaaaatgtcacttcacaacctggctaccgtgtttggacccacgttactgagaccctcagaagtggagagcaaagcacacctcacctcggctgcggacatctggtcccatgacgtcatggcgcaggtccaggtcctcctctactacctgcagcacccccccatttccttcgcagaactcaagcggaacacactgtacttctccaccgacgtgtagcccgaggcagggtggctgcgggcgggtggtggaaccagcccctccagcctggggtccaactcagacttgaaagactgcaatagaaaactcccaaacccagcactccagactcgagggaagccagcttccaagaactggaatgcgtacgtcttttgtgccaccttgtacaaagccggctgcccagccccagcctcaccaccgcatcccacctcctgccctccatacctctagttgtgtctgatgctccgtgctgttcgggaattgttttatgtacacttgtcaggcagaaaaggtagtgaccggcccggcgtgggcacacagacagcccgctttgttctttcatttcctccagcactttctttccgcctgagtccagcccaaggccttttattttgcgctgtgtaactgctgccagcttctctcttggccctgctcccagatggcggtctcctggcagcctcccctcagtcttcctccacccgctcttccttcccagcctgcctgcatgcatgtgcacccttggtcttcgctccatcgccttgaaagctctgaagaggccctgggttgccgcggcagcagtggtctgtttgatgctgccgtttgccgctgccggcccctcctcagactccgcctttgggagcacacctgctttgccttgctgcctgtgcaaatgttggacaagcagacacactcacactcgtccccagcttagcacagagctggagcgcccatttctggaattttccgtttgggaatctccacttctggggtttacctgttcggcctcctgtctatcagtgaggcatctctgactgtttcttctactgcttttcagttcccttccctgctgttctatttcctttgagtgtaaagactcacaggtgacctgctatcgagatagccagagggtcaggagagaatgggggaggaggcggtcaggctgctgaggaaacaccacaggctgaacgggggaggaatgcacatgccacgctgggtgtcccgggtcgcggggaggcagctcagctcttaggagcaagttgtgggggcttttcaagaggggccaggcttcctggagggtgactgatgtggccgaagcaggtgtccaggcaggtaggctgcagccaggagctccctggcaccgcaggacctcgtggtactcttgccttagattttacacacactccacagccaagcactgccacggtcctccaggacctgggaagcaaaggcacaggcccacggtggccagccattgtggtgccgccccagcttctggatacagccttttgggtaaacactgggaactccagaagttgtggggagagtggggaatcagacagccgcctctaggggctgggttctgctggggcctccttgttggtgctgtaggcacccgccagggagcagggacccgacttgcagacgcattgcccggtactaggaaggagtgaggtgtgttcccaccgtacacttcccacacgagctgcggctgccagcctcgggccatcagcctaggagagcagatgcagctccaggggctcgacttatagccagttacagctccccggctcttctgtgtggcagagcgtcgtttccgggccctcagggctggggagctcagttcccattgcttgtgctcagggctgagtcttaaagaagggtttgccggccctaacgctgcagcgcgtgcgcggtgagaggccctttttgagcctgtttactcctgtggccttgggcagaacagtaaatactctgtgcacggaggaaagacatgcccaagaggaaggaagtactgaccatcggctgcctgtgagcagcttagcaaggagcccttgctccctgggaaaggcggtgaacttgagtctaaagatgcagtgcctggcccttcctaaggtccctgcctggcatccgagtgtcggtgtgtggcacagaaggctcctgcttgcttccaaagtgatggacaggaaggggcagagtgagtcacggcccagactgggcaccttcgcgtctcagcctcagggagccccacagccccaagctcgctgaggcaacgtgagaacaggctatgggaaggctgcaaaggctgagaaatgcaaaggctcatatttataaatcccacccccagagtggggagggtcaggtgccagacctggactaaactgcaccaaggaaacacccagcagggtctcctgtgagccggggaccatgcagcccgaaacctccagtcactgcgcccggcaggagtcaggagccagggactgtgcagcctggaacctccagtcactgtgcccagcagggtgggctgtgcccagcaggagtcaggctaagaaacgccaggtctgcctgttcttgctgggcaatggctgatggctgccagtttctgctgatacacaggtaggatgggacccttcatgaatatctgactttaataagttggtaaggatatatttttttgtctatgttctgtttcaacttatgtagattattataaattgatgtaaaccacgtgagaggaaaatgttaataaaaaatgcaaagccccatcatttgcacaaaactcag

SEQ ID NO: 104163 - DNA, 2213 bp, Homo sapiens
  Payload ID: 472
  Gene Symbol: ABR
  Gene Name: active BCR-related
  ENST ID: ENST00000536794
  CDS Start-End: 288-2213
agcctcgtgcccaggcagccagccagctacaaacgtgctcctctttaggatgccagcaggctgctggctccctccctccctacccctcctccccttccccttccctcctctcctcgccacgcgcctccctcccctcccccttgctggaagagcactccggagcggctgcccgatgctggagtccgtgcggcagcatcagcaaggtggctgagtggccgggctgctggtgggcgccggggagcctggagcgatggctgcacgctcccgccgcggggacagaggctgccatggagattctcctcattattcgcttctgctgtaactgcacctatgctctgctctacaagcccattgaccgggtcactcggagcaccctagtcctacacgacctgctgaagcacacacctgtggaccaccccgactacccgctgctgcaggatgccctccgcatctcccagaacttcctgtccagcatcaacgaggacatcgacccccgccggactgcagtgacaacgcccaagggggagacgcgacagctggtgaaggacggcttcctggtggaagtgtcagagagctcccggaagctgcggcacgtcttcctctttacagatgtcctactgtgtgccaagctgaagaagacctctgcagggaagcaccagcagtatgactgtaagtggtacatccccctggccgacctggtgtttccatcccccgaggagtctgaggccagcccccaggtgcaccccttcccagaccatgagctggaggacatgaagatgaagatctctgccctcaagagtgaaatccagaaggagaaagccaacaaaggccagagccgggccatcgagcgcctgaagaagaagatgtttgagaatgagttcctgctgctgctcaactcccccacaatcccgttcaggatccacaatcggaatggaaagagttacctgttcctactgtcctcggactacgagaggtcagagtggagagaagcaattcagaaactacagaagaaggatctccaggcctttgtcctgagctcagtggagctccaggtgctcacaggatcctgtttcaagcttaggactgtacacaacattcctgtcaccagcaataaagacgacgatgagtctccaggactctatggcttccttcatgtcatcgtccactctgccaagggatttaagcaatcagccaacctgtactgtaccctggaggtggattccttcggctattttgtcagcaaagccaaaaccagggtgttccgggacacagcggagcccaagtgggatgaggagtttgagatcgagctggagggctcccagtccctgaggatcctgtgctatgagaagtgctatgacaagaccaaggtcaacaaggacaacaatgagatcgtggacaagatcatgggcaaaggacagatccagctggacccacaaaccgtggagaccaagaactggcacacggacgtgattgagatgaacgggatcaaagtggaattttccatgaaattcaccagccgagatatgagcctgaagaggaccccgtccaaaaagcagaccggcgtcttcggtgtgaagatcagcgtggtgacgaagcgggagcgctccaaggtgccctacatcgtccggcagtgtgtggaggaggtggagaagaggggtatcgaggaggttggcatctacaggatatcgggcgtggccacggacatccaggcgctcaaggccgtcttcgatgccaataacaaggacatcctgctgatgctgagtgacatggacatcaacgccatcgccgggacgctcaagctgtacttccgggaactgcccgagccgctcctcacggaccgactctacccagccttcatggagggcatcgccctgtcagaccctgctgccaaggaaaactgcatgatgcacctgctccgctccctgcccgaccccaacctcatcaccttcctcttcctgctggaacacttgaaaagggttgccgagaaggagcccatcaacaaaatgtcacttcacaacctggctaccgtgtttggacccacgttactgagaccctcagaagtggagagcaaagcacacctcacctcggctgcggacatctggtcccatgacgtcatggcgcaggtccaggtcctcctctactacctgcagcacccccccatttccttcgcagaactcaagcggaacacactgtacttctccaccgacgtgtag

SEQ ID NO: 104164 - DNA, 5595 bp, Homo sapiens
  Payload ID: 472
  Gene Symbol: ABR
  Gene Name: active BCR-related
  Uniprot ID: Q12979
  ENST ID: ENST00000544583
  CDS Start-End: 601-3042
ggactgcagagggaacttgccttgaagaggcctggtccttaaagagacacagcacacacggcccgaccggcagccccagagcagaggctccactgatggcaggcgcccctggctaggctctgaggttcctttgccctcgccttgctgaatggtgagccgctgcctctcggagcccgtctccttgacagcctgccctcggctcctgcagccactcctgggcctgatggggacagggccagcctggtgggtggtgtcagaggtcctggcagagcagcgtaggcctgggatgcgtctgcagaattctggctgaacgagcgaggagcacggccagcttcggggccgtcgtgaccacaggagggcagagggccagcccgtgagctctgaccccagctggacgtgctcttgtttcccttggggctaaggagattggagccactgaactgaatctctgggttttggagacttagagaatccattggactcttctgctggcgtctttctgaatgctgatggggacttggtgacttcagctacgggacggacgagtacgacggagaggggaatgaggagcagaaggggcccccggagggctcagagaccatgccgtacatcgatgagtcgcccaccatgtccccgcagctcagcgcccgcagccagggcgggggggatggcgtctccccgactccacctgagggactggctcctggggtggaagcagggaaaggcctggagatgaggaagctggttctctcggggttcttggccagcgaagagatctacattaaccagctggaagccctgttgctgcccatgaaacccctgaaggccaccgccaccacctcccagcccgtgctcaccatccagcagatcgagaccatcttctacaagatccaggacatctatgagatccacaaggagttctatgacaacctgtgccccaaggtgcaacagtgggacagccaggtcaccatgggccacctcttccagaagctggccagccagctcggtgtgtacaaagcgtttgtcgataactataaagtcgctctggagacagctgagaagtgcagccagtccaacaaccagttccagaagatctcagaggaactcaaagtgaaaggtcccaaggactccaaggacagccacacgtctgtcaccatggaagctctgctctacaagcccattgaccgggtcactcggagcaccctagtcctacacgacctgctgaagcacacacctgtggaccaccccgactacccgctgctgcaggatgccctccgcatctcccagaacttcctgtccagcatcaacgaggacatcgacccccgccggactgcagtgacaacgcccaagggggagacgcgacagctggtgaaggacggcttcctggtggaagtgtcagagagctcccggaagctgcggcacgtcttcctctttacagatgtcctactgtgtgccaagctgaagaagacctctgcagggaagcaccagcagtatgactgtaagtggtacatccccctggccgacctggtgtttccatcccccgaggagtctgaggccagcccccaggtgcaccccttcccagaccatgagctggaggacatgaagatgaagatctctgccctcaagagtgaaatccagaaggagaaagccaacaaaggccagagccgggccatcgagcgcctgaagaagaagatgtttgagaatgagttcctgctgctgctcaactcccccacaatcccgttcaggatccacaatcggaatggaaagagttacctgttcctactgtcctcggactacgagaggtcagagtggagagaagcaattcagaaactacagaagaaggatctccaggcctttgtcctgagctcagtggagctccaggtgctcacaggatcctgtttcaagcttaggactgtacacaacattcctgtcaccagcaataaagacgacgatgagtctccaggactctatggcttccttcatgtcatcgtccactctgccaagggatttaagcaatcagccaacctgtactgtaccctggaggtggattccttcggctattttgtcagcaaagccaaaaccagggtgttccgggacacagcggagcccaagtgggatgaggagtttgagatcgagctggagggctcccagtccctgaggatcctgtgctatgagaagtgctatgacaagaccaaggtcaacaaggacaacaatgagatcgtggacaagatcatgggcaaaggacagatccagctggacccacaaaccgtggagaccaagaactggcacacggacgtgattgagatgaacgggatcaaagtggaattttccatgaaattcaccagccgagatatgagcctgaagaggaccccgtccaaaaagcagaccggcgtcttcggtgtgaagatcagcgtggtgacgaagcgggagcgctccaaggtgccctacatcgtccggcagtgtgtggaggaggtggagaagaggggtatcgaggaggttggcatctacaggatatcgggcgtggccacggacatccaggcgctcaaggccgtcttcgatgccaataacaaggacatcctgctgatgctgagtgacatggacatcaacgccatcgccgggacgctcaagctgtacttccgggaactgcccgagccgctcctcacggaccgactctacccagccttcatggagggcatcgccctgtcagaccctgctgccaaggaaaactgcatgatgcacctgctccgctccctgcccgaccccaacctcatcaccttcctcttcctgctggaacacttgaaaagggttgccgagaaggagcccatcaacaaaatgtcacttcacaacctggctaccgtgtttggacccacgttactgagaccctcagaagtggagagcaaagcacacctcacctcggctgcggacatctggtcccatgacgtcatggcgcaggtccaggtcctcctctactacctgcagcacccccccatttccttcgcagaactcaagcggaacacactgtacttctccaccgacgtgtagcccgaggcagggtggctgcgggcgggtggtggaaccagcccctccagcctggggtccaactcagacttgaaagactgcaatagaaaactcccaaacccagcactccagactcgagggaagccagcttccaagaactggaatgcgtacgtcttttgtgccaccttgtacaaagccggctgcccagccccagcctcaccaccgcatcccacctcctgccctccatacctctagttgtgtctgatgctccgtgctgttcgggaattgttttatgtacacttgtcaggcagaaaaggtagtgaccggcccggcgtgggcacacagacagcccgctttgttctttcatttcctccagcactttctttccgcctgagtccagcccaaggccttttattttgcgctgtgtaactgctgccagcttctctcttggccctgctcccagatggcggtctcctggcagcctcccctcagtcttcctccacccgctcttccttcccagcctgcctgcatgcatgtgcacccttggtcttcgctccatcgccttgaaagctctgaagaggccctgggttgccgcggcagcagtggtctgtttgatgctgccgtttgccgctgccggcccctcctcagactccgcctttgggagcacacctgctttgccttgctgcctgtgcaaatgttggacaagcagacacactcacactcgtccccagcttagcacagagctggagcgcccatttctggaattttccgtttgggaatctccacttctggggtttacctgttcggcctcctgtctatcagtgaggcatctctgactgtttcttctactgcttttcagttcccttccctgctgttctatttcctttgagtgtaaagactcacaggtgacctgctatcgagatagccagagggtcaggagagaatgggggaggaggcggtcaggctgctgaggaaacaccacaggctgaacgggggaggaatgcacatgccacgctgggtgtcccgggtcgcggggaggcagctcagctcttaggagcaagttgtgggggcttttcaagaggggccaggcttcctggagggtgactgatgtggccgaagcaggtgtccaggcaggtaggctgcagccaggagctccctggcaccgcaggacctcgtggtactcttgccttagattttacacacactccacagccaagcactgccacggtcctccaggacctgggaagcaaaggcacaggcccacggtggccagccattgtggtgccgccccagcttctggatacagccttttgggtaaacactgggaactccagaagttgtggggagagtggggaatcagacagccgcctctaggggctgggttctgctggggcctccttgttggtgctgtaggcacccgccagggagcagggacccgacttgcagacgcattgcccggtactaggaaggagtgaggtgtgttcccaccgtacacttcccacacgagctgcggctgccagcctcgggccatcagcctaggagagcagatgcagctccaggggctcgacttatagccagttacagctccccggctcttctgtgtggcagagcgtcgtttccgggccctcagggctggggagctcagttcccattgcttgtgctcagggctgagtcttaaagaagggtttgccggccctaacgctgcagcgcgtgcgcggtgagaggccctttttgagcctgtttactcctgtggccttgggcagaacagtaaatactctgtgcacggaggaaagacatgcccaagaggaaggaagtactgaccatcggctgcctgtgagcagcttagcaaggagcccttgctccctgggaaaggcggtgaacttgagtctaaagatgcagtgcctggcccttcctaaggtccctgcctggcatccgagtgtcggtgtgtggcacagaaggctcctgcttgcttccaaagtgatggacaggaaggggcagagtgagtcacggcccagactgggcaccttcgcgtctcagcctcagggagccccacagccccaagctcgctgaggcaacgtgagaacaggctatgggaaggctgcaaaggctgagaaatgcaaaggctcatatttataaatcccacccccagagtggggagggtcaggtgccagacctggactaaactgcaccaaggaaacacccagcagggtctcctgtgagccggggaccatgcagcccgaaacctccagtcactgcgcccggcaggagtcaggagccagggactgtgcagcctggaacctccagtcactgtgcccagcagggtgggctgtgcccagcaggagtcaggctaagaaacgccaggtctgcctgttcttgctgggcaatggctgatggctgccagtttctgctgatacacaggtaggatgggacccttcatgaatatctgactttaataagttggtaaggatatatttttttgtctatgttctgtttcaacttatgtagattattataaattgatgtaaaccacgtgagaggaaaatgttaataaaaaatgcaaagccccatcatttgcac

SEQ ID NO: 104165 - DNA, 1049 bp, Homo sapiens
  Payload ID: 472
  Gene Symbol: ABR
  Gene Name: active BCR-related
  Uniprot ID: Q12979
  ENST ID: ENST00000543210
  CDS Start-End: 98-1030
gaaagccggcgggactagggaactagcgggactggcagccgggactgagcgctccacaggcgccttctctccagcgccgcgtcccgtcccccccggcatgaccgacgtcctgccccagcccgactgcagcccgaaggcggggcgcgaacccctggcgctggaggagtcggggagcaagcgcccccccaacaccggcgcccggctctggggccgcgtgcgcaacaagctgctccgaaacaagctggacccacaaaccgtggagaccaagaactggcacacggacgtgattgagatgaacgggatcaaagtggaattttccatgaaattcaccagccgagatatgagcctgaagaggaccccgtccaaaaagcagaccggcgtcttcggtgtgaagatcagcgtggtgacgaagcgggagcgctccaaggtgccctacatcgtccggcagtgtgtggaggaggtggagaagaggggtatcgaggaggttggcatctacaggatatcgggcgtggccacggacatccaggcgctcaaggccgtcttcgatgccaataacaaggacatcctgctgatgctgagtgacatggacatcaacgccatcgccgggacgctcaagctgtacttccgggaactgcccgagccgctcctcacggaccgactctacccagccttcatggagggcatcgccctgtcagaccctgctgccaaggaaaactgcatgatgcacctgctccgctccctgcccgaccccaacctcatcaccttcctcttcctgctggaacacttgaaaagggttgccgagaaggagcccatcaacaaaatgtcacttcacaacctggctaccgtgtttggacccacgttactgagaccctcagaagtggagagcaaagcacacctcacctcggctgcggacatctggtcccatgacgtcatggcgcaggtccaggtcctcctctactacctgcagcacccccccatttccttcgcagaactcaagcggaacacactgtacttctccaccgacgtgtagcccgaggcagggtggctgc

SEQ ID NO: 104166 - DNA, 566 bp, Homo sapiens
  Payload ID: 472
  Gene Symbol: ABR
  Gene Name: active BCR-related
  ENST ID: ENST00000574544
  CDS Start-End: 1-566
gaagacctctgcagggaagcaccagcagtatgactgtaagtggtacatccccctggccgacctggtgtttccatcccccgaggagtctgaggccagcccccaggtgcaccccttcccagaccatgagctggaggacatgaagatgaagatctctgccctcaagagtgaaatccagaaggagaaagccaacaaaggccagagccgggccatcgagcgcctgaagaagaagatgtttgagaatgagttcctgctgctgctcaactcccccacaatcccgttcaggatccacaatcggaatggaaagagttacctgttcctactgtcctcggactacgagaggtcagagtggagagaagcaattcagaaactacagaagaaggatctccaggcctttgtcctgagctcagtggagctccaggtgctcacaggatcctgtttcaagcttaggactgtacacaacattcctgtcaccagcaataaagacgacctgtactgtaccctggaggtggattccttcggctattttgtcagcaaagccaaaaccagggtgttccgggacacagcgg

SEQ ID NO: 104167 - DNA, 760 bp, Homo sapiens
  Payload ID: 472
  Gene Symbol: ABR
  Gene Name: active BCR-related
  ENST ID: ENST00000571945
  CDS Start-End: 264-760
agctacaaacgtgctcctctttaggatgccagcaggctgctggctccctccctccctacccctcctccccttccccttccctcctctcctcgccacgcgcctccctcccctcccccttgctggaagagcactccggagcggctgcccgatgctggagtccgtgcggcagcatcagcaaggtggctgagtggccgggctgctggtgggcgccggggagcctggagcgatggctgcacgctcccgccgcggggacagaggctgccatggagattctcctcattattcgcttctgctgtaactgcacctatggtaacccagctctgctctacaagcccattgaccgggtcactcggagcaccctagtcctacacgacctgctgaagcacacacctgtggaccaccccgactacccgctgctgcaggatgccctccgcatctcccagaacttcctgtccagcatcaacgaggacatcgacccccgccggactgcagtgacaacgcccaagggggagacgcgacagctggtgaaggacggcttcctggtggaagtgtcagagagctcccggaagctgcggcacgtcttcctctttacagatgtcctactgtgtgccaagctgaagaagacctctgcagggaagcaccagcagtatgactgtaagtggtacatccccctggccgacctggtgtttccatcccccgaggagtctgaggccagcccccaggtgcaccccttcccagaccatgagctggaggacatgaa

SEQ ID NO: 104168 - DNA, 597 bp, Homo sapiens
  Payload ID: 472
  Gene Symbol: ABR
  Gene Name: active BCR-related
  ENST ID: ENST00000574266
  CDS Start-End: 339-597
ctcctttgttgcgcgatgagggtcgggtttcggatctgaccgagccgccgccgcgggatggagccgctcagccaccggggcctgccgcgcctgtcctggatcgacaccctctacagcagagctgtccttgtgatggttcattctgctttggtttctcaacatcaaaggggcaaagccggatcccctgggcataggtcctgtgccaggtgccgccgctccatctgctccttcccctgcagaggccagcgtcgttgggtgaagacttcagctacgggacggacgagtacgacggagaggggaatgaggagcagaaggggcccccggagggctcagagaccatgccgtacatcgatgagtcgcccaccatgtccccgcagctcagcgcccgcagccagggcgggggggatggcgtctccccgactccacctgagggactggctcctggggtggaagcagggaaaggcctggagatgaggaagctggttctctcggggttcttggccagcgaagagatctacattaaccagctggaagccctgttgctgcccatgaaacccctgaaggccaccgccaccacctcccagcccgtgctcacca

SEQ ID NO: 104169 - DNA, 563 bp, Homo sapiens
  Payload ID: 472
  Gene Symbol: ABR
  Gene Name: active BCR-related
  ENST ID: ENST00000572441
  CDS Start-End: 62-523
agccgggactgagcgctccacaggcgccttctctccagcgccgcgtcccgtcccccccggcatgaccgacgtcctgccccagcccgactgcagcccgaaggcggggcgcgaacccctggcgctggaggagtcggggagcaagcgcccccccaacaccggcgcccggctctggggccgcgtgcgcaacaagctgctccgaaacaagctggacccacaaaccgtggagaccaagaactggcacacggacgtgattgagatgaacgggatcaaagtggaattttccatgaaattcaccagccgagatatgagcctgaagaggaccccgtccaaaaagcagaccggcgtcttcggtgtgaagatcagcgtggtgacgaagcgggagcgctccaaggtgccctacatcgtccggcagtgtgtggaggaggcggtcaggctgctgaggaaacaccacaggctgaacgggggaggaatgcacatgccacgctgggtgtcccgggtcgcggggaggcagctcagctcttaggagcaagttgtgggggcttttcaagaggggccaggcttcc

SEQ ID NO: 104170 - DNA, 549 bp, Homo sapiens
  Payload ID: 472
  Gene Symbol: ABR
  Gene Name: active BCR-related
  ENST ID: ENST00000570525
  CDS Start-End: 284-549
gccccaaggctgccggcacggtgatcttcgtgtctccaggacgccctgcggtgccagctcccgctggcccgcacgagtgctgaagcttacccctgctctgcgatgagtgtgagaggggtgtccaccccccgctggcggccccagcccaaggaggtccaccacagccctcgggagcaacactgccacgttctccgttgccagtcgtgacttcagctacgggacggacgagtacgacggagaggggaatgaggagcagaaggggcccccggagggctcagagaccatgccgtacatcgatgagtcgcccaccatgtccccgcagctcagcgcccgcagccagggcgggggggatggcgtctccccgactccacctgagggactggctcctggggtggaagcagggaaaggcctggagatgaggaagctggttctctcggggttcttggccagcgaagagatctacattaaccagctggaagccctgttgctgcccatgaaacccctgaaggccaccgccaccacctcccagcccgtgctcaccatccagca

SEQ ID NO: 104171 - DNA, 690 bp, Homo sapiens
  Payload ID: 472
  Gene Symbol: ABR
  Gene Name: active BCR-related
  ENST ID: ENST00000570441
  CDS Start-End: 186-690
tctggaggtggggcttgagtttctgccaggaaagctgggagagccagggagaagccaagaggcgggagaaagtgcttcaagccgaggacctgccgttgttaaaggcctggaagtgagaacgtgccaggccctttgagaggttactgtcaacagtgagatgggtggaagcagggaaaggcctggagatgaggaagctggttctctcggggttcttggccagcgaagagatctacattaaccagctggaagccctgttgctgcccatgaaacccctgaaggccaccgccaccacctcccagcccgtgctcaccatccagcagatcgagaccatcttctacaagatccaggacatctatgagatccacaaggagttctatgacaacctgtgccccaaggtgcaacagtgggacagccaggtcaccatgggccacctcttccagaagctggccagccagctcggtgtgtacaaagcgtttgtcgataactataaagtcgctctggagacagctgagaagtgcagccagtccaacaaccagttccagaagatctcagaggaactcaaagtgaaaggtcccaaggactccaaggacagccacacgtctgtcaccatggaagctctgctctacaagcccattgaccgggtcactcggagcaccctagtcctacacgacctgctgaagcacacacctg

SEQ ID NO: 104172 - DNA, 637 bp, Homo sapiens
  Payload ID: 472
  Gene Symbol: ABR
  Gene Name: active BCR-related
  ENST ID: ENST00000572152
  CDS Start-End: 1-353
tccgggacacagcggagcccaagtgggatgaggagtttgagatcgagctggagggctcccagtccctgaggatcctgtgctatgagaagtgctatgacaagaccaaggtcaacaaggacaacaatgagatcgtggacaagatcatgggcaaaggacagatccagctggacccacaaaccgtggagaccaagaactggcacacggacgtgattgagatgaacgggatcaaagtggaattttccatgaaattcaccagccgagatatgagcctgaagaggaccccgtccaaaaagcagaccggcgtcttcggtgtgaagatcagcgtggtgacgaaatggccggtgtggatctagagtggccgcagaggcgctcacaggacacttcagaagcacgcgagccagcacctaaacgctggaaggcgggagcgctccaaggtgccctacatcgtccggcagtgtgtggaggaggtggagaagaggggtatcgaggaggttggcatctacaggatatcgggcgtggccacggacatccaggcgctcaaggccgtcttcgatgccaataacaaggacatcctgctgatgctgagtgacatggacatcaacgccatcgccgggacgctcaagctgtacttccggga

SEQ ID NO: 104173 - DNA, 689 bp, Homo sapiens
  Payload ID: 472
  Gene Symbol: ABR
  Gene Name: active BCR-related
  ENST ID: ENST00000575934
  CDS Start-End: 290-689
ccgcgacctggagcagcgggaggccgaggccaagggccgcccgggctcgcccctcgccgcggaggagacccccgggcgcgagcacctgcccccgtggcggcgccgcaggttcctgcgggtgcccgagcgggactcgcccggccacagctcgccggagagagacagcgacggcagccggcacagctccgaccgcgaggacgacttctccgcagacttcagctacgggacggacgagtacgacggagaggggaatgaggagcagaaggggcccccggagggctcagagaccatgccgtacatcgatgagtcgcccaccatgtccccgcagctcagcgcccgcagccagggcgggggggatggcgtctccccgactccacctgagggactggctcctgggcccatgaaacccctgaaggccaccgccaccacctcccagcccgtgctcaccatccagcagatcgagaccatcttctacaagatccaggacatctatgagatccacaaggagttctatgacaacctgtgccccaaggtgcaacagtgggacagccaggtcaccatgggccacctcttccagaagctggccagccagctcggtgtgtacaaagcgtttgtcgataactataaagtcgctctggagacagctgagaagtgcagccagtccaacaaccagttccagaagatctcag

SEQ ID NO: 104174 - DNA, 3196 bp, Homo sapiens
  Payload ID: 472
  Gene Symbol: ABR
  Gene Name: active BCR-related
  Uniprot ID: Q12979
  ENST ID: ENST00000574437
  CDS Start-End: 466-2907
ataaaaagcaaaatggtgactcagagaggagagttggaagcgtcctgcctcttgctcccactgttaatttttacacttggaattaggcagaaggcaaagaaaacagcagcttgaaatacgcggctgacatgctcttcatcgggtagcaacagcagagccgctcctccccgcctcccagcagccccggagcgggcagggcccggtgcctgctggctctcccccgcccctcaccaggcccaggcccccgcacagcccccgcccgggccaggcgtggatggtgcggccggggccatggctgccgggggccgccgccggcgcccactacgctaccagtccctggcagctctggtggaggattctcagtggcctttcttgttccttgtctcagacttcagctacgggacggacgagtacgacggagaggggaatgaggagcagaaggggcccccggagggctcagagaccatgccgtacatcgatgagtcgcccaccatgtccccgcagctcagcgcccgcagccagggcgggggggatggcgtctccccgactccacctgagggactggctcctggggtggaagcagggaaaggcctggagatgaggaagctggttctctcggggttcttggccagcgaagagatctacattaaccagctggaagccctgttgctgcccatgaaacccctgaaggccaccgccaccacctcccagcccgtgctcaccatccagcagatcgagaccatcttctacaagatccaggacatctatgagatccacaaggagttctatgacaacctgtgccccaaggtgcaacagtgggacagccaggtcaccatgggccacctcttccagaagctggccagccagctcggtgtgtacaaagcgtttgtcgataactataaagtcgctctggagacagctgagaagtgcagccagtccaacaaccagttccagaagatctcagaggaactcaaagtgaaaggtcccaaggactccaaggacagccacacgtctgtcaccatggaagctctgctctacaagcccattgaccgggtcactcggagcaccctagtcctacacgacctgctgaagcacacacctgtggaccaccccgactacccgctgctgcaggatgccctccgcatctcccagaacttcctgtccagcatcaacgaggacatcgacccccgccggactgcagtgacaacgcccaagggggagacgcgacagctggtgaaggacggcttcctggtggaagtgtcagagagctcccggaagctgcggcacgtcttcctctttacagatgtcctactgtgtgccaagctgaagaagacctctgcagggaagcaccagcagtatgactgtaagtggtacatccccctggccgacctggtgtttccatcccccgaggagtctgaggccagcccccaggtgcaccccttcccagaccatgagctggaggacatgaagatgaagatctctgccctcaagagtgaaatccagaaggagaaagccaacaaaggccagagccgggccatcgagcgcctgaagaagaagatgtttgagaatgagttcctgctgctgctcaactcccccacaatcccgttcaggatccacaatcggaatggaaagagttacctgttcctactgtcctcggactacgagaggtcagagtggagagaagcaattcagaaactacagaagaaggatctccaggcctttgtcctgagctcagtggagctccaggtgctcacaggatcctgtttcaagcttaggactgtacacaacattcctgtcaccagcaataaagacgacgatgagtctccaggactctatggcttccttcatgtcatcgtccactctgccaagggatttaagcaatcagccaacctgtactgtaccctggaggtggattccttcggctattttgtcagcaaagccaaaaccagggtgttccgggacacagcggagcccaagtgggatgaggagtttgagatcgagctggagggctcccagtccctgaggatcctgtgctatgagaagtgctatgacaagaccaaggtcaacaaggacaacaatgagatcgtggacaagatcatgggcaaaggacagatccagctggacccacaaaccgtggagaccaagaactggcacacggacgtgattgagatgaacgggatcaaagtggaattttccatgaaattcaccagccgagatatgagcctgaagaggaccccgtccaaaaagcagaccggcgtcttcggtgtgaagatcagcgtggtgacgaagcgggagcgctccaaggtgccctacatcgtccggcagtgtgtggaggaggtggagaagaggggtatcgaggaggttggcatctacaggatatcgggcgtggccacggacatccaggcgctcaaggccgtcttcgatgccaataacaaggacatcctgctgatgctgagtgacatggacatcaacgccatcgccgggacgctcaagctgtacttccgggaactgcccgagccgctcctcacggaccgactctacccagccttcatggagggcatcgccctgtcagaccctgctgccaaggaaaactgcatgatgcacctgctccgctccctgcccgaccccaacctcatcaccttcctcttcctgctggaacacttgaaaagggttgccgagaaggagcccatcaacaaaatgtcacttcacaacctggctaccgtgtttggacccacgttactgagaccctcagaagtggagagcaaagcacacctcacctcggctgcggacatctggtcccatgacgtcatggcgcaggtccaggtcctcctctactacctgcagcacccccccatttccttcgcagaactcaagcggaacacactgtacttctccaccgacgtgtagcccgaggcagggtggctgcgggcgggtggtggaaccagcccctccagcctggggtccaactcagacttgaaagactgcaatagaaaactcccaaacccagcactccagactcgagggaagccagcttccaagaactggaatgcgtacgtcttttgtgccaccttgtacaaagccggctgcccagccccagcctcaccaccgcatcccacctcctgccctccatacctctagttgtgtctgatgctccgtgctgttcgggaattgttttatgtacacttgtcaggcagaa

SEQ ID NO: 104175 - DNA, 678 bp, Homo sapiens
  Payload ID: 472
  Gene Symbol: ABR
  Gene Name: active BCR-related
  ENST ID: ENST00000574139
  CDS Start-End: 290-678
ccgcgacctggagcagcgggaggccgaggccaagggccgcccgggctcgcccctcgccgcggaggagacccccgggcgcgagcacctgcccccgtggcggcgccgcaggttcctgcgggtgcccgagcgggactcgcccggccacagctcgccggagagagacagcgacggcagccggcacagctccgaccgcgaggacgacttctccgcagacttcagctacgggacggacgagtacgacggagaggggaatgaggagcagaaggggcccccggagggctcagagaccatgccgtacatcgatgagtcgcccaccatgtccccgcagctcagcgcccgcagccagggcgggggggatggcgtctccccgactccacctgagggactggctcctggggtggaagcagggaaaggcctggagatgaggaagctggttctctcggggttcttggccagcgaagagatctacattaaccagctggaagccctgttgctgcccatgaaacccctgaaggccaccgccaccacctcccagcccgtgctcaccatccagcagatcgagaccatcttctacaagatccaggacatctatgagatccacaaggagttctatgacaacctgtgccccaaggtgcaacagtgggacagccaggtcaccatgggccacctcttccagaa

SEQ ID NO: 104176 - DNA, 850 bp, Homo sapiens
  Payload ID: 472
  Gene Symbol: ABR
  Gene Name: active BCR-related
  ENST ID: ENST00000571797
  CDS Start-End: 1-575
tcgaggaggttggcatctacaggatatcgggcgtggccacggacatccaggcgctcaaggccgtcttcgatgccaataacaaggacatcctgctgatgctgagtgacatggacatcaacgccatcgccgggacgctcaagctgtacttccgggaactgcccgagccgctcctcacggaccgactctacccagccttcatggagggcatcgccctgtcagaccctgctgccaaggaaaactgcatgatgcacctgctccgctccctgcccgaccccaacctcatcaccttcctcttcctgctggaacacttgaaaagggttgccgagaaggagcccatcaacaaaatgtcacttcacaacctggctaccgtgtttggacccacgttactgagaccctcagaagtggagagcaaagcacacctcacctcggctgcggacatctggtcccatgacgtcatggcgcagaactcaagcggaacacactgtacttctccaccgacgtgtagcccgaggcagggtggctgcgggcgggtggtggaaccagcccctccagcctggggtccaactcagacttgaaagactgcaatagaaaactcccaaacccagcactccagactcgagggaagccagcttccaagaactggaatgcgtacgtcttttgtgccaccttgtacaaagccggctgcccagccccagcctcaccaccgcatcccacctcctgccctccatacctctagttgtgtctgatgctccgtgctgttcgggaattgttttatgtacacttgtcaggcagaaaaggtagtgaccggcccggcgtgggcacacagacagcccgctttgttctttcattt

SEQ ID NO: 104177 - DNA, 5595 bp, Homo sapiens
  Payload ID: 472
  Gene Symbol: ABR
  Gene Name: active BCR-related
  Uniprot ID: Q12979
  ENST ID: ENST00000620619
  CDS Start-End: 601-3042
ggactgcagagggaacttgccttgaagaggcctggtccttaaagagacacagcacacacggcccgaccggcagccccagagcagaggctccactgatggcaggcgcccctggctaggctctgaggttcctttgccctcgccttgctgaatggtgagccgctgcctctcggagcccgtctccttgacagcctgccctcggctcctgcagccactcctgggcctgatggggacagggccagcctggtgggtggtgtcagaggtcctggcagagcagcgtaggcctgggatgcgtctgcagaattctggctgaacgagcgaggagcacggccagcttcggggccgtcgtgaccacaggagggcagagggccagcccgtgagctctgaccccagctggacgtgctcttgtttcccttggggctaaggagattggagccactgaactgaatctctgggttttggagacttagagaatccattggactcttctgctggcgtctttctgaatgctgatggggacttggtgacttcagctacgggacggacgagtacgacggagaggggaatgaggagcagaaggggcccccggagggctcagagaccatgccgtacatcgatgagtcgcccaccatgtccccgcagctcagcgcccgcagccagggcgggggggatggcgtctccccgactccacctgagggactggctcctggggtggaagcagggaaaggcctggagatgaggaagctggttctctcggggttcttggccagcgaagagatctacattaaccagctggaagccctgttgctgcccatgaaacccctgaaggccaccgccaccacctcccagcccgtgctcaccatccagcagatcgagaccatcttctacaagatccaggacatctatgagatccacaaggagttctatgacaacctgtgccccaaggtgcaacagtgggacagccaggtcaccatgggccacctcttccagaagctggccagccagctcggtgtgtacaaagcgtttgtcgataactataaagtcgctctggagacagctgagaagtgcagccagtccaacaaccagttccagaagatctcagaggaactcaaagtgaaaggtcccaaggactccaaggacagccacacgtctgtcaccatggaagctctgctctacaagcccattgaccgggtcactcggagcaccctagtcctacacgacctgctgaagcacacacctgtggaccaccccgactacccgctgctgcaggatgccctccgcatctcccagaacttcctgtccagcatcaacgaggacatcgacccccgccggactgcagtgacaacgcccaagggggagacgcgacagctggtgaaggacggcttcctggtggaagtgtcagagagctcccggaagctgcggcacgtcttcctctttacagatgtcctactgtgtgccaagctgaagaagacctctgcagggaagcaccagcagtatgactgtaagtggtacatccccctggccgacctggtgtttccatcccccgaggaatctgaggccagcccccaggtgcaccccttcccagaccatgagctggaggacatgaagatgaagatctctgccctcaagagtgaaatccagaaggagaaagccaacaaaggccagagccgggccatcgagcgcctgaagaagaagatgtttgagaatgagttcctgctgctgctcaactcccccacaatcccgttcaggatccacaatcggaatggaaagagttacctgttcctactgtcctcggactacgagaggtcagagtggagagaagcaattcagaaactacagaagaaggatctccaggcctttgtcctgagctcagtggagctccaggtgctcacaggatcctgtttcaagcttaggactgtacacaacattcctgtcaccagcaataaagacgacgatgagtctccaggactctatggcttccttcatgtcatcgtccactctgccaagggatttaagcaatcagccaacctgtactgtaccctggaggtggattccttcggctattttgtcagcaaagccaaaaccagggtgttccgggacacagcggagcccaagtgggatgaggagtttgagatcgagctggagggctcccagtccctgaggatcctgtgctatgagaagtgctatgacaagaccaaggtcaacaaggacaacaatgagatcgtggacaagatcatgggcaaaggacagatccagctggacccacaaaccgtggagaccaagaactggcacacggacgtgattgagatgaacgggatcaaagtggaattttccatgaaattcaccagccgagatatgagcctgaagaggaccccgtccaaaaagcagaccggcgtcttcggtgtgaagatcagcgtggtgacgaagcgggagcgctccaaggtgccctacatcgtccggcagtgtgtggaggaggtggagaagaggggtatcgaggaggttggcatctacaggatatcgggcgtggccacggacatccaggcgctcaaggccgtcttcgatgccaataacaaggacatcctgctgatgctgagtgacatggacatcaacgccatcgccgggacgctcaagctgtacttccgggaactgcccgagccgctcctcacggaccgactctacccagccttcatggagggcatcgccctgtcagaccctgctgccaaggaaaactgcatgatgcacctgctccgctccctgcccgaccccaacctcatcaccttcctcttcctgctggaacacttgaaaagggttgccgagaaggagcccatcaacaaaatgtcacttcacaacctggctaccgtgtttggacccacgttactgagaccctcagaagtggagagcaaagcacacctcacctcggctgcggacatctggtcccatgacgtcatggcgcaggtccaggtcctcctctactacctgcagcacccccccatttccttcgcagaactcaagcggaacacactgtacttctccaccgacgtgtagcccgaggcagggtggctgcgggcgggtggtggaaccagcccctccagcctggggtccaactcagacttgaaagactgcaatagaaaactcccaaacccagcactccagactcgagggaagccagcttccaagaactggaatgcgtacgtcttttgtgccaccttgtacaaagccggctgcccagccccagcctcaccaccgcatcccacctcctgccctccatacctctagttgtgtctgatgctccgtgctgttcgggaattgttttatgtacacttgtcaggcagaaaaggtagtgaccggcccggcgtgggcacacagacagcccgctttgttctttcatttcctccagcactttctttccgcctgagtccagcccaaggccttttattttgcgctgtgtaactgctgccagcttctctcttggccctgctcccagatggcggtctcctggcagcctcccctcagtcttcctccacccgctcttccttcccagcctgcctgcatgcatgtgcacccttggtcttcgctccatcgccttgaaagctctgaagaggccctgggttgccgcggcagcagtggtctgtttgatgctgccgtttgccgctgccggcccctcctcagactccgcctttgggagcacacctgctttgccttgctgcctgtgcaaatgttggacaagcagacacactcacactcgtccccagcttagcacagagctggagcgcccatttctggaattttccgtttgggaatctccacttctggggtttacctgttcggcctcctgtctatcagtgaggcatctctgactgtttcttctactgcttttcagttcccttccctgctgttctatttcctttgagtgtaaagactcacaggtgacctgctatcgagatagccagagggtcaggagagaatgggggaggaggcggtcaggctgctgaggaaacaccacaggctgaacgggggaggaatgcacatgccacgctgggtgtcccgggtcgcggggaggcagctcagctcttaggagcaagttgtgggggcttttcaagaggggccaggcttcctggagggtgactgatgtggccgaagcaggtgtccaggcaggtaggctgcagccaggagctccctggcaccgcaggacctcgtggtactcttgccttagattttacacacactccacagccaagcactgccacggtcctccaggacctgggaagcaaaggcacaggcccacggtggccagccattgtggtgccgccccagcttctggatacagccttttgggtaaacactgggaactccagaagttgtggggagagtggggaatcagacagccgcctctaggggctgggttctgctggggcctccttgttggtgctgtaggcacccgccagggagcagggacccgacttgcagacgcattgcccggtactaggaaggagtgaggtgtgttcccaccgtacacttcccacacgagctgcggctgccagcctcgggccatcagcctaggagagcagatgcagctccaggggctcgacttatagccagttacagctccccggctcttctgtgtggcagagcgtcgtttccgggccctcagggctggggagctcagttcccattgcttgtgctcagggctgagtcttaaagaagggtttgccggccctaacgctgcagcgcgtgcgcggtgagaggccctttttgagcctgtttactcctgtggccttgggcagaacagtaaatactctgtgcacggaggaaagacatgcccaagaggaaggaagtactgaccatcggctgcctgtgagcagcttagcaaggagcccttgctccctgggaaaggcggtgaacttgagtctaaagatgcagtgcctggcccttcctaaggtccctgcctggcatccgagtgtcggtgtgtggcacagaaggctcctgcttgcttccaaagtgatggacaggaaggggcagagtgagtcacggcccagactgggcaccttcgcgtctcagcctcagggagccccacagccccaagctcgctgaggcaacgtgagaacaggctatgggaaggctgcaaaggctgagaaatgcaaaggctcatatttataaatcccacccccagagtggggagggtcaggtgccagacctggactaaactgcaccaaggaaacacccagcagggtctcctgtgagccggggaccatgcagcccgaaacctccagtcactgcgcccggcaggagtcaggagccagggactgtgcagcctggaacctccagtcactgtgcccagcagggtgggctgtgcccagcaggagtcaggctaagaaacgccaggtctgcctgttcttgctgggcaatggctgatggctgccagtttctgctgatacacaggtaggatgggacccttcatgaatatctgactttaataagttggtaaggatatatttttttgtctatgttctgtttcaacttatgtagattattataaattgatgtaaaccacgtgagaggaaaatgttaataaaaaatgcaaagccccatcatttgcac

SEQ ID NO: 104178 - DNA, 1049 bp, Homo sapiens; identical to SEQ ID NO: 104165
  Payload ID: 472
  Gene Symbol: ABR
  Gene Name: active BCR-related
  Uniprot ID: Q12979
  ENST ID: ENST00000615642
  CDS Start-End: 98-1030

SEQ ID NO: 104179 - DNA, 2502 bp, Homo sapiens
  Payload ID: 472
  Gene Symbol: ABR
  Gene Name: active BCR-related
  ENST ID: ENST00000619569
  CDS Start-End: 288-2213
agcctcgtgcccaggcagccagccagctacaaacgtgctcctctttaggatgccagcaggctgctggctccctccctccctacccctcctccccttccccttccctcctctcctcgccacgcgcctccctcccctcccccttgctggaagagcactccggagcggctgcccgatgctggagtccgtgcggcagcatcagcaaggtggctgagtggccgggctgctggtgggcgccggggagcctggagcgatggctgcacgctcccgccgcggggacagaggctgccatggagattctcctcattattcgcttctgctgtaactgcacctatgctctgctctacaagcccattgaccgggtcactcggagcaccctagtcctacacgacctgctgaagcacacacctgtggaccaccccgactacccgctgctgcaggatgccctccgcatctcccagaacttcctgtccagcatcaacgaggacatcgacccccgccggactgcagtgacaacgcccaagggggagacgcgacagctggtgaaggacggcttcctggtggaagtgtcagagagctcccggaagctgcggcacgtcttcctctttacagatgtcctactgtgtgccaagctgaagaagacctctgcagggaagcaccagcagtatgactgtaagtggtacatccccctggccgacctggtgtttccatcccccgaggaatctgaggccagcccccaggtgcaccccttcccagaccatgagctggaggacatgaagatgaagatctctgccctcaagagtgaaatccagaaggagaaagccaacaaaggccagagccgggccatcgagcgcctgaagaagaagatgtttgagaatgagttcctgctgctgctcaactcccccacaatcccgttcaggatccacaatcggaatggaaagagttacctgttcctactgtcctcggactacgagaggtcagagtggagagaagcaattcagaaactacagaagaaggatctccaggcctttgtcctgagctcagtggagctccaggtgctcacaggatcctgtttcaagcttaggactgtacacaacattcctgtcaccagcaataaagacgacgatgagtctccaggactctatggcttccttcatgtcatcgtccactctgccaagggatttaagcaatcagccaacctgtactgtaccctggaggtggattccttcggctattttgtcagcaaagccaaaaccagggtgttccgggacacagcggagcccaagtgggatgaggagtttgagatcgagctggagggctcccagtccctgaggatcctgtgctatgagaagtgctatgacaagaccaaggtcaacaaggacaacaatgagatcgtggacaagatcatgggcaaaggacagatccagctggacccacaaaccgtggagaccaagaactggcacacggacgtgattgagatgaacgggatcaaagtggaattttccatgaaattcaccagccgagatatgagcctgaagaggaccccgtccaaaaagcagaccggcgtcttcggtgtgaagatcagcgtggtgacgaagcgggagcgctccaaggtgccctacatcgtccggcagtgtgtggaggaggtggagaagaggggtatcgaggaggttggcatctacaggatatcgggcgtggccacggacatccaggcgctcaaggccgtcttcgatgccaataacaaggacatcctgctgatgctgagtgacatggacatcaacgccatcgccgggacgctcaagctgtacttccgggaactgcccgagccgctcctcacggaccgactctacccagccttcatggagggcatcgccctgtcagaccctgctgccaaggaaaactgcatgatgcacctgctccgctccctgcccgaccccaacctcatcaccttcctcttcctgctggaacacttgaaaagggttgccgagaaggagcccatcaacaaaatgtcacttcacaacctggctaccgtgtttggacccacgttactgagaccctcagaagtggagagcaaagcacacctcacctcggctgcggacatctggtcccatgacgtcatggcgcaggtccaggtcctcctctactacctgcagcacccccccatttccttcgcagaactcaagcggaacacactgtacttctccaccgacgtgtagcccgaggcagggtggctgcgggcgggtggtggaaccagcccctccagcctggggtccaactcagacttgaaagactgcaatagaaaactcccaaacccagcactccagactcgagggaagccagcttccaagaactggaatgcgtacgtcttttgtgccaccttgtacaaagccggctgcccagccccagcctcaccaccgcatcccacctcctgccctccatacctctagttgtgtctgatgctccgtgctgttcgggaattgttttatgtacacttgtcaggcagaa

SEQ ID NO: 104180 - DNA, 4895 bp, Homo sapiens
  Payload ID: 472
  Gene Symbol: ABR
  Gene Name: active BCR-related
  ENST ID: ENST00000613981
  CDS Start-End: 1-2334
gtggaagcagggaaaggcctggagatgaggaagctggttctctcggggttcttggccagcgaagagatctacattaaccagctggaagccctgttgctgcccatgaaacccctgaaggccaccgccaccacctcccagcccgtgctcaccatccagcagatcgagaccatcttctacaagatccaggacatctatgagatccacaaggagttctatgacaacctgtgccccaaggtgcaacagtgggacagccaggtcaccatgggccacctcttccagaagctggccagccagctcggtgtgtacaaagcgtttgtcgataactataaagtcgctctggagacagctgagaagtgcagccagtccaacaaccagttccagaagatctcagaggaactcaaagtgaaaggtcccaaggactccaaggacagccacacgtctgtcaccatggaagctctgctctacaagcccattgaccgggtcactcggagcaccctagtcctacacgacctgctgaagcacacacctgtggaccaccccgactacccgctgctgcaggatgccctccgcatctcccagaacttcctgtccagcatcaacgaggacatcgacccccgccggactgcagtgacaacgcccaagggggagacgcgacagctggtgaaggacggcttcctggtggaagtgtcagagagctcccggaagctgcggcacgtcttcctctttacagatgtcctactgtgtgccaagctgaagaagacctctgcagggaagcaccagcagtatgactgtaagtggtacatccccctggccgacctggtgtttccatcccccgaggaatctgaggccagcccccaggtgcaccccttcccagaccatgagctggaggacatgaagatgaagatctctgccctcaagagtgaaatccagaaggagaaagccaacaaaggccagagccgggccatcgagcgcctgaagaagaagatgtttgagaatgagttcctgctgctgctcaactcccccacaatcccgttcaggatccacaatcggaatggaaagagttacctgttcctactgtcctcggactacgagaggtcagagtggagagaagcaattcagaaactacagaagaaggatctccaggcctttgtcctgagctcagtggagctccaggtgctcacaggatcctgtttcaagcttaggactgtacacaacattcctgtcaccagcaataaagacgacgatgagtctccaggactctatggcttccttcatgtcatcgtccactctgccaagggatttaagcaatcagccaacctgtactgtaccctggaggtggattccttcggctattttgtcagcaaagccaaaaccagggtgttccgggacacagcggagcccaagtgggatgaggagtttgagatcgagctggagggctcccagtccctgaggatcctgtgctatgagaagtgctatgacaagaccaaggtcaacaaggacaacaatgagatcgtggacaagatcatgggcaaaggacagatccagctggacccacaaaccgtggagaccaagaactggcacacggacgtgattgagatgaacgggatcaaagtggaattttccatgaaattcaccagccgagatatgagcctgaagaggaccccgtccaaaaagcagaccggcgtcttcggtgtgaagatcagcgtggtgacgaagcgggagcgctccaaggtgccctacatcgtccggcagtgtgtggaggaggtggagaagaggggtatcgaggaggttggcatctacaggatatcgggcgtggccacggacatccaggcgctcaaggccgtcttcgatgccaataacaaggacatcctgctgatgctgagtgacatggacatcaacgccatcgccgggacgctcaagctgtacttccgggaactgcccgagccgctcctcacggaccgactctacccagccttcatggagggcatcgccctgtcagaccctgctgccaaggaaaactgcatgatgcacctgctccgctccctgcccgaccccaacctcatcaccttcctcttcctgctggaacacttgaaaagggttgccgagaaggagcccatcaacaaaatgtcacttcacaacctggctaccgtgtttggacccacgttactgagaccctcagaagtggagagcaaagcacacctcacctcggctgcggacatctggtcccatgacgtcatggcgcaggtccaggtcctcctctactacctgcagcacccccccatttccttcgcagaactcaagcggaacacactgtacttctccaccgacgtgtagcccgaggcagggtggctgcgggcgggtggtggaaccagcccctccagcctggggtccaactcagacttgaaagactgcaatagaaaactcccaaacccagcactccagactcgagggaagccagcttccaagaactggaatgcgtacgtcttttgtgccaccttgtacaaagccggctgcccagccccagcctcaccaccgcatcccacctcctgccctccatacctctagttgtgtctgatgctccgtgctgttcgggaattgttttatgtacacttgtcaggcagaaaaggtagtgaccggcccggcgtgggcacacagacagcccgctttgttctttcatttcctccagcactttctttccgcctgagtccagcccaaggccttttattttgcgctgtgtaactgctgccagcttctctcttggccctgctcccagatggcggtctcctggcagcctcccctcagtcttcctccacccgctcttccttcccagcctgcctgcatgcatgtgcacccttggtcttcgctccatcgccttgaaagctctgaagaggccctgggttgccgcggcagcagtggtctgtttgatgctgccgtttgccgctgccggcccctcctcagactccgcctttgggagcacacctgctttgccttgctgcctgtgcaaatgttggacaagcagacacactcacactcgtccccagcttagcacagagctggagcgcccatttctggaattttccgtttgggaatctccacttctggggtttacctgttcggcctcctgtctatcagtgaggcatctctgactgtttcttctactgcttttcagttcccttccctgctgttctatttcctttgagtgtaaagactcacaggtgacctgctatcgagatagccagagggtcaggagagaatgggggaggaggcggtcaggctgctgaggaaacaccacaggctgaacgggggaggaatgcacatgccacgctgggtgtcccgggtcgcggggaggcagctcagctcttaggagcaagttgtgggggcttttcaagaggggccaggcttcctggagggtgactgatgtggccgaagcaggtgtccaggcaggtaggctgcagccaggagctccctggcaccgcaggacctcgtggtactcttgccttagattttacacacactccacagccaagcactgccacggtcctccaggacctgggaagcaaaggcacaggcccacggtggccagccattgtggtgccgccccagcttctggatacagccttttgggtaaacactgggaactccagaagttgtggggagagtggggaatcagacagccgcctctaggggctgggttctgctggggcctccttgttggtgctgtaggcacccgccagggagcagggacccgacttgcagacgcattgcccggtactaggaaggagtgaggtgtgttcccaccgtacacttcccacacgagctgcggctgccagcctcgggccatcagcctaggagagcagatgcagctccaggggctcgacttatagccagttacagctccccggctcttctgtgtggcagagcgtcgtttccgggccctcagggctggggagctcagttcccattgcttgtgctcagggctgagtcttaaagaagggtttgccggccctaacgctgcagcgcgtgcgcggtgagaggccctttttgagcctgtttactcctgtggccttgggcagaacagtaaatactctgtgcacggaggaaagacatgcccaagaggaaggaagtactgaccatcggctgcctgtgagcagcttagcaaggagcccttgctccctgggaaaggcggtgaacttgagtctaaagatgcagtgcctggcccttcctaaggtccctgcctggcatccgagtgtcggtgtgtggcacagaaggctcctgcttgcttccaaagtgatggacaggaaggggcagagtgagtcacggcccagactgggcaccttcgcgtctcagcctcagggagccccacagccccaagctcgctgaggcaacgtgagaacaggctatgggaaggctgcaaaggctgagaaatgcaaaggctcatatttataaatcccacccccagagtggggagggtcaggtgccagacctggactaaactgcaccaaggaaacacccagcagggtctcctgtgagccggggaccatgcagcccgaaacctccagtcactgcgcccggcaggagtcaggagccagggactgtgcagcctggaacctccagtcactgtgcccagcagggtgggctgtgcccagcaggagtcaggctaagaaacgccaggtctgcctgttcttgctgggcaatggctgatggctgccagtttctgctgatacacaggtaggatgggacccttcatgaatatctgactttaataagttggtaaggatatatttttttgtctatgttctgtttcaacttatgtagattattataaattgatgtaaaccacgtgagaggaaaatgttaataaaaaatgcaaagccccatcatttgcacaaaactca

SEQ ID NO: 104181 - DNA, 5288 bp, Homo sapiens
  Payload ID: 472
  Gene Symbol: ABR
  Gene Name: active BCR-related
  Uniprot ID: Q12979
  ENST ID: ENST00000612118
  CDS Start-End: 148-2727
gccccgcgctcctcccggggacctggttcccggcctcctcgcccctccgcgctcgcaacttcggcctcccccggctcccgcccgctctccctcctttgttgcgcgatgagggtcgggtttcggatctgaccgagccgccgccgcgggatggagccgctcagccaccggggcctgccgcgcctgtcctggatcgacaccctctacagcaacttcagctacgggacggacgagtacgacggagaggggaatgaggagcagaaggggcccccggagggctcagagaccatgccgtacatcgatgagtcgcccaccatgtccccgcagctcagcgcccgcagccagggcgggggggatggcgtctccccgactccacctgagggactggctcctggggtggaagcagggaaaggcctggagatgaggaagctggttctctcggggttcttggccagcgaagagatctacattaaccagctggaagccctgttgctgcccatgaaacccctgaaggccaccgccaccacctcccagcccgtgctcaccatccagcagatcgagaccatcttctacaagatccaggacatctatgagatccacaaggagttctatgacaacctgtgccccaaggtgcaacagtgggacagccaggtcaccatgggccacctcttccagaagctggccagccagctcggtgtgtacaaagcgtttgtcgataactataaagtcgctctggagacagctgagaagtgcagccagtccaacaaccagttccagaagatctcagaggaactcaaagtgaaaggtcccaaggactccaaggacagccacacgtctgtcaccatggaagctctgctctacaagcccattgaccgggtcactcggagcaccctagtcctacacgacctgctgaagcacacacctgtggaccaccccgactacccgctgctgcaggatgccctccgcatctcccagaacttcctgtccagcatcaacgaggacatcgacccccgccggactgcagtgacaacgcccaagggggagacgcgacagctggtgaaggacggcttcctggtggaagtgtcagagagctcccggaagctgcggcacgtcttcctctttacagatgtcctactgtgtgccaagctgaagaagacctctgcagggaagcaccagcagtatgactgtaagtggtacatccccctggccgacctggtgtttccatcccccgaggaatctgaggccagcccccaggtgcaccccttcccagaccatgagctggaggacatgaagatgaagatctctgccctcaagagtgaaatccagaaggagaaagccaacaaaggccagagccgggccatcgagcgcctgaagaagaagatgtttgagaatgagttcctgctgctgctcaactcccccacaatcccgttcaggatccacaatcggaatggaaagagttacctgttcctactgtcctcggactacgagaggtcagagtggagagaagcaattcagaaactacagaagaaggatctccaggcctttgtcctgagctcagtggagctccaggtgctcacaggatcctgtttcaagcttaggactgtacacaacattcctgtcaccagcaataaagacgacgatgagtctccaggactctatggcttccttcatgtcatcgtccactctgccaagggatttaagcaatcagccaacctgtactgtaccctggaggtggattccttcggctattttgtcagcaaagccaaaaccagggtgttccgggacacagcggagcccaagtgggatgaggagtttgagatcgagctggagggctcccagtccctgaggatcctgtgctatgagaagtgctatgacaagaccaaggtcaacaaggacaacaatgagatcgtggacaagatcatgggcaaaggacagatccagctggacccacaaaccgtggagaccaagaactggcacacggacgtgattgagatgaacgggatcaaagtggaattttccatgaaattcaccagccgagatatgagcctgaagaggaccccgtccaaaaagcagaccggcgtcttcggtgtgaagatcagcgtggtgacgaagcgggagcgctccaaggtgccctacatcgtccggcagtgtgtggaggaggtggagaagaggggtatcgaggaggttggcatctacaggatatcgggcgtggccacggacatccaggcgctcaaggccgtcttcgatgccaataacaaggacatcctgctgatgctgagtgacatggacatcaacgccatcgccgggacgctcaagctgtacttccgggaactgcccgagccgctcctcacggaccgactctacccagccttcatggagggcatcgccctgtcagaccctgctgccaaggaaaactgcatgatgcacctgctccgctccctgcccgaccccaacctcatcaccttcctcttcctgctggaacacttgaaaagggttgccgagaaggagcccatcaacaaaatgtcacttcacaacctggctaccgtgtttggacccacgttactgagaccctcagaagtggagagcaaagcacacctcacctcggctgcggacatctggtcccatgacgtcatggcgcaggtccaggtcctcctctactacctgcagcacccccccatttccttcgcagaactcaagcggaacacactgtacttctccaccgacgtgtagcccgaggcagggtggctgcgggcgggtggtggaaccagcccctccagcctggggtccaactcagacttgaaagactgcaatagaaaactcccaaacccagcactccagactcgagggaagccagcttccaagaactggaatgcgtacgtcttttgtgccaccttgtacaaagccggctgcccagccccagcctcaccaccgcatcccacctcctgccctccatacctctagttgtgtctgatgctccgtgctgttcgggaattgttttatgtacacttgtcaggcagaaaaggtagtgaccggcccggcgtgggcacacagacagcccgctttgttctttcatttcctccagcactttctttccgcctgagtccagcccaaggccttttattttgcgctgtgtaactgctgccagcttctctcttggccctgctcccagatggcggtctcctggcagcctcccctcagtcttcctccacccgctcttccttcccagcctgcctgcatgcatgtgcacccttggtcttcgctccatcgccttgaaagctctgaagaggccctgggttgccgcggcagcagtggtctgtttgatgctgccgtttgccgctgccggcccctcctcagactccgcctttgggagcacacctgctttgccttgctgcctgtgcaaatgttggacaagcagacacactcacactcgtccccagcttagcacagagctggagcgcccatttctggaattttccgtttgggaatctccacttctggggtttacctgttcggcctcctgtctatcagtgaggcatctctgactgtttcttctactgcttttcagttcccttccctgctgttctatttcctttgagtgtaaagactcacaggtgacctgctatcgagatagccagagggtcaggagagaatgggggaggaggcggtcaggctgctgaggaaacaccacaggctgaacgggggaggaatgcacatgccacgctgggtgtcccgggtcgcggggaggcagctcagctcttaggagcaagttgtgggggcttttcaagaggggccaggcttcctggagggtgactgatgtggccgaagcaggtgtccaggcaggtaggctgcagccaggagctccctggcaccgcaggacctcgtggtactcttgccttagattttacacacactccacagccaagcactgccacggtcctccaggacctgggaagcaaaggcacaggcccacggtggccagccattgtggtgccgccccagcttctggatacagccttttgggtaaacactgggaactccagaagttgtggggagagtggggaatcagacagccgcctctaggggctgggttctgctggggcctccttgttggtgctgtaggcacccgccagggagcagggacccgacttgcagacgcattgcccggtactaggaaggagtgaggtgtgttcccaccgtacacttcccacacgagctgcggctgccagcctcgggccatcagcctaggagagcagatgcagctccaggggctcgacttatagccagttacagctccccggctcttctgtgtggcagagcgtcgtttccgggccctcagggctggggagctcagttcccattgcttgtgctcagggctgagtcttaaagaagggtttgccggccctaacgctgcagcgcgtgcgcggtgagaggccctttttgagcctgtttactcctgtggccttgggcagaacagtaaatactctgtgcacggaggaaagacatgcccaagaggaaggaagtactgaccatcggctgcctgtgagcagcttagcaaggagcccttgctccctgggaaaggcggtgaacttgagtctaaagatgcagtgcctggcccttcctaaggtccctgcctggcatccgagtgtcggtgtgtggcacagaaggctcctgcttgcttccaaagtgatggacaggaaggggcagagtgagtcacggcccagactgggcaccttcgcgtctcagcctcagggagccccacagccccaagctcgctgaggcaacgtgagaacaggctatgggaaggctgcaaaggctgagaaatgcaaaggctcatatttataaatcccacccccagagtggggagggtcaggtgccagacctggactaaactgcaccaaggaaacacccagcagggtctcctgtgagccggggaccatgcagcccgaaacctccagtcactgcgcccggcaggagtcaggagccagggactgtgcagcctggaacctccagtcactgtgcccagcagggtgggctgtgcccagcaggagtcaggctaagaaacgccaggtctgcctgttcttgctgggcaatggctgatggctgccagtttctgctgatacacaggtaggatgggacccttcatgaatatctgactttaataagttggtaaggatatatttttttgtctatgttctgtttcaacttatgtagattattataaattgatgtaaaccacgtgagaggaaaatgttaataaaaaatgcaaagccccatcatttgcacaaaactca

SEQ ID NO: 104182 - DNA, 2673 bp, Homo sapiens
  Payload ID: 472
  Gene Symbol: ABR
  Gene Name: active BCR-related
  Uniprot ID: Q12979
  ENST ID: ENST00000611021
  CDS Start-End: 33-2501
ttcctgtctgccctccgcgggctccggctgccatggaggaggaagaggaggcgataggcttgctggacaaggttctggaggacgaagatgtgtttctcctggaggagtgcgagctgggaaccccgaccagccccggctcagggtcccccttcctggtggctgtgaaggtggaagcagggaaaggcctggagatgaggaagctggttctctcggggttcttggccagcgaagagatctacattaaccagctggaagccctgttgctgcccatgaaacccctgaaggccaccgccaccacctcccagcccgtgctcaccatccagcagatcgagaccatcttctacaagatccaggacatctatgagatccacaaggagttctatgacaacctgtgccccaaggtgcaacagtgggacagccaggtcaccatgggccacctcttccagaagctggccagccagctcggtgtgtacaaagcgtttgtcgataactataaagtcgctctggagacagctgagaagtgcagccagtccaacaaccagttccagaagatctcagaggaactcaaagtgaaaggtcccaaggactccaaggacagccacacgtctgtcaccatggaagctctgctctacaagcccattgaccgggtcactcggagcaccctagtcctacacgacctgctgaagcacacacctgtggaccaccccgactacccgctgctgcaggatgccctccgcatctcccagaacttcctgtccagcatcaacgaggacatcgacccccgccggactgcagtgacaacgcccaagggggagacgcgacagctggtgaaggacggcttcctggtggaagtgtcagagagctcccggaagctgcggcacgtcttcctctttacagatgtcctactgtgtgccaagctgaagaagacctctgcagggaagcaccagcagtatgactgtaagtggtacatccccctggccgacctggtgtttccatcccccgaggaatctgaggccagcccccaggtgcaccccttcccagaccatgagctggaggacatgaagatgaagatctctgccctcaagagtgaaatccagaaggagaaagccaacaaaggccagagccgggccatcgagcgcctgaagaagaagatgtttgagaatgagttcctgctgctgctcaactcccccacaatcccgttcaggatccacaatcggaatggaaagagttacctgttcctactgtcctcggactacgagaggtcagagtggagagaagcaattcagaaactacagaagaaggatctccaggcctttgtcctgagctcagtggagctccaggtgctcacaggatcctgtttcaagcttaggactgtacacaacattcctgtcaccagcaataaagacgacgatgagtctccaggactctatggcttccttcatgtcatcgtccactctgccaagggatttaagcaatcagccaacctgtactgtaccctggaggtggattccttcggctattttgtcagcaaagccaaaaccagggtgttccgggacacagcggagcccaagtgggatgaggagtttgagatcgagctggagggctcccagtccctgaggatcctgtgctatgagaagtgctatgacaagaccaaggtcaacaaggacaacaatgagatcgtggacaagatcatgggcaaaggacagatccagctggacccacaaaccgtggagaccaagaactggcacacggacgtgattgagatgaacgggatcaaagtggaattttccatgaaattcaccagccgagatatgagcctgaagaggaccccgtccaaaaagcagaccggcgtcttcggtgtgaagatcagcgtggtgacgaagcgggagcgctccaaggtgccctacatcgtccggcagtgtgtggaggaggtggagaagaggggtatcgaggaggttggcatctacaggatatcgggcgtggccacggacatccaggcgctcaaggccgtcttcgatgccaataacaaggacatcctgctgatgctgagtgacatggacatcaacgccatcgccgggacgctcaagctgtacttccgggaactgcccgagccgctcctcacggaccgactctacccagccttcatggagggcatcgccctgtcagaccctgctgccaaggaaaactgcatgatgcacctgctccgctccctgcccgaccccaacctcatcaccttcctcttcctgctggaacacttgaaaagggttgccgagaaggagcccatcaacaaaatgtcacttcacaacctggctaccgtgtttggacccacgttactgagaccctcagaagtggagagcaaagcacacctcacctcggctgcggacatctggtcccatgacgtcatggcgcaggtccaggtcctcctctactacctgcagcacccccccatttccttcgcagaactcaagcggaacacactgtacttctccaccgacgtgtagcccgaggcagggtggctgcgggcgggtggtggaaccagcccctccagcctggggtccaactcagacttgaaagactgcaatagaaaactcccaaacccagcactccagactcgagggaagccagcttccaagaactggaatgcgtacgtcttttgtgccaccttgtacaaag

SEQ ID NO: 104183 - DNA, 1049 bp, Homo sapiens; identical to SEQ ID NO: 104165
  Payload ID: 472
  Gene Symbol: ABR
  Gene Name: active BCR-related
  Uniprot ID: Q12979
  ENST ID: ENST00000611009
  CDS Start-End: 98-1030

SEQ ID NO: 104184 - DNA, 4887 bp, Homo sapiens
  Payload ID: 472
  Gene Symbol: ABR
  Gene Name: active BCR-related
  ENST ID: ENST00000620170
  CDS Start-End: 1-2334
gtggaagcagggaaaggcctggagatgaggaagctggttctctcggggttcttggccagcgaagagatctacattaaccagctggaagccctgttgctgcccatgaaacccctgaaggccaccgccaccacctcccagcccgtgctcaccatccagcagatcgagaccatcttctacaagatccaggacatctatgagatccacaaggagttctatgacaacctgtgccccaaggtgcaacagtgggacagccaggtcaccatgggccacctcttccagaagctggccagccagctcggtgtgtacaaagcgtttgtcgataactataaagtcgctctggagacagctgagaagtgcagccagtccaacaaccagttccagaagatctcagaggaactcaaagtgaaaggtcccaaggactccaaggacagccacacgtctgtcaccatggaagctctgctctacaagcccattgaccgggtcactcggagcaccctagtcctacacgacctgctgaagcacacacctgtggaccaccccgactacccgctgctgcaggatgccctccgcatctcccagaacttcctgtccagcatcaacgaggacatcgacccccgccggactgcagtgacaacgcccaagggggagacgcgacagctggtgaaggacggcttcctggtggaagtgtcagagagctcccggaagctgcggcacgtcttcctctttacagatgtcctactgtgtgccaagctgaagaagacctctgcagggaagcaccagcagtatgactgtaagtggtacatccccctggccgacctggtgtttccatcccccgaggaatctgaggccagcccccaggtgcaccccttcccagaccatgagctggaggacatgaagatgaagatctctgccctcaagagtgaaatccagaaggagaaagccaacaaaggccagagccgggccatcgagcgcctgaagaagaagatgtttgagaatgagttcctgctgctgctcaactcccccacaatcccgttcaggatccacaatcggaatggaaagagttacctgttcctactgtcctcggactacgagaggtcagagtggagagaagcaattcagaaactacagaagaaggatctccaggcctttgtcctgagctcagtggagctccaggtgctcacaggatcctgtttcaagcttaggactgtacacaacattcctgtcaccagcaataaagacgacgatgagtctccaggactctatggcttccttcatgtcatcgtccactctgccaagggatttaagcaatcagccaacctgtactgtaccctggaggtggattccttcggctattttgtcagcaaagccaaaaccagggtgttccgggacacagcggagcccaagtgggatgaggagtttgagatcgagctggagggctcccagtccctgaggatcctgtgctatgagaagtgctatgacaagaccaaggtcaacaaggacaacaatgagatcgtggacaagatcatgggcaaaggacagatccagctggacccacaaaccgtggagaccaagaactggcacacggacgtgattgagatgaacgggatcaaagtggaattttccatgaaattcaccagccgagatatgagcctgaagaggaccccgtccaaaaagcagaccggcgtcttcggtgtgaagatcagcgtggtgacgaagcgggagcgctccaaggtgccctacatcgtccggcagtgtgtggaggaggtggagaagaggggtatcgaggaggttggcatctacaggatatcgggcgtggccacggacatccaggcgctcaaggccgtcttcgatgccaataacaaggacatcctgctgatgctgagtgacatggacatcaacgccatcgccgggacgctcaagctgtacttccgggaactgcccgagccgctcctcacggaccgactctacccagccttcatggagggcatcgccctgtcagaccctgctgccaaggaaaactgcatgatgcacctgctccgctccctgcccgaccccaacctcatcaccttcctcttcctgctggaacacttgaaaagggttgccgagaaggagcccatcaacaaaatgtcacttcacaacctggctaccgtgtttggacccacgttactgagaccctcagaagtggagagcaaagcacacctcacctcggctgcggacatctggtcccatgacgtcatggcgcaggtccaggtcctcctctactacctgcagcacccccccatttccttcgcagaactcaagcggaacacactgtacttctccaccgacgtgtagcccgaggcagggtggctgcgggcgggtggtggaaccagcccctccagcctggggtccaactcagacttgaaagactgcaatagaaaactcccaaacccagcactccagactcgagggaagccagcttccaagaactggaatgcgtacgtcttttgtgccaccttgtacaaagccggctgcccagccccagcctcaccaccgcatcccacctcctgccctccatacctctagttgtgtctgatgctccgtgctgttcgggaattgttttatgtacacttgtcaggcagaaaaggtagtgaccggcccggcgtgggcacacagacagcccgctttgttctttcatttcctccagcactttctttccgcctgagtccagcccaaggccttttattttgcgctgtgtaactgctgccagcttctctcttggccctgctcccagatggcggtctcctggcagcctcccctcagtcttcctccacccgctcttccttcccagcctgcctgcatgcatgtgcacccttggtcttcgctccatcgccttgaaagctctgaagaggccctgggttgccgcggcagcagtggtctgtttgatgctgccgtttgccgctgccggcccctcctcagactccgcctttgggagcacacctgctttgccttgctgcctgtgcaaatgttggacaagcagacacactcacactcgtccccagcttagcacagagctggagcgcccatttctggaattttccgtttgggaatctccacttctggggtttacctgttcggcctcctgtctatcagtgaggcatctctgactgtttcttctactgcttttcagttcccttccctgctgttctatttcctttgagtgtaaagactcacaggtgacctgctatcgagatagccagagggtcaggagagaatgggggaggaggcggtcaggctgctgaggaaacaccacaggctgaacgggggaggaatgcacatgccacgctgggtgtcccgggtcgcggggaggcagctcagctcttaggagcaagttgtgggggcttttcaagaggggccaggcttcctggagggtgactgatgtggccgaagcaggtgtccaggcaggtaggctgcagccaggagctccctggcaccgcaggacctcgtggtactcttgccttagattttacacacactccacagccaagcactgccacggtcctccaggacctgggaagcaaaggcacaggcccacggtggccagccattgtggtgccgccccagcttctggatacagccttttgggtaaacactgggaactccagaagttgtggggagagtggggaatcagacagccgcctctaggggctgggttctgctggggcctccttgttggtgctgtaggcacccgccagggagcagggacccgacttgcagacgcattgcccggtactaggaaggagtgaggtgtgttcccaccgtacacttcccacacgagctgcggctgccagcctcgggccatcagcctaggagagcagatgcagctccaggggctcgacttatagccagttacagctccccggctcttctgtgtggcagagcgtcgtttccgggccctcagggctggggagctcagttcccattgcttgtgctcagggctgagtcttaaagaagggtttgccggccctaacgctgcagcgcgtgcgcggtgagaggccctttttgagcctgtttactcctgtggccttgggcagaacagtaaatactctgtgcacggaggaaagacatgcccaagaggaaggaagtactgaccatcggctgcctgtgagcagcttagcaaggagcccttgctccctgggaaaggcggtgaacttgagtctaaagatgcagtgcctggcccttcctaaggtccctgcctggcatccgagtgtcggtgtgtggcacagaaggctcctgcttgcttccaaagtgatggacaggaaggggcagagtgagtcacggcccagactgggcaccttcgcgtctcagcctcagggagccccacagccccaagctcgctgaggcaacgtgagaacaggctatgggaaggctgcaaaggctgagaaatgcaaaggctcatatttataaatcccacccccagagtggggagggtcaggtgccagacctggactaaactgcaccaaggaaacacccagcagggtctcctgtgagccggggaccatgcagcccgaaacctccagtcactgcgcccggcaggagtcaggagccagggactgtgcagcctggaacctccagtcactgtgcccagcagggtgggctgtgcccagcaggagtcaggctaagaaacgccaggtctgcctgttcttgctgggcaatggctgatggctgccagtttctgctgatacacaggtaggatgggacccttcatgaatatctgactttaataagttggtaaggatatatttttttgtctatgttctgtttcaacttatgtagattattataaattgatgtaaaccacgtgagaggaaaatgttaataaaaaatgcaaagccccatcatttgcac

SEQ ID NO: 104185 - DNA, 466 bp, Homo sapiens
  Payload ID: 472
  Gene Symbol: ABR
  Gene Name: active BCR-related
  ENST ID: ENST00000627795
  CDS Start-End: 78-466
acttcagctacgggacggacgagtacgacggagaggggaatgaggagcagaaggggcccccggagggctcagagaccatgccgtacatcgatgagtcgcccaccatgtccccgcagctcagcgcccgcagccagggcgggggggatggcgtctccccgactccacctgagggactggctcctggggtggaagcagggaaaggcctggagatgaggaagctggttctctcggggttcttggccagcgaagagatctacattaaccagctggaagccctgttgctgcccatgaaacccctgaaggccaccgccaccacctcccagcccgtgctcaccatccagcagatcgagaccatcttctacaagatccaggacatctatgagatccacaaggagttctatgacaacctgtgccccaaggtgcaacagtgggacagccaggtcaccatgggccacctcttccagaa

SEQ ID NO: 104186 - DNA, 760 bp, Homo sapiens
  Payload ID: 472
  Gene Symbol: ABR
  Gene Name: active BCR-related
  ENST ID: ENST00000627424
  CDS Start-End: 264-760
agctacaaacgtgctcctctttaggatgccagcaggctgctggctccctccctccctacccctcctccccttccccttccctcctctcctcgccacgcgcctccctcccctcccccttgctggaagagcactccggagcggctgcccgatgctggagtccgtgcggcagcatcagcaaggtggctgagtggccgggctgctggtgggcgccggggagcctggagcgatggctgcacgctcccgccgcggggacagaggctgccatggagattctcctcattattcgcttctgctgtaactgcacctatggtaacccagctctgctctacaagcccattgaccgggtcactcggagcaccctagtcctacacgacctgctgaagcacacacctgtggaccaccccgactacccgctgctgcaggatgccctccgcatctcccagaacttcctgtccagcatcaacgaggacatcgacccccgccggactgcagtgacaacgcccaagggggagacgcgacagctggtgaaggacggcttcctggtggaagtgtcagagagctcccggaagctgcggcacgtcttcctctttacagatgtcctactgtgtgccaagctgaagaagacctctgcagggaagcaccagcagtatgactgtaagtggtacatccccctggccgacctggtgtttccatcccccgaggaatctgaggccagcccccaggtgcaccccttcccagaccatgagctggaggacatgaa

SEQ ID NO: 104187 - DNA, 566 bp, Homo sapiens
  Payload ID: 472
  Gene Symbol: ABR
  Gene Name: active BCR-related
  ENST ID: ENST00000626570
  CDS Start-End: 1-566
gaagacctctgcagggaagcaccagcagtatgactgtaagtggtacatccccctggccgacctggtgtttccatcccccgaggaatctgaggccagcccccaggtgcaccccttcccagaccatgagctggaggacatgaagatgaagatctctgccctcaagagtgaaatccagaaggagaaagccaacaaaggccagagccgggccatcgagcgcctgaagaagaagatgtttgagaatgagttcctgctgctgctcaactcccccacaatcccgttcaggatccacaatcggaatggaaagagttacctgttcctactgtcctcggactacgagaggtcagagtggagagaagcaattcagaaactacagaagaaggatctccaggcctttgtcctgagctcagtggagctccaggtgctcacaggatcctgtttcaagcttaggactgtacacaacattcctgtcaccagcaataaagacgacctgtactgtaccctggaggtggattccttcggctattttgtcagcaaagccaaaaccagggtgttccgggacacagcgg

SEQ ID NO: 104188 - DNA, 151 bp, Homo sapiens
  Payload ID: 472
  Gene Symbol: ABR
  Gene Name: active BCR-related
  ENST ID: ENST00000630524
  CDS Start-End: 1-151
gtggaagcagggaaaggcctggagatgaggaagctggttctctcggggttcttggccagcgaagagatctacattaaccagctggaagccctgttgctgcccatgaaacccctgaaggccaccgccaccacctcccagcccgtgctcacca

SEQ ID NO: 104189 - DNA, 850 bp, Homo sapiens; identical to SEQ ID NO: 104176
  Payload ID: 472
  Gene Symbol: ABR
  Gene Name: active BCR-related
  ENST ID: ENST00000625562
  CDS Start-End: 1-575

SEQ ID NO: 104190 - DNA, 281 bp, Homo sapiens
  Payload ID: 472
  Gene Symbol: ABR
  Gene Name: active BCR-related
  ENST ID: ENST00000630420
  CDS Start-End: 1-281
gtggaagcagggaaaggcctggagatgaggaagctggttctctcggggttcttggccagcgaagagatctacattaaccagctggaagccctgttgctgcccatgaaacccctgaaggccaccgccaccacctcccagcccgtgctcaccatccagcagatcgagaccatcttctacaagatccaggacatctatgagatccacaaggagttctatgacaacctgtgccccaaggtgcaacagtgggacagccaggtcaccatgggccacctcttccagaa

SEQ ID NO: 104191 - DNA, 477 bp, Homo sapiens
  Payload ID: 472
  Gene Symbol: ABR
  Gene Name: active BCR-related
  ENST ID: ENST00000630943
  CDS Start-End: 78-477
acttcagctacgggacggacgagtacgacggagaggggaatgaggagcagaaggggcccccggagggctcagagaccatgccgtacatcgatgagtcgcccaccatgtccccgcagctcagcgcccgcagccagggcgggggggatggcgtctccccgactccacctgagggactggctcctgggcccatgaaacccctgaaggccaccgccaccacctcccagcccgtgctcaccatccagcagatcgagaccatcttctacaagatccaggacatctatgagatccacaaggagttctatgacaacctgtgccccaaggtgcaacagtgggacagccaggtcaccatgggccacctcttccagaagctggccagccagctcggtgtgtacaaagcgtttgtcgataactataaagtcgctctggagacagctgagaagtgcagccagtccaacaaccagttccagaagatctcag

SEQ ID NO: 104192 - DNA, 3196 bp, Homo sapiens
  Payload ID: 472
  Gene Symbol: ABR
  Gene Name: active BCR-related
  Uniprot ID: Q12979
  ENST ID: ENST00000627258
  CDS Start-End: 466-2907
ataaaaagcaaaatggtgactcagagaggagagttggaagcgtcctgcctcttgctcccactgttaatttttacacttggaattaggcagaaggcaaagaaaacagcagcttgaaatacgcggctgacatgctcttcatcgggtagcaacagcagagccgctcctccccgcctcccagcagccccggagcgggcagggcccggtgcctgctggctctcccccgcccctcaccaggcccaggcccccgcacagcccccgcccgggccaggcgtggatggtgcggccggggccatggctgccgggggccgccgccggcgcccactacgctaccagtccctggcagctctggtggaggattctcagtggcctttcttgttccttgtctcagacttcagctacgggacggacgagtacgacggagaggggaatgaggagcagaaggggcccccggagggctcagagaccatgccgtacatcgatgagtcgcccaccatgtccccgcagctcagcgcccgcagccagggcgggggggatggcgtctccccgactccacctgagggactggctcctggggtggaagcagggaaaggcctggagatgaggaagctggttctctcggggttcttggccagcgaagagatctacattaaccagctggaagccctgttgctgcccatgaaacccctgaaggccaccgccaccacctcccagcccgtgctcaccatccagcagatcgagaccatcttctacaagatccaggacatctatgagatccacaaggagttctatgacaacctgtgccccaaggtgcaacagtgggacagccaggtcaccatgggccacctcttccagaagctggccagccagctcggtgtgtacaaagcgtttgtcgataactataaagtcgctctggagacagctgagaagtgcagccagtccaacaaccagttccagaagatctcagaggaactcaaagtgaaaggtcccaaggactccaaggacagccacacgtctgtcaccatggaagctctgctctacaagcccattgaccgggtcactcggagcaccctagtcctacacgacctgctgaagcacacacctgtggaccaccccgactacccgctgctgcaggatgccctccgcatctcccagaacttcctgtccagcatcaacgaggacatcgacccccgccggactgcagtgacaacgcccaagggggagacgcgacagctggtgaaggacggcttcctggtggaagtgtcagagagctcccggaagctgcggcacgtcttcctctttacagatgtcctactgtgtgccaagctgaagaagacctctgcagggaagcaccagcagtatgactgtaagtggtacatccccctggccgacctggtgtttccatcccccgaggaatctgaggccagcccccaggtgcaccccttcccagaccatgagctggaggacatgaagatgaagatctctgccctcaagagtgaaatccagaaggagaaagccaacaaaggccagagccgggccatcgagcgcctgaagaagaagatgtttgagaatgagttcctgctgctgctcaactcccccacaatcccgttcaggatccacaatcggaatggaaagagttacctgttcctactgtcctcggactacgagaggtcagagtggagagaagcaattcagaaactacagaagaaggatctccaggcctttgtcctgagctcagtggagctccaggtgctcacaggatcctgtttcaagcttaggactgtacacaacattcctgtcaccagcaataaagacgacgatgagtctccaggactctatggcttccttcatgtcatcgtccactctgccaagggatttaagcaatcagccaacctgtactgtaccctggaggtggattccttcggctattttgtcagcaaagccaaaaccagggtgttccgggacacagcggagcccaagtgggatgaggagtttgagatcgagctggagggctcccagtccctgaggatcctgtgctatgagaagtgctatgacaagaccaaggtcaacaaggacaacaatgagatcgtggacaagatcatgggcaaaggacagatccagctggacccacaaaccgtggagaccaagaactggcacacggacgtgattgagatgaacgggatcaaagtggaattttccatgaaattcaccagccgagatatgagcctgaagaggaccccgtccaaaaagcagaccggcgtcttcggtgtgaagatcagcgtggtgacgaagcgggagcgctccaaggtgccctacatcgtccggcagtgtgtggaggaggtggagaagaggggtatcgaggaggttggcatctacaggatatcgggcgtggccacggacatccaggcgctcaaggccgtcttcgatgccaataacaaggacatcctgctgatgctgagtgacatggacatcaacgccatcgccgggacgctcaagctgtacttccgggaactgcccgagccgctcctcacggaccgactctacccagccttcatggagggcatcgccctgtcagaccctgctgccaaggaaaactgcatgatgcacctgctccgctccctgcccgaccccaacctcatcaccttcctcttcctgctggaacacttgaaaagggttgccgagaaggagcccatcaacaaaatgtcacttcacaacctggctaccgtgtttggacccacgttactgagaccctcagaagtggagagcaaagcacacctcacctcggctgcggacatctggtcccatgacgtcatggcgcaggtccaggtcctcctctactacctgcagcacccccccatttccttcgcagaactcaagcggaacacactgtacttctccaccgacgtgtagcccgaggcagggtggctgcgggcgggtggtggaaccagcccctccagcctggggtccaactcagacttgaaagactgcaatagaaaactcccaaacccagcactccagactcgagggaagccagcttccaagaactggaatgcgtacgtcttttgtgccaccttgtacaaagccggctgcccagccccagcctcaccaccgcatcccacctcctgccctccatacctctagttgtgtctgatgctccgtgctgttcgggaattgttttatgtacacttgtcaggcagaa

SEQ ID NO: 104193 - DNA, 690 bp, Homo sapiens; identical to SEQ ID NO: 104171
  Payload ID: 472
  Gene Symbol: ABR
  Gene Name: active BCR-related
  ENST ID: ENST00000628370
  CDS Start-End: 186-690

SEQ ID NO: 104194 - DNA, 2673 bp, Homo sapiens; identical to SEQ ID NO: 104182
  Payload ID: 472
  Gene Symbol: ABR
  Gene Name: active BCR-related
  Uniprot ID: Q12979
  ENST ID: ENST00000625740
  CDS Start-End: 33-2501

SEQ ID NO: 104195 - DNA, 690 bp, Homo sapiens; identical to SEQ ID NO: 104171
  Payload ID: 472
  Gene Symbol: ABR
  Gene Name: active BCR-related
  ENST ID: ENST00000628817
  CDS Start-End: 186-690

SEQ ID NO: 104196 - DNA, 557 bp, Homo sapiens
  Payload ID: 472
  Gene Symbol: ABR
  Gene Name: active BCR-related
  ENST ID: ENST00000628400
  CDS Start-End: 1-63
gagaccaagaactggcacacggacgtgattgagatgaacggggtgagccggggatgggaatgatcagtggcgtgagccgggaggtggaacgtctgtgcagcagatcaaagtggaattttccatgaaattcaccagccgagatatgagcctgaagaggaccccgtccaaaaagcagaccggcgtcttcggtgtgaagatcagcgtggtgacgaagcgggagcgctccaaggtgccctacatcgtccggcagtgtgtggaggaggtggagaagaggggtatcgaggaggttggcatctacaggatatcgggcgtggccacggacatccaggcgctcaaggccgtcttcgatgccaataacaaggacatcctgctgatgctgagtgacatggacatcaacgccatcgccgggacgctcaagctgtacttccgggaactgcccgagccgctcctcacggaccgactctacccagccttcatggagggcatcgccctgtcagaccctgctgccaaggaaaactgcatgatgcacctgctccgctccctgcccgaccccaacc

SEQ ID NO: 104197 - DNA, 563 bp, Homo sapiens; identical to SEQ ID NO: 104169
  Payload ID: 472
  Gene Symbol: ABR
  Gene Name: active BCR-related
  ENST ID: ENST00000627848
  CDS Start-End: 62-523

SEQ ID NO: 104198 - DNA, 292 bp, Homo sapiens
  Payload ID: 472
  Gene Symbol: ABR
  Gene Name: active BCR-related
  ENST ID: ENST00000629473
  CDS Start-End: 1-292
cccatgaaacccctgaaggccaccgccaccacctcccagcccgtgctcaccatccagcagatcgagaccatcttctacaagatccaggacatctatgagatccacaaggagttctatgacaacctgtgccccaaggtgcaacagtgggacagccaggtcaccatgggccacctcttccagaagctggccagccagctcggtgtgtacaaagcgtttgtcgataactataaagtcgctctggagacagctgagaagtgcagccagtccaacaaccagttccagaagatctcag

SEQ ID NO: 104199 - DNA, 597 bp, Homo sapiens; identical to SEQ ID NO: 104168
  Payload ID: 472
  Gene Symbol: ABR
  Gene Name: active BCR-related
  ENST ID: ENST00000627499
  CDS Start-End: 339-597

SEQ ID NO: 104200 - DNA, 2623 bp, Homo sapiens
  Payload ID: 472
  Gene Symbol: ABR
  Gene Name: active BCR-related
  ENST ID: ENST00000631205
  CDS Start-End: 1-2334
gtggaagcagggaaaggcctggagatgaggaagctggttctctcggggttcttggccagcgaagagatctacattaaccagctggaagccctgttgctgcccatgaaacccctgaaggccaccgccaccacctcccagcccgtgctcaccatccagcagatcgagaccatcttctacaagatccaggacatctatgagatccacaaggagttctatgacaacctgtgccccaaggtgcaacagtgggacagccaggtcaccatgggccacctcttccagaagctggccagccagctcggtgtgtacaaagcgtttgtcgataactataaagtcgctctggagacagctgagaagtgcagccagtccaacaaccagttccagaagatctcagaggaactcaaagtgaaaggtcccaaggactccaaggacagccacacgtctgtcaccatggaagctctgctctacaagcccattgaccgggtcactcggagcaccctagtcctacacgacctgctgaagcacacacctgtggaccaccccgactacccgctgctgcaggatgccctccgcatctcccagaacttcctgtccagcatcaacgaggacatcgacccccgccggactgcagtgacaacgcccaagggggagacgcgacagctggtgaaggacggcttcctggtggaagtgtcagagagctcccggaagctgcggcacgtcttcctctttacagatgtcctactgtgtgccaagctgaagaagacctctgcagggaagcaccagcagtatgactgtaagtggtacatccccctggccgacctggtgtttccatcccccgaggaatctgaggccagcccccaggtgcaccccttcccagaccatgagctggaggacatgaagatgaagatctctgccctcaagagtgaaatccagaaggagaaagccaacaaaggccagagccgggccatcgagcgcctgaagaagaagatgtttgagaatgagttcctgctgctgctcaactcccccacaatcccgttcaggatccacaatcggaatggaaagagttacctgttcctactgtcctcggactacgagaggtcagagtggagagaagcaattcagaaactacagaagaaggatctccaggcctttgtcctgagctcagtggagctccaggtgctcacaggatcctgtttcaagcttaggactgtacacaacattcctgtcaccagcaataaagacgacgatgagtctccaggactctatggcttccttcatgtcatcgtccactctgccaagggatttaagcaatcagccaacctgtactgtaccctggaggtggattccttcggctattttgtcagcaaagccaaaaccagggtgttccgggacacagcggagcccaagtgggatgaggagtttgagatcgagctggagggctcccagtccctgaggatcctgtgctatgagaagtgctatgacaagaccaaggtcaacaaggacaacaatgagatcgtggacaagatcatgggcaaaggacagatccagctggacccacaaaccgtggagaccaagaactggcacacggacgtgattgagatgaacgggatcaaagtggaattttccatgaaattcaccagccgagatatgagcctgaagaggaccccgtccaaaaagcagaccggcgtcttcggtgtgaagatcagcgtggtgacgaagcgggagcgctccaaggtgccctacatcgtccggcagtgtgtggaggaggtggagaagaggggtatcgaggaggttggcatctacaggatatcgggcgtggccacggacatccaggcgctcaaggccgtcttcgatgccaataacaaggacatcctgctgatgctgagtgacatggacatcaacgccatcgccgggacgctcaagctgtacttccgggaactgcccgagccgctcctcacggaccgactctacccagccttcatggagggcatcgccctgtcagaccctgctgccaaggaaaactgcatgatgcacctgctccgctccctgcccgaccccaacctcatcaccttcctcttcctgctggaacacttgaaaagggttgccgagaaggagcccatcaacaaaatgtcacttcacaacctggctaccgtgtttggacccacgttactgagaccctcagaagtggagagcaaagcacacctcacctcggctgcggacatctggtcccatgacgtcatggcgcaggtccaggtcctcctctactacctgcagcacccccccatttccttcgcagaactcaagcggaacacactgtacttctccaccgacgtgtagcccgaggcagggtggctgcgggcgggtggtggaaccagcccctccagcctggggtccaactcagacttgaaagactgcaatagaaaactcccaaacccagcactccagactcgagggaagccagcttccaagaactggaatgcgtacgtcttttgtgccaccttgtacaaagccggctgcccagccccagcctcaccaccgcatcccacctcctgccctccatacctctagttgtgtctgatgctccgtgctgttcgggaattgttttatgtacacttgtcaggcagaa

SEQ ID NO: 104201 - DNA, 637 bp, Homo sapiens; identical to SEQ ID NO: 104172
  Payload ID: 472
  Gene Symbol: ABR
  Gene Name: active BCR-related
  ENST ID: ENST00000629906
  CDS Start-End: 1-353

SEQ ID NO: 104202 - DNA, 158 bp, Homo sapiens
  Payload ID: 472
  Gene Symbol: ABR
  Gene Name: active BCR-related
  ENST ID: ENST00000625685
  CDS Start-End: 1-158
gtggaagcagggaaaggcctggagatgaggaagctggttctctcggggttcttggccagcgaagagatctacattaaccagctggaagccctgttgctgcccatgaaacccctgaaggccaccgccaccacctcccagcccgtgctcaccatccagca

SEQ ID NO: 104203 - DNA, 563 bp, Homo sapiens; identical to SEQ ID NO: 104169
  Payload ID: 472
  Gene Symbol: ABR
  Gene Name: active BCR-related
  ENST ID: ENST00000626654
  CDS Start-End: 62-523

SEQ ID NO: 104204 - DNA, 760 bp, Homo sapiens; identical to SEQ ID NO: 104186
  Payload ID: 472
  Gene Symbol: ABR
  Gene Name: active BCR-related
  ENST ID: ENST00000630582
  CDS Start-End: 264-760

SEQ ID NO: 104205 - DNA, 618 bp, Homo sapiens
  Payload ID: 472
  Gene Symbol: ABR
  Gene Name: active BCR-related
  ENST ID: ENST00000575770
  CDS Start-End: 1-150
ggaaagagttacctgttcctactgtcctcggactacgagaggtcagagtggagagaagcaattcagaaactacagaagaagggtaaattcctgcctcttccacgctccccaatgatgtccgtggcattgatgggccttttgtatttctaagcgtttcatgtccagtatcacgtctttggccctcgcagtcaccctcagaggtgccaggatctccaggcctttgtcctgagctcagtggagctccaggtgctcacaggatcctgtttcaagcttaggactgtacacaacattcctgtcaccagcaataaagacgacgatgagtctccaggactctatggcttccttcatgtcatcgtccactctgccaagggatttaagcaatcagccaacctgtactgtaccctggaggtggattccttcggctattttgtcagcaaagccaaaaccagggtgttccgggacacagcggagcccaagtgggatgaggagtttgagatcgagctggagggctcccagtccctgaggatcctgtgctatgagaagtgctatgacaagaccaaggtcaacaaggacaacaatgagatcgtggacaagatcatgggcaaaggacagatccag

SEQ ID NO: 104206 - DNA, 2502 bp, Homo sapiens; identical to SEQ ID NO: 104179
  Payload ID: 472
  Gene Symbol: ABR
  Gene Name: active BCR-related
  ENST ID: ENST00000631260
  CDS Start-End: 288-2213

SEQ ID NO: 104207 - DNA, 549 bp, Homo sapiens; identical to SEQ ID NO: 104170
  Payload ID: 472
  Gene Symbol: ABR
  Gene Name: active BCR-related
  ENST ID: ENST00000627242
  CDS Start-End: 284-549

SEQ ID NO: 104208 - DNA, 850 bp, Homo sapiens; identical to SEQ ID NO: 104176
  Payload ID: 472
  Gene Symbol: ABR
  Gene Name: active BCR-related
  ENST ID: ENST00000627102
  CDS Start-End: 1-575

SEQ ID NO: 104209 - DNA, 637 bp, Homo sapiens; identical to SEQ ID NO: 104172
  Payload ID: 472
  Gene Symbol: ABR
  Gene Name: active BCR-related
  ENST ID: ENST00000628588
  CDS Start-End: 1-353

SEQ ID NO: 104210 - DNA, 557 bp, Homo sapiens; identical to SEQ ID NO: 104196
  Payload ID: 472
  Gene Symbol: ABR
  Gene Name: active BCR-related
  ENST ID: ENST00000630902
  CDS Start-End: 1-63

SEQ ID NO: 104211 - DNA, 618 bp, Homo sapiens
  Payload ID: 472
  Gene Symbol: ABR
  Gene Name: active BCR-related
  ENST ID: ENST00000631336
  CDS Start-End: 1-150
ggaaagagttacctgttcctactgtcctcggactacgagaggtcagagtggagagaagcaattcagaaactacagaagaagggtaaattcctgcctcttccacgctccccaatgatgtccgtggcattgatgggccttttgtttttctaagcgtttcatgtccagtatcacgtctttggccctcgcagtcaccctcagaggtgccaggatctccaggcctttgtcctgagctcagtggagctccaggtgctcacaggatcctgtttcaagcttaggactgtacacaacattcctgtcaccagcaataaagacgacgatgagtctccaggactctatggcttccttcatgtcatcgtccactctgccaagggatttaagcaatcagccaacctgtactgtaccctggaggtggattccttcggctattttgtcagcaaagccaaaaccagggtgttccgggacacagcggagcccaagtgggatgaggagtttgagatcgagctggagggctcccagtccctgaggatcctgtgctatgagaagtgctatgacaagaccaaggtcaacaaggacaacaatgagatcgtggacaagatcatgggcaaaggacagatccag

SEQ ID NO: 104212 - DNA, 1971 bp, Homo sapiens
  Payload ID: 473
  Gene Symbol: ACVRL1
  Gene Name: activin A receptor type II-like 1
  Uniprot ID: P37023
  ENST ID: ENST00000388922
  CDS Start-End: 284-1795
aggaaacggtttattaggagggagtggtggagctgggccaggcaggaagacgctggaataagaaacatttttgctccagcccccatcccagtcccgggaggctgccgcgccagctgcgccgagcgagcccctccccggctccagcccggtccggggccgcgcccggaccccagcccgccgtccagcgctggcggtgcaactgcggccgcgcggtggaggggaggtggccccggtccgccgaaggctagcgccccgccacccgcagagcgggcccagagggaccatgaccttgggctcccccaggaaaggccttctgatgctgctgatggccttggtgacccagggagaccctgtgaagccgtctcggggcccgctggtgacctgcacgtgtgagagcccacattgcaaggggcctacctgccggggggcctggtgcacagtagtgctggtgcgggaggaggggaggcacccccaggaacatcggggctgcgggaacttgcacagggagctctgcagggggcgccccaccgagttcgtcaaccactactgctgcgacagccacctctgcaaccacaacgtgtccctggtgctggaggccacccaacctccttcggagcagccgggaacagatggccagctggccctgatcctgggccccgtgctggccttgctggccctggtggccctgggtgtcctgggcctgtggcatgtccgacggaggcaggagaagcagcgtggcctgcacagcgagctgggagagtccagtctcatcctgaaagcatctgagcagggcgacagcatgttgggggacctcctggacagtgactgcaccacagggagtggctcagggctccccttcctggtgcagaggacagtggcacggcaggttgccttggtggagtgtgtgggaaaaggccgctatggcgaagtgtggcggggcttgtggcacggtgagagtgtggccgtcaagatcttctcctcgagggatgaacagtcctggttccgggagactgagatctataacacagtgttgctcagacacgacaacatcctaggcttcatcgcctcagacatgacctcccgcaactcgagcacgcagctgtggctcatcacgcactaccacgagcacggctccctctacgactttctgcagagacagacgctggagccccatctggctctgaggctagctgtgtccgcggcatgcggcctggcgcacctgcacgtggagatcttcggtacacagggcaaaccagccattgcccaccgcgacttcaagagccgcaatgtgctggtcaagagcaacctgcagtgttgcatcgccgacctgggcctggctgtgatgcactcacagggcagcgattacctggacatcggcaacaacccgagagtgggcaccaagcggtacatggcacccgaggtgctggacgagcagatccgcacggactgctttgagtcctacaagtggactgacatctgggcctttggcctggtgctgtgggagattgcccgccggaccatcgtgaatggcatcgtggaggactatagaccacccttctatgatgtggtgcccaatgaccccagctttgaggacatgaagaaggtggtgtgtgtggatcagcagacccccaccatccctaaccggctggctgcagacccggtcctctcaggcctagctcagatgatgcgggagtgctggtacccaaacccctctgcccgactcaccgcgctgcggatcaagaagacactacaaaaaattagcaacagtccagagaagcctaaagtgattcaatagcccaggagcacctgattcctttctgcctgcagggggctgggggggtggggggcagtggatggtgccctatctgggtagaggtagtgtgagtgtggtgtgtgctggggatgggcagctgcgcctgcctgctcggcccccagcccacccagccaaaaatacagctgggctgaaacctg

SEQ ID NO: 104213 - DNA, 1356 bp, Homo sapiens
  Payload ID: 473
  Gene Symbol: ACVRL1
  Gene Name: activin A receptor type II-like 1
  ENST ID: ENST00000419526
  CDS Start-End: 63-1052
aaaaaaaactctgtgatttcctctgggcaggagggagccacggccagcggctgtcacacttcatggctcttactccacctctcttgctcctctctgcagggaccatgaccttgggctcccccaggaaaggccttctgatgctgctgatggccttggtgacccagggaaaaggccgctatggcgaagtgtggcggggcttgtggcacggtgagagtgtggccgtcaagatcttctcctcgagggatgaacagtcctggttccgggagactgagatctataacacagtgttgctcagacacgacaacatcctaggcttcatcgcctcagacatgacctcccgcaactcgagcacgcagctgtggctcatcacgcactaccacgagcacggctccctctacgactttctgcagagacagacgctggagccccatctggctctgaggctagctgtgtccgcggcatgcggcctggcgcacctgcacgtggagatcttcggtacacagggcaaaccagccattgcccaccgcgacttcaagagccgcaatgtgctggtcaagagcaacctgcagtgttgcatcgccgacctgggcctggctgtgatgcactcacagggcagcgattacctggacatcggcaacaacccgagagtgggcaccaagcggtacatggcacccgaggtgctggacgagcagatccgcacggactgctttgagtcctacaagtggactgacatctgggcctttggcctggtgctgtgggagattgcccgccggaccatcgtgaatggcatcgtggaggactatagaccacccttctatgatgtggtgcccaatgaccccagctttgaggacatgaagaaggtggtgtgtgtggatcagcagacccccaccatccctaaccggctggctgcagacccggtcctctcaggcctagctcagatgatgcgggagtgctggtacccaaacccctctgcccgactcaccgcgctgcggatcaagaagacactacaaaaaattagcaacagtccagagaagcctaaagtgattcaatagcccaggagcacctgattcctttctgcctgcagggggctgggggggtggggggcagtggatggtgccctatctgggtagaggtagtgtgagtgtggtgtgtgctggggatgggcagctgcgcctgcctgctcggcccccagcccacccagccaaaaatacagctgggctgaaacctgatcccctgctgtctggcctgctcaaagcggcaggctccctgacgcctggctctctccccacccctatggccagcatggtgcaccccctaccactcccgggacaggatgcaaaagaggctccagagtca

SEQ ID NO: 104214 - DNA, 582 bp, Homo sapiens
  Payload ID: 473
  Gene Symbol: ACVRL1
  Gene Name: activin A receptor type II-like 1
  ENST ID: ENST00000547400
  CDS Start-End: 105-582
aggcggcagggagtagggaggcggcctccctgcctcccctccaaaaaaaactctgtgatttcctctgggcaggagggagccacggccagcggctgtcacacttcatggctcttactccacctctcttgctcctctctgcagggaccatgaccttgggctcccccaggaaaggccttctgatgctgctgatggccttggtgacccagggagaccctgtgaagccgtctcggggcccgctggtgacctgcacgtgtgagagcccacattgcaaggggcctacctgccggggggcctggtgcacagtagtgctggtgcgggaggaggggaggcacccccaggaacatcggggctgcgggaacttgcacagggagctctgcagggggcgccccaccgagttcgtcaaccactactgctgcgacagccacctctgcaaccacaacgtgtccctggtgctggagggaaaaggccgctatggcgaagtgtggcggggcttgtggcacggtgagagtgtggccgtcaagatcttctcctcgagggatgaacagtcctggttccgggagactgagatctataacacagtgt

SEQ ID NO: 104215 - DNA, 4121 bp, Homo sapiens
  Payload ID: 473
  Gene Symbol: ACVRL1
  Gene Name: activin A receptor type II-like 1
  ENST ID: ENST00000550683
  CDS Start-End: 102-1655
cggcagggagtagggaggcggcctccctgcctcccctccaaaaaaaactctgtgatttcctctgggcaggagggagccacggccagcggctgtcacacttcatggctcttactccacctctcttgctcctctctgcagggaccatgaccttgggctcccccaggaaaggccttctgatgctgctgatggccttggtgacccagggagaccctgtgaagccgtctcggggcccgctggtgacctgcacgtgtgagagcccacattgcaaggggcctacctgccggggggcctggtgcacagtagtgctggtgcgggaggaggggaggcacccccaggaacatcggggctgcgggaacttgcacagggagctctgcagggggcgccccaccgagttcgtcaaccactactgctgcgacagccacctctgcaaccacaacgtgtccctggtgctggaggccacccaacctccttcggagcagccgggaacagatggccagctggccctgatcctgggccccgtgctggccttgctggccctggtggccctgggtgtcctgggcctgtggcatgtccgacggaggcaggagaagcagcgtggcctgcacagcgagctgggagagtccagtctcatcctgaaagcatctgagcagggcgacagcatgttgggggacctcctggacagtgactgcaccacagggagtggctcagggctccccttcctggtgcagaggacagtggcacggcaggttgccttggtggagtgtgtgggaaaaggccgctatggcgaagtgtggcggggcttgtggcacggtgagagtgtggccgtcaagatcttctcctcgagggatgaacagtcctggttccgggagactgagatctataacacagtgttgctcagacacgacaacatcctaggcttcatcgcctcagacatgacctcccgcaactcgagcacgcagctgtggctcatcacgcactaccacgagcacggctccctctacgactttctgcagagacagacgctggagccccatctggctctgaggctagctgtgtccgcggcatgcggcctggcgcacctgcacgtggagatcttcggtacacagggcaaaccagccattgcccaccgcgacttcaagagccgcaatgtgctggtcaagagcaacctgcagtgttgcatcgccgacctgggcctggctgtgatgcactcacagggcagcgattacctggacatcggcaacaacccgagagtgggcaccaagcggtacatggcacccgaggtgctggacgagcagatccgcacggactgctttgagtcctacaagtggactgacatctgggcctttggcctggtgctgtgggagattgcccgccggaccatcgtgaatggcatcgtggaggactatagaccacccttctatgatgtggtgcccaatgaccccagctttgaggacatgaagaaggtggtgtgtgtggatcagcagacccccaccatccctaaccggctggctgcagacccggtcctctcaggcctagctcagatgatgcgggagtgctggtacccaaacccctctgcccgactcaccgcgctgcggatcaagaagacactacaaaaaattagcaacagtccagagaagcctaaagtgattcaatagcccaggagcacctgattcctttctgcctgcagggggctgggggggtggggggcagtggatggtgccctatctgggtagaggtagtgtgagtgtggtgtgtgctggggatgggcagctgcgcctgcctgctcggcccccagcccacccagccaaaaatacagctgggctgaaacctgatcccctgctgtctggcctgctcaaagcggcaggctccctgacgcctggctctctccccacccctatggccagcatggtgcaccccctaccactcccgggacaggatgcaaaagaggctccagagtcagagtgccaagccagggaatcccagtcccagactcagagcccgggcctgcactttgccccctgcccttgatcaaccccactgccccaccagagctgccagggtggcacagggccctgtccagcccctggcacacacttccctgccaggcctcagcctctagcataagctccagagagccagggcccatcagtttctctctgtggatttgtatctcagctccatgatgccttgggctttctgtctcctcaacaagagtgcagcttgctgaatgtcagctgcctgagagagctggggcctgacttactagggcattaaatcctaagaggtcctactgaggtgtggcaggatcacaggccagtggaaaaagggcaggtcagatgggcaaggcccaggactttcagattaactgagaggatatcgaggccaagcatggcagggggaaggtcagtgggtgtcaagagacccaggtctgaccccggatgtttgctccatgtgacaaaagcaggcctgtctcaggaccttttcttttcttttttccttctttttttttttgacacggagtttcgctcttgttgtccaggctagagtgcaatggcatgatcccagctcaccgcaacgtctacctcccaggttcaaatcattctcttgcctcagactcccgagtagctgggattacaggcacatgccaccatgcctggctaattttgtatatttagtagaaacagggtttcaccatgctggccatgctggtctcgaactcctgacctcaggtgttccacctacctcagcctcccaaagtgctggggttacaggtgtgagccatcgcgcctggccaggacctttgtttcttatctacatattggaagatttggtcctgatgtcctttgaggcttctttagctctagttctctgacacttcagcctatatcacagctaacttcttcagtctcatctattccttatgctccagcccctggcaatttgcctcaagatgggggtttgaaaataactttacctgactcaaggagtgtctggagcacctcctagtctaagtctgcaagctccagttcttgcctaaaaccatgccagtggccacccttgggctcagacagctctgggccttttgaccacaagccagcccctcgccctctctgtggcatagtcttctctgccccaggactgcagggcggcttcctccaaggcttccaaggctcaaaagaaatttggctccatccaagaaggctccagctcccctactggcccctggctcaggcccacacccctggccaggcccagagagtgtgtctcaggagaattcaatggctctagagagacacacagaaagtttggcatttggaaatttcaaggatgtatgtatgctcacgtatggagcaggttgtcctggtccctgggtgcagggaagtgggctgcagggaagtggattggaggggagcttgaggaatataaggagcgggggtggagactcaggctatggacaaggacagccccaaggttgggaagacctggccttagtcgtcctcagcctaggggcagggcagtgaagaaagctctccccgctcctgctgtaatgacccagagtagcctccccaggccggcatcttatgtgtgtcttccaccatcctcatggtggcacttttctaggcctgtctcccagcattgtgcaaggctcggaagagaaccaggaagtgaaactgggtgaaaacagaaagctcaatggatgggctaggttcccagatcattagggcagagtttgcacgtcctctggtcactggaatccacccagcccacgaatcatctccctcttgaaggattttatttctactgggttttggaacaaactcctgctgagaccccacagccagaaactgaaagcagcagctccccaaagcctggaaaatccctaagagaaggcctggggcaggaagtggagtgacaggggacaggtagagagaagggggcccaatggccagggagtgaaggaggtggcgttgctgagagcagtctgcacatgcttctgtctgagtgcaggaaggtgttccagggtcgaaattacacttctcgtacctggagacgctgtttgtgggagcactgggctcatgcctggcacacaataggtctgcaataaaccatggttaaatcct

SEQ ID NO: 104216 - DNA, 557 bp, Homo sapiens
  Payload ID: 473
  Gene Symbol: ACVRL1
  Gene Name: activin A receptor type II-like 1
  ENST ID: ENST00000551576
  CDS Start-End: 291-557
aaaacgcatctggattttgctagccccaaactctgccctcattgctgcaagcctcctagaccgaggacccccgggctgagggtgggcccccatcccagtcccgggaggctgccgcgccagctgcgccgagcgagcccctccccggctccagcccggtccggggccgcgcccggaccccagcccgccgtccagcgctggcggtgcaactgcggccgcgcggtggaggggaggtggccccggtccgccgaaggctagcgccccgccacccgcagagcgggcccagagggaccatgaccttgggctcccccaggaaaggccttctgatgctgctgatggccttggtgacccagggagaccctgtgaagccgtctcggggcccgctggtgacctgcacgtgtgagagcccacattgcaaggggcctacctgccggggggcctggtgcacagtagtgctggtgcgggaggaggggaggcacccccaggaacatcggggctgcgggaacttgcacagggagctctgcagggggcgccccaccgagttcgtcaaccactactgc

SEQ ID NO: 104217 - DNA, 609 bp, Homo sapiens
  Payload ID: 473
  Gene Symbol: ACVRL1
  Gene Name: activin A receptor type II-like 1
  ENST ID: ENST00000552678
  CDS Start-End: 1-490
gagccgcaatgtgctggtcaagagcaacctgcagtgttgcatcgccgacctgggcctggctgtgatgcactcacagggcagcgattacctggacatcggcaacaacccgagagtgggcaccaagcggtacatggcacccgaggtgctggacgagcagatccgcacggactgctttgagtcctacaagtggactgacatctgggcctttggcctggtgctgtgggagattgcccgccggaccatcgtgaatggcatcgtggaggactatagaccacccttctatgatgtggtgcccaatgaccccagctttgaggacatgaagaaggtggtgtgtgtggatcagcagacccccaccatccctaaccggctggctgcagacccggtgaggcctctgctgggactaggatggcgtggggtggtggctcatggctgggatttctgggcccaggaacttgtgtctgaggcctctgcttcatctcatagatactgagtgtcctggttagggcacctctctaggtactccctctttcaaccctggcccatgctccctgcccccagggccatctggtcattctgggattttaagaaccttcaccttccctgtgaaaa

SEQ ID NO: 104218 - DNA, 3047 bp, Homo sapiens
  Payload ID: 474
  Gene Symbol: ACVR1
  Gene Name: activin A receptor, type I
  Uniprot ID: Q04771
  ENST ID: ENST00000263640
  CDS Start-End: 431-1960
gaagagatgtgggcctctggggccgctggattcagtaacttccgtcgggttctagactggctcggctctgtccagtttgtgccagatagtctcccaccccctccccacccctcctttcccctggagatttgaacgctgcttgcatgggagaaaagctacttagagaagaaaacgttccacttagtaacagaagaaaagtcttggttaaaaagttgtcatgaatttggcttttggagagaggcagcaagcctggagcattggtaagcgtcacactgccaaagtgagagctgctggagaactcataatcccaggaacgcctcttctactctccgagtaccccagtgaccagagtgagagaagctctgaacgagggcacgcggcttgaaggactgtgggcagatgtgaccaagagcctgcattaagttgtacaatggtagatggagtgatgattcttcctgtgcttatcatgattgctctcccctcccctagtatggaagatgagaagcccaaggtcaaccccaaactctacatgtgtgtgtgtgaaggtctctcctgcggtaatgaggaccactgtgaaggccagcagtgcttttcctcactgagcatcaacgatggcttccacgtctaccagaaaggctgcttccaggtttatgagcagggaaagatgacctgtaagaccccgccgtcccctggccaagccgtggagtgctgccaaggggactggtgtaacaggaacatcacggcccagctgcccactaaaggaaaatccttccctggaacacagaatttccacttggaggttggcctcattattctctctgtagtgttcgcagtatgtcttttagcctgcctgctgggagttgctctccgaaaatttaaaaggcgcaaccaagaacgcctcaatccccgagacgtggagtatggcactatcgaagggctcatcaccaccaatgttggagacagcactttagcagatttattggatcattcgtgtacatcaggaagtggctctggtcttccttttctggtacaaagaacagtggctcgccagattacactgttggagtgtgtcgggaaaggcaggtatggtgaggtgtggaggggcagctggcaaggggagaatgttgccgtgaagatcttctcctcccgtgatgagaagtcatggttcagggaaacggaattgtacaacactgtgatgctgaggcatgaaaatatcttaggtttcattgcttcagacatgacatcaagacactccagtacccagctgtggttaattacacattatcatgaaatgggatcgttgtacgactatcttcagcttactactctggatacagttagctgccttcgaatagtgctgtccatagctagtggtcttgcacatttgcacatagagatatttgggacccaagggaaaccagccattgcccatcgagatttaaagagcaaaaatattctggttaagaagaatggacagtgttgcatagcagatttgggcctggcagtcatgcattcccagagcaccaatcagcttgatgtggggaacaatccccgtgtgggcaccaagcgctacatggcccccgaagttctagatgaaaccatccaggtggattgtttcgattcttataaaagggtcgatatttgggcctttggacttgttttgtgggaagtggccaggcggatggtgagcaatggtatagtggaggattacaagccaccgttctacgatgtggttcccaatgacccaagttttgaagatatgaggaaggtagtctgtgtggatcaacaaaggccaaacatacccaacagatggttctcagacccgacattaacctctctggccaagctaatgaaagaatgctggtatcaaaatccatccgcaagactcacagcactgcgtatcaaaaagactttgaccaaaattgataattccctcgacaaattgaaaactgactgttgacattttcatagtgtcaagaaggaagatttgacgttgttgtcattgtccagctgggacctaatgctggcctgactggttgtcagaatggaatccatctgtctccctccccaaatggctgctttgacaaggcagacgtcgtacccagccatgtgttggggagacatcaaaaccaccctaacctcgctcgatgactgtgaactgggcatttcacgaactgttcacactgcagagactaatgttggacagacactgttgcaaaggtagggactggaggaacacagagaaatcctaaaagagatctgggcattaagtcagtggctttgcatagctttcacaagtctcctagacactccccacgggaaactcaaggaggtggtgaatttttaatcagcaatattgcctgtgcttctcttctttattgcactaggaattctttgcattccttacttgcactgttactcttaattttaaagacccaacttgccaaaatgttggctgcgtactccactggtctgtctttggataataggaattcaatttggcaaaacaaaatgtaatgtcagactttgctgcattttacacatgtgctgatgtttacaatgatgccgaacattaggaattgtttatacacaactttgcaaattatttattacttgtgcacttagtagtttttacaaaactgctttgtgcatatgttaaagcttatttttatgtggtcttatgattttattacagaaatgtttttaacactatactctaaaatggacattttcttttattatcagttaaaatcacattttaagtgcttcacatttgtatgtgtgtagactgtaactttttttcagttcatatgcagaacgtatttagccattacccacgtgacaccaccgaatatattactgatttagaagcaaagatttcagtagaattttagtcctgaacgctacggggaaaatgcattttcttcagaattatccattacgtgcatttaaactctgccagaaaaaaataactattttgttttaatctactttttgtatttagtagttatttgtataaattaaataaactgttttcaagtcaaaca

SEQ ID NO: 104219 - DNA, 2084 bp, Homo sapiens
  Payload ID: 474
  Gene Symbol: ACVR1
  Gene Name: activin A receptor, type I
  Uniprot ID: Q04771
  ENST ID: ENST00000410057
  CDS Start-End: 340-1869
gaagcgaatagcgtttcagagatattgggcggctcaagggtcttactctgtcgcccagtctgtaatgcagtgctgtgaccatagcccactgcagcctccacctcccaggctcaagcagtccttcccccctcgccctcatgaatagctgggactacagcctggagcattggtaagcgtcacactgccaaagtgagagctgctggagaactcataatcccaggaacgcctcttctactctccgagtaccccagtgaccagagtgagagaagctctgaacgagggcacgcggcttgaaggactgtgggcagatgtgaccaagagcctgcattaagttgtacaatggtagatggagtgatgattcttcctgtgcttatcatgattgctctcccctcccctagtatggaagatgagaagcccaaggtcaaccccaaactctacatgtgtgtgtgtgaaggtctctcctgcggtaatgaggaccactgtgaaggccagcagtgcttttcctcactgagcatcaacgatggcttccacgtctaccagaaaggctgcttccaggtttatgagcagggaaagatgacctgtaagaccccgccgtcccctggccaagccgtggagtgctgccaaggggactggtgtaacaggaacatcacggcccagctgcccactaaaggaaaatccttccctggaacacagaatttccacttggaggttggcctcattattctctctgtagtgttcgcagtatgtcttttagcctgcctgctgggagttgctctccgaaaatttaaaaggcgcaaccaagaacgcctcaatccccgagacgtggagtatggcactatcgaagggctcatcaccaccaatgttggagacagcactttagcagatttattggatcattcgtgtacatcaggaagtggctctggtcttccttttctggtacaaagaacagtggctcgccagattacactgttggagtgtgtcgggaaaggcaggtatggtgaggtgtggaggggcagctggcaaggggagaatgttgccgtgaagatcttctcctcccgtgatgagaagtcatggttcagggaaacggaattgtacaacactgtgatgctgaggcatgaaaatatcttaggtttcattgcttcagacatgacatcaagacactccagtacccagctgtggttaattacacattatcatgaaatgggatcgttgtacgactatcttcagcttactactctggatacagttagctgccttcgaatagtgctgtccatagctagtggtcttgcacatttgcacatagagatatttgggacccaagggaaaccagccattgcccatcgagatttaaagagcaaaaatattctggttaagaagaatggacagtgttgcatagcagatttgggcctggcagtcatgcattcccagagcaccaatcagcttgatgtggggaacaatccccgtgtgggcaccaagcgctacatggcccccgaagttctagatgaaaccatccaggtggattgtttcgattcttataaaagggtcgatatttgggcctttggacttgttttgtgggaagtggccaggcggatggtgagcaatggtatagtggaggattacaagccaccgttctacgatgtggttcccaatgacccaagttttgaagatatgaggaaggtagtctgtgtggatcaacaaaggccaaacatacccaacagatggttctcagacccgacattaacctctctggccaagctaatgaaagaatgctggtatcaaaatccatccgcaagactcacagcactgcgtatcaaaaagactttgaccaaaattgataattccctcgacaaattgaaaactgactgttgacattttcatagtgtcaagaaggaagatttgacgttgttgtcattgtccagctgggacctaatgctggcctgactggttgtcagaatggaatccatctgtctccctccccaaatggctgctttgacaaggcagacgtcgtacccagccatgtgttggggagacatcaaaaccaccctaacctcgctcgatgactgtgaactgggcatttcacgaac

SEQ ID NO: 104220 - DNA, 2879 bp, Homo sapiens
  Payload ID: 474
  Gene Symbol: ACVR1
  Gene Name: activin A receptor, type I
  Uniprot ID: Q04771
  ENST ID: ENST00000409283
  CDS Start-End: 268-1797
gataaacggatccagggcctggttttcagttctataggacttgtccaagaagctatttgtattcatctatcatgaaagatcaaattacatgctaatattctgaaagtaacaccccgccagaaaccctccagcagcagtgaagtctatataaaaccaagccttggcaatttgcacattgccagttccgacagagtgtggtgttaaaaatatttaacaggtcatttttgaaccgtagaaaagaccctgacttaacttacatgttgtacaatggtagatggagtgatgattcttcctgtgcttatcatgattgctctcccctcccctagtatggaagatgagaagcccaaggtcaaccccaaactctacatgtgtgtgtgtgaaggtctctcctgcggtaatgaggaccactgtgaaggccagcagtgcttttcctcactgagcatcaacgatggcttccacgtctaccagaaaggctgcttccaggtttatgagcagggaaagatgacctgtaagaccccgccgtcccctggccaagccgtggagtgctgccaaggggactggtgtaacaggaacatcacggcccagctgcccactaaaggaaaatccttccctggaacacagaatttccacttggaggttggcctcattattctctctgtagtgttcgcagtatgtcttttagcctgcctgctgggagttgctctccgaaaatttaaaaggcgcaaccaagaacgcctcaatccccgagacgtggagtatggcactatcgaagggctcatcaccaccaatgttggagacagcactttagcagatttattggatcattcgtgtacatcaggaagtggctctggtcttccttttctggtacaaagaacagtggctcgccagattacactgttggagtgtgtcgggaaaggcaggtatggtgaggtgtggaggggcagctggcaaggggagaatgttgccgtgaagatcttctcctcccgtgatgagaagtcatggttcagggaaacggaattgtacaacactgtgatgctgaggcatgaaaatatcttaggtttcattgcttcagacatgacatcaagacactccagtacccagctgtggttaattacacattatcatgaaatgggatcgttgtacgactatcttcagcttactactctggatacagttagctgccttcgaatagtgctgtccatagctagtggtcttgcacatttgcacatagagatatttgggacccaagggaaaccagccattgcccatcgagatttaaagagcaaaaatattctggttaagaagaatggacagtgttgcatagcagatttgggcctggcagtcatgcattcccagagcaccaatcagcttgatgtggggaacaatccccgtgtgggcaccaagcgctacatggcccccgaagttctagatgaaaccatccaggtggattgtttcgattcttataaaagggtcgatatttgggcctttggacttgttttgtgggaagtggccaggcggatggtgagcaatggtatagtggaggattacaagccaccgttctacgatgtggttcccaatgacccaagttttgaagatatgaggaaggtagtctgtgtggatcaacaaaggccaaacatacccaacagatggttctcagacccgacattaacctctctggccaagctaatgaaagaatgctggtatcaaaatccatccgcaagactcacagcactgcgtatcaaaaagactttgaccaaaattgataattccctcgacaaattgaaaactgactgttgacattttcatagtgtcaagaaggaagatttgacgttgttgtcattgtccagctgggacctaatgctggcctgactggttgtcagaatggaatccatctgtctccctccccaaatggctgctttgacaaggcagacgtcgtacccagccatgtgttggggagacatcaaaaccaccctaacctcgctcgatgactgtgaactgggcatttcacgaactgttcacactgcagagactaatgttggacagacactgttgcaaaggtagggactggaggaacacagagaaatcctaaaagagatctgggcattaagtcagtggctttgcatagctttcacaagtctcctagacactccccacgggaaactcaaggaggtggtgaatttttaatcagcaatattgcctgtgcttctcttctttattgcactaggaattctttgcattccttacttgcactgttactcttaattttaaagacccaacttgccaaaatgttggctgcgtactccactggtctgtctttggataataggaattcaatttggcaaaacaaaatgtaatgtcagactttgctgcattttacacatgtgctgatgtttacaatgatgccgaacattaggaattgtttatacacaactttgcaaattatttattacttgtgcacttagtagtttttacaaaactgctttgtgcatatgttaaagcttatttttatgtggtcttatgattttattacagaaatgtttttaacactatactctaaaatggacattttcttttattatcagttaaaatcacattttaagtgcttcacatttgtatgtgtgtagactgtaactttttttcagttcatatgcagaacgtatttagccattacccacgtgacaccaccgaatatattactgatttagaagcaaagatttcagtagaattttagtcctgaacgctacggggaaaatgcattttcttcagaattatccattacgtgcatttaaactctgccagaaaaaaataactattttgttttaatctactttttgtatttagtagttatttgtataaattaaataaactgttttcaagtc

SEQ ID NO: 104221 - DNA, 536 bp, Homo sapiens
  Payload ID: 474
  Gene Symbol: ACVR1
  Gene Name: activin A receptor, type I
  ENST ID: ENST00000413751
  CDS Start-End: 472-536
actccgcctcccccggctcagcccccggccgcggcgggacccgaggtgggctcagccttctttccttcaattcctgtttcagtctcattttcatggactggtccccaaacttgtctgcattggaagcacctggggagtttctagacctgagcctgtgcccacctcatgagggtcttactctgtcgcccagtctgtaatgcagtgctgtgaccatagcccactgcagcctccacctcccaggctcaagcagtccttcccccctcgccctcatgaatagctgggactacagcctggagcattggtaagcgtcacactgccaaagtgagagctgctggagaactcataatcccaggaacgcctcttctactctccgagtaccccagtgaccagagtgagagaagctctgaacgagggcacgcggcttgaaggactgtgggcagatgtgaccaagagcctgcattaagttgtacaatggtagatggagtgatgattcttcctgtgcttatcatgattgctctcccctcccctagtatgga

SEQ ID NO: 104222 - DNA, 550 bp, Homo sapiens
  Payload ID: 474
  Gene Symbol: ACVR1
  Gene Name: activin A receptor, type I
  ENST ID: ENST00000424669
  CDS Start-End: 337-550
ctgcagcgcccggctgcctcgcactccgcctcccccggctcagcccccggccgcggcgggacccgagagtttcgctcttgttgtccaggctggagtggaatggcgtgatctcggctcaccgtgatctcggctcaccgtaacctccgcctctcagcctggagcattggtaagcgtcacactgccaaagtgagagctgctggagaactcataatcccaggaacgcctcttctactctccgagtaccccagtgaccagagtgagagaagctctgaacgagggcacgcggcttgaaggactgtgggcagatgtgaccaagagcctgcattaagttgtacaatggtagatggagtgatgattcttcctgtgcttatcatgattgctctcccctcccctagtatggaagatgagaagcccaaggtcaaccccaaactctacatgtgtgtgtgtgaaggtctctcctgcggtaatgaggaccactgtgaaggccagcagtgcttttcctcactgagcatcaacgatggcttccacgtctaccagaaaggctgcttcc

SEQ ID NO: 104223 - DNA, 534 bp, Homo sapiens
  Payload ID: 474
  Gene Symbol: ACVR1
  Gene Name: activin A receptor, type I
  ENST ID: ENST00000440523
  CDS Start-End: 275-534
gcagccgcggaacaaaactgtcttgctttgggcctgaactgctggtgggatatggggggtgggggggcagaggcgtggagcgggggtctcagcctggagcattggtaagcgtcacactgccaaagtgagagctgctggagaactcataatcccaggaacgcctcttctactctccgagtaccccagtgaccagagtgagagaagctctgaacgagggcacgcggcttgaaggactgtgggcagatgtgaccaagagcctgcattaagttgtacaatggtagatggagtgatgattcttcctgtgcttatcatgattgctctcccctcccctagtatggaagatgagaagcccaaggtcaaccccaaactctacatgtgtgtgtgtgaaggtctctcctgcggtaatgaggaccactgtgaaggccagcagtgcttttcctcactgagcatcaacgatggcttccacgtctaccagaaaggctgcttccaggtttatgagcagggaaagatgacctgtaagaccccgccgtcccc

SEQ ID NO: 104224 - DNA, 531 bp, Homo sapiens
  Payload ID: 474
  Gene Symbol: ACVR1
  Gene Name: activin A receptor, type I
  ENST ID: ENST00000412025
  CDS Start-End: 270-531
ggtctatcggaagtttaaagcaatgcagcgggaagtaccttgcctttttgaagcgaatagcgtttcagagatattgggcggctcaagcctggagcattggtaagcgtcacactgccaaagtgagagctgctggagaactcataatcccaggaacgcctcttctactctccgagtaccccagtgaccagagtgagagaagctctgaacgagggcacgcggcttgaaggactgtgggcagatgtgaccaagagcctgcattaagttgtacaatggtagatggagtgatgattcttcctgtgcttatcatgattgctctcccctcccctagtatggaagatgagaagcccaaggtcaaccccaaactctacatgtgtgtgtgtgaaggtctctcctgcggtaatgaggaccactgtgaaggccagcagtgcttttcctcactgagcatcaacgatggcttccacgtctaccagaaaggctgcttccaggtttatgagcagggaaagatgacctgtaagaccccgccgtcccctg

SEQ ID NO: 104225 - DNA, 2861 bp, Homo sapiens
  Payload ID: 474
  Gene Symbol: ACVR1
  Gene Name: activin A receptor, type I
  Uniprot ID: Q04771
  ENST ID: ENST00000434821
  CDS Start-End: 250-1779
ctgcagcgcccggctgcctcgcactccgcctcccccggctcagcccccggccgcggcgggacccgagcctggagcattggtaagcgtcacactgccaaagtgagagctgctggagaactcataatcccaggaacgcctcttctactctccgagtaccccagtgaccagagtgagagaagctctgaacgagggcacgcggcttgaaggactgtgggcagatgtgaccaagagcctgcattaagttgtacaatggtagatggagtgatgattcttcctgtgcttatcatgattgctctcccctcccctagtatggaagatgagaagcccaaggtcaaccccaaactctacatgtgtgtgtgtgaaggtctctcctgcggtaatgaggaccactgtgaaggccagcagtgcttttcctcactgagcatcaacgatggcttccacgtctaccagaaaggctgcttccaggtttatgagcagggaaagatgacctgtaagaccccgccgtcccctggccaagccgtggagtgctgccaaggggactggtgtaacaggaacatcacggcccagctgcccactaaaggaaaatccttccctggaacacagaatttccacttggaggttggcctcattattctctctgtagtgttcgcagtatgtcttttagcctgcctgctgggagttgctctccgaaaatttaaaaggcgcaaccaagaacgcctcaatccccgagacgtggagtatggcactatcgaagggctcatcaccaccaatgttggagacagcactttagcagatttattggatcattcgtgtacatcaggaagtggctctggtcttccttttctggtacaaagaacagtggctcgccagattacactgttggagtgtgtcgggaaaggcaggtatggtgaggtgtggaggggcagctggcaaggggagaatgttgccgtgaagatcttctcctcccgtgatgagaagtcatggttcagggaaacggaattgtacaacactgtgatgctgaggcatgaaaatatcttaggtttcattgcttcagacatgacatcaagacactccagtacccagctgtggttaattacacattatcatgaaatgggatcgttgtacgactatcttcagcttactactctggatacagttagctgccttcgaatagtgctgtccatagctagtggtcttgcacatttgcacatagagatatttgggacccaagggaaaccagccattgcccatcgagatttaaagagcaaaaatattctggttaagaagaatggacagtgttgcatagcagatttgggcctggcagtcatgcattcccagagcaccaatcagcttgatgtggggaacaatccccgtgtgggcaccaagcgctacatggcccccgaagttctagatgaaaccatccaggtggattgtttcgattcttataaaagggtcgatatttgggcctttggacttgttttgtgggaagtggccaggcggatggtgagcaatggtatagtggaggattacaagccaccgttctacgatgtggttcccaatgacccaagttttgaagatatgaggaaggtagtctgtgtggatcaacaaaggccaaacatacccaacagatggttctcagacccgacattaacctctctggccaagctaatgaaagaatgctggtatcaaaatccatccgcaagactcacagcactgcgtatcaaaaagactttgaccaaaattgataattccctcgacaaattgaaaactgactgttgacattttcatagtgtcaagaaggaagatttgacgttgttgtcattgtccagctgggacctaatgctggcctgactggttgtcagaatggaatccatctgtctccctccccaaatggctgctttgacaaggcagacgtcgtacccagccatgtgttggggagacatcaaaaccaccctaacctcgctcgatgactgtgaactgggcatttcacgaactgttcacactgcagagactaatgttggacagacactgttgcaaaggtagggactggaggaacacagagaaatcctaaaagagatctgggcattaagtcagtggctttgcatagctttcacaagtctcctagacactccccacgggaaactcaaggaggtggtgaatttttaatcagcaatattgcctgtgcttctcttctttattgcactaggaattctttgcattccttacttgcactgttactcttaattttaaagacccaacttgccaaaatgttggctgcgtactccactggtctgtctttggataataggaattcaatttggcaaaacaaaatgtaatgtcagactttgctgcattttacacatgtgctgatgtttacaatgatgccgaacattaggaattgtttatacacaactttgcaaattatttattacttgtgcacttagtagtttttacaaaactgctttgtgcatatgttaaagcttatttttatgtggtcttatgattttattacagaaatgtttttaacactatactctaaaatggacattttcttttattatcagttaaaatcacattttaagtgcttcacatttgtatgtgtgtagactgtaactttttttcagttcatatgcagaacgtatttagccattacccacgtgacaccaccgaatatattactgatttagaagcaaagatttcagtagaattttagtcctgaacgctacggggaaaatgcattttcttcagaattatccattacgtgcatttaaactctgccagaaaaaaataactattttgttttaatctactttttgtatttagtagttatttgtataaattaaataaactgttttcaagtc

SEQ ID NO: 104226 - DNA, 564 bp, Homo sapiens
  Payload ID: 474
  Gene Symbol: ACVR1
  Gene Name: activin A receptor, type I
  ENST ID: ENST00000539637
  CDS Start-End: 347-564
actccgcctcccccggctcagcccccggccgcggcgggacccgagggtcttactctgtcgcccagtctgtaatgcagtgctgtgaccatagcccactgcagcctccacctcccaggctcaagcagtccttcccccctcgccctcatgaatagctgggactacagcctggagcattggtaagcgtcacactgccaaagtgagagctgctggagaactcataatcccaggaacgcctcttctactctccgagtaccccagtgaccagagtgagagaagctctgaacgagggcacgcggcttgaaggactgtgggcagatgtgaccaagagcctgcattaagttgtacaatggtagatggagtgatgattcttcctgtgcttatcatgattgctctcccctcccctagtatggaagatgagaagcccaaggtcaaccccaaactctacatgtgtgtgtgtgaaggtctctcctgcggtaatgaggaccactgtgaaggccagcagtgcttttcctcactgagcatcaacgatggcttccacgtctaccagaaaggctgcttccaggt

SEQ ID NO: 104227 - DNA, 4563 bp, Homo sapiens
  Payload ID: 475
  Gene Symbol: ACVR1B
  Gene Name: activin A receptor, type IB
  Uniprot ID: P36896
  ENST ID: ENST00000257963
  CDS Start-End: 78-1595
ggggaggcgccgggggcgcgcgcgcgcgcgctgggcgctgctgggctgcggcggcggcggcggcggcggtggttactatggcggagtcggccggagcctcctccttcttcccccttgttgtcctcctgctcgccggcagcggcgggtccgggccccggggggtccaggctctgctgtgtgcgtgcaccagctgcctccaggccaactacacgtgtgagacagatggggcctgcatggtttccattttcaatctggatgggatggagcaccatgtgcgcacctgcatccccaaagtggagctggtccctgccgggaagcccttctactgcctgagctcggaggacctgcgcaacacccactgctgctacactgactactgcaacaggatcgacttgagggtgcccagtggtcacctcaaggagcctgagcacccgtccatgtggggcccggtggagctggtaggcatcatcgccggcccggtgttcctcctgttcctcatcatcatcattgttttccttgtcattaactatcatcagcgtgtctatcacaaccgccagagactggacatggaagatccctcatgtgagatgtgtctctccaaagacaagacgctccaggatcttgtctacgatctctccacctcagggtctggctcagggttacccctctttgtccagcgcacagtggcccgaaccatcgttttacaagagattattggcaagggtcggtttggggaagtatggcggggccgctggaggggtggtgatgtggctgtgaaaatattctcttctcgtgaagaacggtcttggttcagggaagcagagatataccagacggtcatgctgcgccatgaaaacatccttggatttattgctgctgacaataaagataatggcacctggacacagctgtggcttgtttctgactatcatgagcacgggtccctgtttgattatctgaaccggtacacagtgacaattgaggggatgattaagctggccttgtctgctgctagtgggctggcacacctgcacatggagatcgtgggcacccaagggaagcctggaattgctcatcgagacttaaagtcaaagaacattctggtgaagaaaaatggcatgtgtgccatagcagacctgggcctggctgtccgtcatgatgcagtcactgacaccattgacattgccccgaatcagagggtggggaccaaacgatacatggcccctgaagtacttgatgaaaccattaatatgaaacactttgactcctttaaatgtgctgatatttatgccctcgggcttgtatattgggagattgctcgaagatgcaattctggaggagtccatgaagaatatcagctgccatattacgacttagtgccctctgacccttccattgaggaaatgcgaaaggttgtatgtgatcagaagctgcgtcccaacatccccaactggtggcagagttatgaggcactgcgggtgatggggaagatgatgcgagagtgttggtatgccaacggcgcagcccgcctgacggccctgcgcatcaagaagaccctctcccagctcagcgtgcaggaagacgtgaagatctaactgctccctctctccacacggagctcctggcagcgagaactacgcacagctgccgcgttgagcgtacgatggaggcctacctctcgtttctgcccagccctctgtggccaggagccctggcccgcaagagggacagagcccgggagagactcgctcactcccatgttgggtttgagacagacaccttttctatttacctcctaatggcatggagactctgagagcgaattgtgtggagaactcagtgccacacctcgaactggttgtagtgggaagtcccgcgaaacccggtgcatctggcacgtggccaggagccatgacaggggcgcttgggaggggccggaggaaccgaggtgttgccagtgctaagctgccctgagggtttccttcggggaccagcccacagcacaccaaggtggcccggaagaaccagaagtgcagcccctctcacaggcagctctgagccgcgctttcccctcctccctgggatggacgctgccgggagactgccagtggagacggaatctgccgctttgtctgtccagccgtgtgtgcatgtgccgaggtgcgtcccccgttgtgcctggttcgtgccatgcccttacacgtgcgtgtgagtgtgtgtgtgtgtctgtaggtgcgcacttacctgcttgagctttctgtgcatgtgcaggtcgggggtgtggtcgtcatgctgtccgtgcttgctggtgcctcttttcagtagtgagcagcatctagtttccctggtgcccttccctggaggtctctccctcccccagagcccctcatgccacagtggtactctgtgtctggcaggctactctgcccaccccagcatcagcacagctctcctcctccatctcagactgtggaaccaaagctggcccagttgtccatgacaaaagaggcttttgggccaaaatgtgagggtggtgggtgggatgggcagggaaggaatcctggtggaagtcttgggtgttagtgtcagccatgggaaatgagccagcccaagggcatcatcctcagcagcatcgaggaagggccgaggaatgtgaagccagatctcgggactcagattggaatgttacatctgtctttcatctcccagatcctggaaacagcagtgtatatttttggtggtggtgggtttggggtggggaagggaagggcgggcaaggagtggggagggagtctggggtgggagggaggcatctgcatgggtcttcttttactggactgtctgatcagggtggagggaaggtgagaggtttgcatccacttcaggagccctactgaagggaacagcctgagccgaacatgttatttaacctgagtatagtatttaacgaagcctagaagcacggctgtgggtggtgatttggtcagcatatcttaggtatataataactttgaagccataacttttaactggagtggtttgatttctttttttaattttattgggagggtttggattttaactttttttaatgttgttaaatattaagtttttgtaaaaggaaaaccatctctgtgattacctctcaatctatttgtttttaaagaaatccctaaaaaaaaaaattatccaattgaacgcacatagctcaatcacactggaaatgtttgtccttgcacctgagcctgttcccactcagcagtgagagttcctctttgccctgaggctcagtctctctcgtattttgtccccacccccaattccttgagtggtttttgctctagggccctttcttgcactgtccagctggttgtaccctctccaggcatttattcaacaaatgtgggtgaagtgcctgctgggtgccaggtgctgggaatacatctgtggacaagacatgcttgggtcctactcctggagcactgtaaaaagagctgattcaagtaagtagatgcctgttttgagaccagaaggtttcataattggttctacgacccttttgagcctagaattattgttcttatataagatcactgaagaaagaggaacccccacaaccccctccacaaagagaccaggggcgggtgatgagacctggggtttagaaccccaggtgagacctcaaatcactgcattcattctgagcccccttcctgtccccaggggaggtgtattgtgtatgtagccttagagcatctctgcctccaacccagcagttctctgccaaagcttgtggaggagggagagccctgtccctgccctcaggctccccagtgctcctggcccttctatttatttgactgattattgcttctttccttgcattaaaggagatcttcccctaacctttgggccaatttactggccactaatttcgtttaaataccattgtgtcattggggggaccgtctttacccctgctgacctcccacctatccgccctgcagcagaaccttggcggtttataggtaatgatggaacttagactcctcttcccagagtcacaagtagcctctgggatctgccaacacacgtccactcccaagccactagcccactccccagttggcccttctgcccttaccccacacacagtccaactcttccacctctggggaagatggagcaggtctttgggaagctcccacacccacctctgccactcttaacactaagtgagagttggggagaaactgaagccgtgtttttggccccccgaggctaaccctgatccatagtgctacctgcacctctggattctggattcacagaccaagtccaagcccgttcttacgtcgccataaaggcccccgaacggcattctcggtacttctgtttgtttttgtacattttattagaaaggactgtaaaatagccacttagacactttacctcttcagtatgcaaatgtaaataaattgtaatataggaaatcttttgttttaatataagaatgagcctgtccaatttctgctgtacattattaaaagttttattcacaga

SEQ ID NO: 104228 - DNA, 1782 bp, Homo sapiens
  Payload ID: 475
  Gene Symbol: ACVR1B
  Gene Name: activin A receptor, type IB
  Uniprot ID: P36896
  ENST ID: ENST00000426655
  CDS Start-End: 43-1473
cgctgctgggctgcggcggcggcggcggcggcggtggttactatggcggagtcggccggagcctcctccttcttcccccttgttgtcctcctgctcgccggcagcggcgggtccgggccccggggggtccaggctctgctgtgtgcgtgcaccagctgcctccaggccaactacacgtgtgagacagatggggcctgcatggtttccattttcaatctggatgggatggagcaccatgtgcgcacctgcatccccaaagtggagctggtccctgccgggaagcccttctactgcctgagctcggaggacctgcgcaacacccactgctgctacactgactactgcaacaggatcgacttgagggtgcccagtggtcacctcaaggagcctgagcacccgtccatgtggggcccggtggagctggtaggcatcatcgccggcccggtgttcctcctgttcctcatcatcatcattgttttccttgtcattaactatcatcagcgtgtctatcacaaccgccagagactggacatggaagatccctcatgtgagatgtgtctctccaaagacaagacgctccaggatcttgtctacgatctctccacctcagggtctggctcagggttacccctctttgtccagcgcacagtggcccgaaccatcgttttacaagagattattggcaagggtcggtttggggaagtatggcggggccgctggaggggtggtgatgtggctgtgaaaatattctcttctcgtgaagaacggtcttggttcagggaagcagagatataccagacggtcatgctgcgccatgaaaacatccttggatttattgctgctgacaataaagataatggcacctggacacagctgtggcttgtttctgactatcatgagcacgggtccctgtttgattatctgaaccggtacacagtgacaattgaggggatgattaagctggccttgtctgctgctagtgggctggcacacctgcacatggagatcgtgggcacccaagggaagcctggaattgctcatcgagacttaaagtcaaagaacattctggtgaagaaaaatggcatgtgtgccatagcagacctgggcctggctgtccgtcatgatgcagtcactgacaccattgacattgccccgaatcagagggtggggaccaaacgatacatggcccctgaagtacttgatgaaaccattaatatgaaacactttgactcctttaaatgtgctgatatttatgccctcgggcttgtatattgggagattgctcgaagatgcaattctggaggagtccatgaagaatatcagctgccatattacgacttagtgccctctgacccttccattgaggaaatgcgaaaggttgtatgtgatcagaagctgcgtcccaacatccccaactggtggcagagttatgaggtaagaagctggcctcctgcggctttcccatcagcctgatttctccaccttagaaaagggtttcttgacaatggggtcaggccccagaggagccccctgagagtgtcagttattatttactattacgtgctattttacatatcccaagccctttagggctacagtctcttgtcctggaccctgtagggtgccatttggagttcacagcctagaagaagaaaaggctttgggcctggtgtggtggcataggcctgtaatcgtagcgctttgagaggctgaggcaggaagatagcttgagctcagaagttcgagacaaacctgggcaatgtggggagaccccatctctac

SEQ ID NO: 104229 - DNA, 1665 bp, Homo sapiens
  Payload ID: 475
  Gene Symbol: ACVR1B
  Gene Name: activin A receptor, type IB
  Uniprot ID: P36896
  ENST ID: ENST00000415850
  CDS Start-End: 1-1464
atggcggagtcggccggagcctcctccttcttcccccttgttgtcctcctgctcgccggcagcggcgggtccgggccccggggggtccaggctctgctgtgtgcgtgcaccagctgcctccaggccaactacacgtgtgagacagatggggcctgcatggtttccattttcaatctggatgggatggagcaccatgtgcgcacctgcatccccaaagtggagctggtccctgccgggaagcccttctactgcctgagctcggaggacctgcgcaacacccactgctgctacactgactactgcaacaggatcgacttgagggtgcccagtggtcacctcaaggagcctgagcacccgtccatgtggggcccggtggagctggtaggcatcatcgccggcccggtgttcctcctgttcctcatcatcatcattgttttccttgtcattaactatcatcagcgtgtctatcacaaccgccagagactggacatggaagatccctcatgtgagatgtgtctctccaaagacaagacgctccaggatcttgtctacgatctctccacctcagggtctggctcagggttacccctctttgtccagcgcacagtggcccgaaccatcgttttacaagagattattggcaagggtcggtttggggaagtatggcggggccgctggaggggtggtgatgtggctgtgaaaatattctcttctcgtgaagaacggtcttggttcagggaagcagagatataccagacggtcatgctgcgccatgaaaacatccttggatttattgctgctgacaataaagataatggcacctggacacagctgtggcttgtttctgactatcatgagcacgggtccctgtttgattatctgaaccggtacacagtgacaattgaggggatgattaagctggccttgtctgctgctagtgggctggcacacctgcacatggagatcgtgggcacccaagggaagcctggaattgctcatcgagacttaaagtcaaagaacattctggtgaagaaaaatggcatgtgtgccatagcagacctgggcctggctgtccgtcatgatgcagtcactgacaccattgacattgccccgaatcagagggtggggaccaaacgatacatggcccctgaagtacttgatgaaaccattaatatgaaacactttgactcctttaaatgtgctgatatttatgccctcgggcttgtatattgggagattgctcgaagatgcaattctggaggtacctttcttttttgcctttgctcctacctcccattccaggatgctggatcacccaaagctgttttactgccccctttctttttacaacctgttggatgcctgttgccagagcctgaatcatcgtttaaggttgccatcaaaggtgtggaggtagctgtgcttagggtgcgtttattcttcagggatcagtttgttgaatagcgttgtgtgttatggtaaccattctgaaggctcgtttggctttataaacaaacaaacattgttttattagtccgtggcggggagtgccccggtgcgcatagcacgggattcatgcagtggtctccttcacatcagaagcagtatattctaacgcggtggctcccaagccacattcatgggaaaccctgctgtttcattgtt

SEQ ID NO: 104230 - DNA, 1791 bp, Homo sapiens
  Payload ID: 475
  Gene Symbol: ACVR1B
  Gene Name: activin A receptor, type IB
  Uniprot ID: P36896
  ENST ID: ENST00000541224
  CDS Start-End: 44-1684
gcgctgctgggctgcggcggcggcggcggcggcggtggttactatggcggagtcggccggagcctcctccttcttcccccttgttgtcctcctgctcgccggcagcggcgggtccgggccccggggggtccaggctctgctgtgtgcgtgcaccagctgcctccaggccaactacacgtgtgagacagatggggcctgcatggtttccattttcaatctggatgggatggagcaccatgtgcgcacctgcatccccaaagtggagctggtccctgccgggaagcccttctactgcctgagctcggaggacctgcgcaacacccactgctgctacactgactactgcaacaggatcgacttgagggtgcccagtggtcacctcaaggagcctgagcacccgtccatgtggggcccggtggagctggtaggcatcatcgccggcccggtgttcctcctgttcctcatcatcatcattgttttccttgtcattaactatcatcagcgtgtctatcacaaccgccagagactggacatggaagatccctcatgtgagatgtgtctctccaaagacaagacgctccaggatcttgtctacgatctctccacctcagggtctggctcagggttacccctctttgtccagcgcacagtggcccgaaccatcgttttacaagagattattggcaagggtcggtttggggaagtatggcggggccgctggaggggtggtgatgtggctgtgaaaatattctcttctcgtgaagaacggtcttggttcagggaagcagagatataccagacggtcatgctgcgccatgaaaacatccttggatttattgctgctgacaataaagcagactgctcattcctcacattgccatgggaagttgtaatggtctctgctgcccccaagctgaggagccttagactccaatacaagggaggaaggggaagagcaagatttttattcccactgaataatggcacctggacacagctgtggcttgtttctgactatcatgagcacgggtccctgtttgattatctgaaccggtacacagtgacaattgaggggatgattaagctggccttgtctgctgctagtgggctggcacacctgcacatggagatcgtgggcacccaagggaagcctggaattgctcatcgagacttaaagtcaaagaacattctggtgaagaaaaatggcatgtgtgccatagcagacctgggcctggctgtccgtcatgatgcagtcactgacaccattgacattgccccgaatcagagggtggggaccaaacgatacatggcccctgaagtacttgatgaaaccattaatatgaaacactttgactcctttaaatgtgctgatatttatgccctcgggcttgtatattgggagattgctcgaagatgcaattctggaggagtccatgaagaatatcagctgccatattacgacttagtgccctctgacccttccattgaggaaatgcgaaaggttgtatgtgatcagaagctgcgtcccaacatccccaactggtggcagagttatgaggcactgcgggtgatggggaagatgatgcgagagtgttggtatgccaacggcgcagcccgcctgacggccctgcgcatcaagaagaccctctcccagctcagcgtgcaggaagacgtgaagatctaactgctccctctctccacacggagctcctggcagcgagaactacgcacagctgccgcgttgagcgtacgatggaggcctacctctcgtttctgcccagccctctgtgg

SEQ ID NO: 104231 - DNA, 2362 bp, Homo sapiens
  Payload ID: 475
  Gene Symbol: ACVR1B
  Gene Name: activin A receptor, type IB
  Uniprot ID: P36896
  ENST ID: ENST00000542485
  CDS Start-End: 186-1547
aatgcttctcctaagcacctcgtgtgtgttcttcggcctcactgctctgtggcttaggtatctgtgctgtggggtttgagaaacatggtgaaggtgtatgaacagagcttgacatttgtgctctgctgtgtgcgtgcaccagctgcctccaggccaactacacgtgtgagacagatggggcctgcatggtttccattttcaatctggatgggatggagcaccatgtgcgcacctgcatccccaaagtggagctggtccctgccgggaagcccttctactgcctgagctcggaggacctgcgcaacacccactgctgctacactgactactgcaacaggatcgacttgagggtgcccagtggtcacctcaaggagcctgagcacccgtccatgtggggcccggtggagctggtaggcatcatcgccggcccggtgttcctcctgttcctcatcatcatcattgttttccttgtcattaactatcatcagcgtgtctatcacaaccgccagagactggacatggaagatccctcatgtgagatgtgtctctccaaagacaagacgctccaggatcttgtctacgatctctccacctcagggtctggctcagggttacccctctttgtccagcgcacagtggcccgaaccatcgttttacaagagattattggcaagggtcggtttggggaagtatggcggggccgctggaggggtggtgatgtggctgtgaaaatattctcttctcgtgaagaacggtcttggttcagggaagcagagatataccagacggtcatgctgcgccatgaaaacatccttggatttattgctgctgacaataaagataatggcacctggacacagctgtggcttgtttctgactatcatgagcacgggtccctgtttgattatctgaaccggtacacagtgacaattgaggggatgattaagctggccttgtctgctgctagtgggctggcacacctgcacatggagatcgtgggcacccaagggaagcctggaattgctcatcgagacttaaagtcaaagaacattctggtgaagaaaaatggcatgtgtgccatagcagacctgggcctggctgtccgtcatgatgcagtcactgacaccattgacattgccccgaatcagagggtggggaccaaacgatacatggcccctgaagtacttgatgaaaccattaatatgaaacactttgactcctttaaatgtgctgatatttatgccctcgggcttgtatattgggagattgctcgaagatgcaattctggaggagtccatgaagaatatcagctgccatattacgacttagtgccctctgacccttccattgaggaaatgcgaaaggttgtatgtgatcagaagctgcgtcccaacatccccaactggtggcagagttatgaggcactgcgggtgatggggaagatgatgcgagagtgttggtatgccaacggcgcagcccgcctgacggccctgcgcatcaagaagaccctctcccagctcagcgtgcaggaagacgtgaagatctaactgctccctctctccacacggagctcctggcagcgagaactacgcacagctgccgcgttgagcgtacgatggaggcctacctctcgtttctgcccagccctctgtggccaggagccctggcccgcaagagggacagagcccgggagagactcgctcactcccatgttgggtttgagacagacaccttttctatttacctcctaatggcatggagactctgagagcgaattgtgtggagaactcagtgccacacctcgaactggttgtagtgggaagtcccgcgaaacccggtgcatctggcacgtggccaggagccatgacaggggcgcttgggaggggccggaggaaccgaggtgttgccagtgctaagctgccctgagggtttccttcggggaccagcccacagcacaccaaggtggcccggaagaaccagaagtgcagcccctctcacaggcagctctgagccgcgctttcccctcctccctgggatggacgctgccgggagactgccagtggagacggaatctgccgctttgtctgtccagccgtgtgtgcatgtgccgaggtgcgtcccccgttgtgcctggttcgtgccatgcccttacacgtgcgtgtgagtgtgtgtgtgtgtctgtaggtgcgcacttacctgcttgagctttctgtgcatgtgcaggtcgggggtgtggtcgtcatgctgtccgtgcttgctggtgcctcttttcagtagtgagcagcatctagtttccctggtgcccttccctggaggtctctccctcccccagagcccctcatgccacagtggtactctgtgt

SEQ ID NO: 104232 - DNA, 539 bp, Homo sapiens
  Payload ID: 475
  Gene Symbol: ACVR1B
  Gene Name: activin A receptor, type IB
  ENST ID: ENST00000536420
  CDS Start-End: 327-539
gctgggctgcggcggcggcggcggcggcggtggttactatggcggagtcggccggagcctcctccttcttcccccttgttgtcctcctgctcgccggcagcggcgggtccgggccccggggggtccagggatgtgcctagcaccaagctgaatgctgagagggatcctgaggaaagagtctgtccttgccctttggaagtttacacacagagaccggccacagtggctcatgcctgtaatcccaacactttggagaatgagctctgctgtgtgcgtgcaccagctgcctccaggccaactacacgtgtgagacagatggggcctgcatggtttccattttcaatctggatgggatggagcaccatgtgcgcacctgcatccccaaagtggagctggtccctgccgggaagcccttctactgcctgagctcggaggacctgcgcaacacccactgctgctacactgactactgcaacaggatcgacttgagggtgcccagtggtcacctcaaggagcctgagcacccgtccatgtggggc

SEQ ID NO: 104233 - DNA, 8994 bp, Homo sapiens
  Payload ID: 476
  Gene Symbol: ACVR1C
  Gene Name: activin A receptor, type IC
  Uniprot ID: Q8NER5
  ENST ID: ENST00000243349
  CDS Start-End: 362-1843
gccgggcacagggccgcctttgcctgcctgccctgcagcagcaggcccgggcggctgcgagagggcgcagggggcggaggcgcggcaggggcgggctctgccgcccgccccaccacccgctccccgcccggctgcggggccagtggcaggagcgccgcgcaccgccagccgcagggggcgtgggatgggggcggccggggaggggggcgcccacactgactagagccaaccgcgcacttcaaaagggtgtcggtgccgcgctcccctcccgcggcccgggaacttcaaagcgggccgtgctgccccggctgcctcgctctgctctggggcctcgcagccccggcgcggccgcctggtggcgatgacccgggcgctctgctcagcgctccgccaggctctcctgctgctcgcagcggccgccgagctctcgccaggactgaagtgtgtatgtcttttgtgtgattcttcaaacttcacctgccaaacagaaggagcatgttgggcatcagtcatgctaaccaatggaaaagagcaggtgatcaaatcctgtgtctcccttccagaactgaatgctcaagtcttctgtcatagttccaacaatgttaccaaaaccgaatgctgcttcacagatttttgcaacaacataacactgcaccttccaacagcatcaccaaatgccccaaaacttggacccatggagctggccatcattattactgtgcctgtttgcctcctgtccatagctgcgatgctgacagtatgggcatgccagggtcgacagtgctcctacaggaagaaaaagagaccaaatgtggaggaaccactctctgagtgcaatctggtaaatgctggaaaaactctgaaagatctgatttatgatgtgaccgcctctggatctggctctggtctacctctgttggttcaaaggacaattgcaaggacgattgtgcttcaggaaatagtaggaaaaggtagatttggtgaggtgtggcatggaagatggtgtggggaagatgtggctgtgaaaatattctcctccagagatgaaagatcttggtttcgtgaggcagaaatttaccagacggtcatgctgcgacatgaaaacatccttggtttcattgctgctgacaacaaagataatggaacttggactcaactttggctggtatctgaatatcatgaacagggctccttatatgactatttgaatagaaatatagtgaccgtggctggaatgatcaagctggcgctctcaattgctagtggtctggcacaccttcatatggagattgttggtacacaaggtaaacctgctattgctcatcgagacataaaatcaaagaatatcttagtgaaaaagtgtgaaacttgtgccatagcggacttagggttggctgtgaagcatgattcaatactgaacactatcgacatacctcagaatcctaaagtgggaaccaagaggtatatggctcctgaaatgcttgatgatacaatgaatgtgaatatctttgagtccttcaaacgagctgacatctattctgttggtctggtttactgggaaatagcccggaggtgttcagtcggaggaattgttgaggagtaccaattgccttattatgacatggtgccttcagatccctcgatagaggaaatgagaaaggttgtttgtgaccagaagtttcgaccaagtatcccaaaccagtggcaaagttgtgaagcactccgagtcatggggagaataatgcgtgagtgttggtatgccaacggagcggcccgcctaactgctcttcgtattaagaagactatatctcaactttgtgtcaaagaagactgcaaagcctaatgatgataattatgttaaaaagaaatctctcatagctttcttttccattttcccctttatgtgaatgtttttgccattttttttttgttctacctcaaagataagacagtacagtatttaagtgcccataaggcagcatgaaaagataactctaaagttaagcatgggcaggagttgacttcatccaatctctatgttatgtttaattttattttgaaagcaacacctcaactcatctttttatttaataaggaagaaatatattacaaaagtataaaataagctctataaaaatgttatagtcattaagtttttattttacttgaaccaagagcacatgaatgaacaggaaaagatgtaaaaacatttttttctgagatgaaaacatattaattaaacatgcaaattagagcatgctatctttaggtgatgcaatctatgtttccccctttttaagttagcaggactttttaaaaataaatattgctctaaactttaatatatcgaacgtgagagtggagctgcttagtggaagatgtaagtgaggtgggtgtcccatgtgcttggtctccccttctgctgttctcctgttcttcataatccactactgcagcagtccctgaaccactaaacttgttcctttcatttacaaaagagatacctgacatcctgagacactgagaaatgtcctgaagtcacacagctaatggcagaactggcactaggtccaaatcttgtgataatgaacaccgtaaggttagctagcttcctactttcccttgaatagtgcttttctccctatgtaatatcttttattatgatatttgtggtttagaaggcatattgagttattttgcagaatcataatggacccgcacaaaatctcagaaccatatctgttgacattttttctcatagaaatatcatggttaccccatttgttaatgagcattaatgttttctgaacacttccaaagattaatcaaacataaatattcattgtctgaaaatgtctttaagatacaattcagaggtccctatttcctttgtacatacacacttagaaagaaaagacagaaaaggaagaggaaggaaggaaatattttgagaatatattgagaagaattaagaaaactcttcaatgaagtgttaacaaccaaaccctacagacggtatcagaaacagcaaatagatattcctctaccctttcacagtgagtgagtgagtacagaagaatgctcatgatagttttgccttcattctactttctgtggacacagagtaatgaatatttaatgggacattaaatatgcccttcaaatctataattttactttggtaaacgagatttaacatgatgtcttttatgctcctaaaacatcttttttcaaactccattccttagaacattcttctactgagatgatccaagaccaaaagtgttctttggtacttgcttataaagtgatagtacatgttagcatataatgtattttgaagagtgaagtaaatgctattgataacagtaaaaaaaaaaaaaaaaactaataacagtaaagaaatgctacttgatttttttttaaactggattgctcagattacctgatcgtggtggaacccttttattaagaggaggggaaactttttactatcccatatttaactgttctataaagcaaagcacagcttgggtaatagcgttctgaaggatatacttctgtattttctcatagagtacaatttagtgattatgcttcatttcactatggaaatatgttactgaatctatcttcattttactgagttgaaataaggaaggcaaaaaactgacagctatggagtttgcgtgtacttccatactcgttaatgctctcatccacttattaaataatcatagagcacccatatcttgcttgccacaatatcgggtacaagagggaatacaaagatagataggtcctgccctcagggattttaaagtctaatttgggaatgggaatagggatgtgagtgtgtgggggaagagattaaattgacagataaaatacgaagtgggatgtcttgagttctgcatgacagtgggtttctaggataggtctgaaaattgctttcatttgcaacacatttagaaagtagctttatttggatattacagacaatctaaatatatcatcagtttttaaaagtgcctatgtgaagtgatttttaaaaagagcctatgtgaaggggtaatcttgcttgttcttgttactaatttctcatagattgtttttctgcatatataagaacgaaattatttatttactatggttgtacgtgcctcaaataaacaagaatgatatttcctgttttatttacttatgttgggtaaatatgcttattgaatttttaagagaggattttttaccatctccatttttcttgtcattatgttttgtagcttatttgagggtgtctaaatataatttcatattttattggttcaactttcactctgaagaaatccgtatgttagtacattttgaggtatttttcttgttcttgtgttgtttaactatgactcctaactgagtagtcttatatttcaattacaaaatacattttttaagaaagggaatagagcagcaaaaatgataaggaaaatgttaaaagttgtaatatttcctttactcttaacaggattatatatagaacatgctcacttacaaaaataggatgatgaagtttagagcataaggcaggcttcttgtatatacttatgctgtcaaatgttatattgtttttaatggagtcccattgtgtaatatttatttcttttacattttgttataagcaaaaaaaaaaaaaattctccttaggttatgttcagagtatcagtgttctttactccttacagatattttggctttggggtataatacaagacttgggaaaacactattatgaattttcagtactgtataaagtggtgatgggatttaaatgcagcatcactttctgaaaataagagaaacattatttgttgtcagtatttcagcatgaacttgttgccttgtaaattttgcctttaagtttgtaattggtacagattctgttgtatgctttcttctatgtctaaaatatttggcatgtcacatctagaattcttaatttatgttctgacttgagagttaagtgaaacatgactgtcgtgcactattttaggcatagcacttgcttttcatctttatactttcaattaactttgcattttaaatttccatgattgtatgaaaatagtaacctggttgcagtatctgaaaaaattaaaattagcttttatttaaaaatgaaaatctacaatagattcattaggttagaagttccagaataatttattattttattacacctactattgtagaattactaataaaacaaaacaaaactactcctattttcctggaattttgccaccatgtgacttattggggcagagaaaactcagggttgtctttgagtctgcacaaaagcaccagggaacctgcttagcaaatcgtctgaaaacagggagctgatgtttgccattatacaaagtttgagtaaacaacttaaaattgcttgttagggcatagtctttgattgaaataagtatgagaatgtatttggctaaataaatgtatttaaaatatacaaattttatttcccactggaaaattaagaaagtagcagtaccaaatgaataaaagctggcagttgatgtcttcaataatcattcctttaaaataaattcacaaacacatcattacaagctacttagaaatgtttagtattcgtatcttaaaatggcaccattgtggttttcaaagatattttaaacatcttttgtgaaacatactatttctgtttgacaatgctttgttctagctctgtgtgctgatacctacatggagtttttctgctattttagtgaaaacagtaattcttttatcttgagagctgcttctaaataacaaaaaagttaattggaatgtaagtttttaaaaaatgttaatattaaatagaatttttataatatgggcatttttcaaaacattttaatgaaaatatatagatatttgactttctttttttcatctagccttgctttatatttcattatttttctcactttttttcttaatattccctcactatctttcaacattatcattagttcctaattttaaaaataactcttatttaacttaaccgtctggaatttagccttctaatgaaagagaatcccttagtactctcagagattatataaagttattccaattttgtgtagatgacgaaaccaaggatcagagattaaatgactactagttactagcagaactcttatgaaagcctggtggtgacacccagcactgttccctgccatatccccaacttttactgattaaaaattaattcgcatgcatctaaacctaccttgaatgcacactaacgtaatgtgccattcaatgatgatgataaaatcccacttttctttgggtttctactaaaataatttactcactcagagtgaggtcaatgagaaaaactaaactaggctaagaaagagttgtagaatggttgttgagctaagtaggcaaccactggggtgctgataaaattaatggataaaatttaggaactgtgagagtatagaatttcttagtgcaagtaatgattagagaagcttcctgacatcccccaccctttctgtaaggactgttctttctctttgtaccttggaatgggggtgaaaggtgatttgatagctgaatttgggactatgtccagtgggatattatctaacttttctctctttctcttttttttcccctcagtttctcattagtttgtctttggcattcatcttcttttagtgcattaaaaaatgtttggcagatctcatcaatcccaagtcactctataattcctgtatttctttagttgtcgtttaacctgtccaaacttctacacaatgaacttcttaacaagattttaagttctctgtataagaggtttcacctcataacttctccagtaatccttcatttggcactatagagtatttgttaatggcagagatgatttttcttttaaaacctaaaaagactagctgttatttgtattctagcttttagctaacatataaagaatgtctacttttgctttaatgctaaattccgcttgagaaatagtaactgggaaagacaatttgaaatatatgccccataatgtgattgttaaatttatttctgctgttccataccattgctttgttttgcttttgacaaactaagccattatgctattagtttggaatataatactacagcaaaattaggtaacaatccctattttaaaattcccctaacaataatagaactgccagcatacttttctctttcagttgtagatgaatacattcgagagaatatgagctgtatttcatcctagattttaatattttcagatgtgactgtatttcctgatcattggtccaagttgtcctaaaagaaatttttctctccagacctaacagttttaactgcaagagtttactgtgggttatgttaatctgaattttaatagggccactaagaatctgagtgccttaggagattacccttatacccactgccatcacatccagtcaggcctgttgtgctctatataaatcttcccagctgaggggcaggtgcgggctaaaatccaactgcaattggctcccagacataattttatattttacagagaagcatcttattggcttatatgtgtttaaagaatggtctggcttatacatcttcagaaaatgagaattaaaaagtcaaaataattcttgacatctacagattgaacaaagaacttagaagaaataatactttatcttttcatcctggcattcctgagagaagagaaattgattgtttatcatgttggtttaatttttcaacccagacaatctgcagcaaggcacatggaccccaattttgatatcgtccatacagttttcattctatgcatggagctaattactgactttgcctgtaaagagaggattgtgtgcctaaattttgtctaacaaatgcaagcgtagaatgacatttactaatatttctatttcttccataggctaaataatagtaactaagtatttttaaggacacagccctttttttctctttatacaaaatgagagtatctgagccaaaatattaaattctagttcttttccgcaatgactagtgtcaagctcatgtactcttctgattctagactggagaagattattcaaacttgatctgtgtttcaggtttttaaatgtcctaaaaacagaaaattagattcagatctcaaaaaaggaattttggattgactttcaaagtactaatactaattatacttttcttttggtagcgtgactcttcttatacctaagaacatattacaaatgtcaaaaccattgcattttgacattgcaaaacatgccttgaactcttgaactactgtgaaaagaatcaccgttgtaaagactttttgtaagctagctgatactcttaagtatgtaaaaagattgtctttcagccgacaggcccaaaggaatgtatataaggaaggaatatgaaaaaataaattaggttttaaaataggaattgggcaataaactgtatcaaaaatatgtagatggattttagtagttgtaatttaaatgtggaaggtgaagagaatttcaaactccaaagagaaatgaatgatattcagatgtttcattaatttctagtctgtgaaaatatgcattttatagtaatatgtatagacttattttatttagaaataatagtgttttagaatttattaaaaactcagtgatagcctttataccaaaatgtttaactttaccaacagcaagtcataaaagtatttattttaaagctttttaatattatcgtgtaactttcatctgtcttcagatgtaaataattatctgcctaaatgttatatttttatgtatgcattttctgaaaatgtattgttttgtaaagtgggaaagataataaatcaagcacttcttgcacttgtttctgtgaagcatatagaactctattttaaataaaggaagatgtgtcgta

SEQ ID NO: 104234 - DNA, 1270 bp, Homo sapiens
  Payload ID: 476
  Gene Symbol: ACVR1C
  Gene Name: activin A receptor, type IC
  Uniprot ID: Q8NER5
  ENST ID: ENST00000348328
  CDS Start-End: 84-1094
ggaacttcaaagcgggccgtgctgccccggctgcctcgctctgctctggggcctcgcagccccggcgcggccgcctggtggcgatgacccgggcgctctgctcagcgctccgccaggctctcctgctgctcgcagcggccgccgagctctcgccaggactgaagtgtgtatgtcttttgtgtgattcttcaaacttcacctgccaaacagaaggagcatgttgggcatcagtcatgctaaccaatggaaaagagcaggtgatcaaatcctgtgtctcccttccagaactgaatgctcaagtcttctgtcatagttccaacaatgttaccaaaaccgaatgctgcttcacagatttttgcaacaacataacactgcaccttccaacagataatggaacttggactcaactttggctggtatctgaatatcatgaacagggctccttatatgactatttgaatagaaatatagtgaccgtggctggaatgatcaagctggcgctctcaattgctagtggtctggcacaccttcatatggagattgttggtacacaaggtaaacctgctattgctcatcgagacataaaatcaaagaatatcttagtgaaaaagtgtgaaacttgtgccatagcggacttagggttggctgtgaagcatgattcaatactgaacactatcgacatacctcagaatcctaaagtgggaaccaagaggtatatggctcctgaaatgcttgatgatacaatgaatgtgaatatctttgagtccttcaaacgagctgacatctattctgttggtctggtttactgggaaatagcccggaggtgttcagtcggaggaattgttgaggagtaccaattgccttattatgacatggtgccttcagatccctcgatagaggaaatgagaaaggttgtttgtgaccagaagtttcgaccaagtatcccaaaccagtggcaaagttgtgaagcactccgagtcatggggagaataatgcgtgagtgttggtatgccaacggagcggcccgcctaactgctcttcgtattaagaagactatatctcaactttgtgtcaaagaagactgcaaagcctaatgatgataattatgttaaaaagaaatctctcatagctttcttttccattttcccctttatgtgaatgtttttgccattttttttttgttctacctcaaagataagacagtacagtatttaagtgcccataaggcagcatgaaaagataactctaaagttaagcatgggcaggagtt

SEQ ID NO: 104235 - DNA, 1501 bp, Homo sapiens
  Payload ID: 476
  Gene Symbol: ACVR1C
  Gene Name: activin A receptor, type IC
  Uniprot ID: Q8NER5
  ENST ID: ENST00000335450
  CDS Start-End: 84-1325
ggaacttcaaagcgggccgtgctgccccggctgcctcgctctgctctggggcctcgcagccccggcgcggccgcctggtggcgatgacccgggcgctctgctcagcgctccgccaggctctcctgctgctcgcagcggccgccgagctctcgccaggactgaagtgtgtatgtcttttgtgtgattcttcaaacttcacctgccaaacagaaggagcatgttgggcatcagtcatgctaaccaatggaaaagagcaggtgatcaaatcctgtgtctcccttccagaactgaatgctcaagtcttctgtcatagttccaacaatgttaccaaaaccgaatgctgcttcacagatttttgcaacaacataacactgcaccttccaacaggtctacctctgttggttcaaaggacaattgcaaggacgattgtgcttcaggaaatagtaggaaaaggtagatttggtgaggtgtggcatggaagatggtgtggggaagatgtggctgtgaaaatattctcctccagagatgaaagatcttggtttcgtgaggcagaaatttaccagacggtcatgctgcgacatgaaaacatccttggtttcattgctgctgacaacaaagataatggaacttggactcaactttggctggtatctgaatatcatgaacagggctccttatatgactatttgaatagaaatatagtgaccgtggctggaatgatcaagctggcgctctcaattgctagtggtctggcacaccttcatatggagattgttggtacacaaggtaaacctgctattgctcatcgagacataaaatcaaagaatatcttagtgaaaaagtgtgaaacttgtgccatagcggacttagggttggctgtgaagcatgattcaatactgaacactatcgacatacctcagaatcctaaagtgggaaccaagaggtatatggctcctgaaatgcttgatgatacaatgaatgtgaatatctttgagtccttcaaacgagctgacatctattctgttggtctggtttactgggaaatagcccggaggtgttcagtcggaggaattgttgaggagtaccaattgccttattatgacatggtgccttcagatccctcgatagaggaaatgagaaaggttgtttgtgaccagaagtttcgaccaagtatcccaaaccagtggcaaagttgtgaagcactccgagtcatggggagaataatgcgtgagtgttggtatgccaacggagcggcccgcctaactgctcttcgtattaagaagactatatctcaactttgtgtcaaagaagactgcaaagcctaatgatgataattatgttaaaaagaaatctctcatagctttcttttccattttcccctttatgtgaatgtttttgccattttttttttgttctacctcaaagataagacagtacagtatttaagtgcccataaggcagcatgaaaagataactctaaagttaagcatgggcaggagtt

SEQ ID NO: 104236 - DNA, 1786 bp, Homo sapiens
  Payload ID: 476
  Gene Symbol: ACVR1C
  Gene Name: activin A receptor, type IC
  Uniprot ID: Q8NER5
  ENST ID: ENST00000409680
  CDS Start-End: 279-1610
gttgcgctgccgtcgggcaggtggccgagccccgcgggagctgtcgtcggggccgaattcactgcgccaaggtccagcggaaagctggggcatcccggcgaccgcagggtgtcccttcgcaaattcatcaggcgaaggggaggcggaagctcctggccgctgctctgggggagggctccgagctccaacctgcaagtccaggactgaagtgtgtatgtcttttgtgtgattcttcaaacttcacctgccaaacagaaggagcatgttgggcatcagtcatgctaaccaatggaaaagagcaggtgatcaaatcctgtgtctcccttccagaactgaatgctcaagtcttctgtcatagttccaacaatgttaccaaaaccgaatgctgcttcacagatttttgcaacaacataacactgcaccttccaacagcatcaccaaatgccccaaaacttggacccatggagctggccatcattattactgtgcctgtttgcctcctgtccatagctgcgatgctgacagtatgggcatgccagggtcgacagtgctcctacaggaagaaaaagagaccaaatgtggaggaaccactctctgagtgcaatctggtaaatgctggaaaaactctgaaagatctgatttatgatgtgaccgcctctggatctggctctggtctacctctgttggttcaaaggacaattgcaaggacgattgtgcttcaggaaatagtaggaaaaggtagatttggtgaggtgtggcatggaagatggtgtggggaagatgtggctgtgaaaatattctcctccagagatgaaagatcttggtttcgtgaggcagaaatttaccagacggtcatgctgcgacatgaaaacatccttggtttcattgctgctgacaacaaagataatggaacttggactcaactttggctggtatctgaatatcatgaacagggctccttatatgactatttgaatagaaatatagtgaccgtggctggaatgatcaagctggcgctctcaattgctagtggtctggcacaccttcatatggagattgttggtacacaaggtaaacctgctattgctcatcgagacataaaatcaaagaatatcttagtgaaaaagtgtgaaacttgtgccatagcggacttagggttggctgtgaagcatgattcaatactgaacactatcgacatacctcagaatcctaaagtgggaaccaagaggtatatggctcctgaaatgcttgatgatacaatgaatgtgaatatctttgagtccttcaaacgagctgacatctattctgttggtctggtttactgggaaatagcccggaggtgttcagtcggaggaattgttgaggagtaccaattgccttattatgacatggtgccttcagatccctcgatagaggaaatgagaaaggttgtttgtgaccagaagtttcgaccaagtatcccaaaccagtggcaaagttgtgaagcactccgagtcatggggagaataatgcgtgagtgttggtatgccaacggagcggcccgcctaactgctcttcgtattaagaagactatatctcaactttgtgtcaaagaagactgcaaagcctaatgatgataattatgttaaaaagaaatctctcatagctttcttttccattttcccctttatgtgaatgtttttgccattttttttttgttctacctcaaagataagacagtacagtatttaagtgcccataaggcagcatgaaaagataactctaaagttaagcatgggcaggagtt

SEQ ID NO: 104237 - DNA, 5728 bp, Homo sapiens
  Payload ID: 477
  Gene Symbol: ACVR2A
  Gene Name: activin A receptor, type IIA
  Uniprot ID: P27037
  ENST ID: ENST00000241416
  CDS Start-End: 637-2178
aggagaccgaaaacgcggccgagcccggagcccggagctggagccagagcctggaccagaacttggccgccgcctgcaccgccgccgccgctgccgcccgccgccccttccccgcgccgcagccgcctcgccgccaccgccgcgagctcggccgccagtggtcctcggactttaggtgtctgggttgaaggtcggtccggacatcggacccagtcagttcccagactgtccgggcggcagcggacgccgctgccgccgccgcctcttcgtcgcctcagcctggcgttttgttccgagagacgggagaggcgagcggagctgacagtgattttgacagtgatttaaacccgcttttgttgttgttggcttttcgttgtttggttttgtgtgttgtgcgtgtgtgtggcggtttttcccccgtggtgcattttattttttatcgttgtgctcttttttttcttttttttttttaacccagtgagcgtttttttttttttttttttttttttttggtctgggcttccgaatatgttttatgacggttgattttacaccaggaggtttgtctccgaggaagacccagggaactggatatctagcgagaacttcctccggattccccggcgcctcgggaaaatgggagctgctgcaaagttggcgtttgccgtctttcttatctcctgttcttcaggtgctatacttggtagatcagaaactcaggagtgtcttttctttaatgctaattgggaaaaagacagaaccaatcaaactggtgttgaaccgtgttatggtgacaaagataaacggcggcattgttttgctacctggaagaatatttctggttccattgaaatagtgaaacaaggttgttggctggatgatatcaactgctatgacaggactgattgtgtagaaaaaaaagacagccctgaagtatatttttgttgctgtgagggcaatatgtgtaatgaaaagttttcttattttccggagatggaagtcacacagcccacttcaaatccagttacacctaagccaccctattacaacatcctgctctattccttggtgccacttatgttaattgcggggattgtcatttgtgcattttgggtgtacaggcatcacaagatggcctaccctcctgtacttgttccaactcaagacccaggaccacccccaccttctccattactaggtttgaaaccactgcagttattagaagtgaaagcaaggggaagatttggttgtgtctggaaagcccagttgcttaacgaatatgtggctgtcaaaatatttccaatacaggacaaacagtcatggcaaaatgaatacgaagtctacagtttgcctggaatgaagcatgagaacatattacagttcattggtgcagaaaaacgaggcaccagtgttgatgtggatctttggctgatcacagcatttcatgaaaagggttcactatcagactttcttaaggctaatgtggtctcttggaatgaactgtgtcatattgcagaaaccatggctagaggattggcatatttacatgaggatatacctggcctaaaagatggccacaaacctgccatatctcacagggacatcaaaagtaaaaatgtgctgttgaaaaacaacctgacagcttgcattgctgactttgggttggccttaaaatttgaggctggcaagtctgcaggcgatacccatggacaggttggtacccggaggtacatggctccagaggtattagagggtgctataaacttccaaagggatgcatttttgaggatagatatgtatgccatgggattagtcctatgggaactggcttctcgctgtactgctgcagatggacctgtagatgaatacatgttgccatttgaggaggaaattggccagcatccatctcttgaagacatgcaggaagttgttgtgcataaaaaaaagaggcctgttttaagagattattggcagaaacatgctggaatggcaatgctctgtgaaaccattgaagaatgttgggatcacgacgcagaagccaggttatcagctggatgtgtaggtgaaagaattacccagatgcagagactaacaaatattattaccacagaggacattgtaacagtggtcacaatggtgacaaatgttgactttcctcccaaagaatctagtctatgatggttgcgccatctgtgcacactaagaaatgggactctgaactggagctgctaagctaaagaaactgcttacagtttattttctgtgtaaaatgagtaggatgtctcttggaaatgttaagaaagaagaccctttgttgaaaaatgttgctctgggagacttactgcattgccgacagcacagatgtgaaggacatgagactaagagaaaccttgcaaactctataaagaaacttttgaaaaagtgtacatgaagaatgtagccctctccaaatcaaggatcttttggacctggctaatggagtgtttgaaaactgacatcagatttcttaatgtctgtcagaagacactaattccttaaatgaactactgctattttttttaaatcaaaaacttttcatttcagattttaaaaagggtaacttgtttttattgcatttgctgttgtttctataaatgactattgtaatgccaatatgacacagcttgtgaatgtttagtgtgctgctgttctgtgtacataaagtcatcaaagtggggtacagtaaagaggcttccaagcattactttaacctccctcaacaaggtatacctcagttccacggttgctaaattataaaattgaaaacactaacaaaatttgaataataaatcgatccatgttttgtaacaaattcactgtgttatttaaggaaaaaaaggtaagctatgcttagtgccaacaataagtggccattcgtaaagcagtgttttagcatttcttgtgctggcttgtaatgtagggaaaaaaagtgctgttttttgaaaagatggtgtcatttcccccttcttcccatgttttaaagccccatcttatatccagttcccaaaatttgcatacttacctaagtattttttttaggtgtgctgtgtttggggaatatttgaaaatttaaagcatgatttaaaattttttaaagtgagctgtgacactggaaagctcttcattttatcttttaaaatagagttttttctatttatatatgtaaaattgtagtgtatttcttttcaccaaacagtgtgtgggacattctttatcactgttttaggatcacctcaggaagtgtcgttacccagaattccccactgtctgctatgagacttgtaactttatcactatacttctgcttggtgccatcttgtcagagtaatatttgatgtctgtgatatgtaaagaattatcctaggataaagatattaaactttaagcagatttcagatgttactgctttaaaacaaatcagggataacaaattaaacgtataacttaaaatatgcaatgacatttagaggtaaccaatgttgatataggtagcatagcctagcctcctccccaaaattgcttttacaactaacactgatactaatttaggatagttcatgccttatccttgctaagaaaatggaattgatggtaggcaggtgctaaagtgcttttcaaaacaatattacgttagaatacaattggattcttcctcaaatttatacaggccaaaaagtaaaacattaattttctgaatttccagattaccaatcaattaatcaacaaatagccagtattatgctgtgtatttctgtcaggtcattttaaaatccatgttaattttataaaagaattttttacatgtcactgtcaggagctcactgtgaatgtgttgtcttcaaatggttatttaaccacacagtacactacattttacatatatgtacgtaatctctgggaatagtaaattaattatgttatttataaacaatacataggtcaacagactttaagcagggaggaaaagaagagtaatagcgtctgtgtgctgcagaccattcagaactgtcacgtgtgtccccatggtctcattcattgtattcctagcaattcccttttcaatgttgagttcacctctttatttcacaaagtacttggtctctcaatttcttgatctggttttgcttccatttaaaaactaatcaagaagggaaaatattgagaatgtgcatacaagaaaatcattaatttcctgaagatgaatttctacctgttgtgaacatttaactttctttttaaaagttaaacaaaaataaacaagggatattatgatgaatgtttggcttatgtgagtactagagataaaatttttaaacccagttattcacaatataaaatgttttcaagttagaaaaaatttttagaaatcctgggtattgtatttaactgtagctaaccaattttaaaacttgtattcttttgagaactattattaatagaaaaactttttataagcagtaaaataagaatgttccagtgactacctgtccttatacctagtcttgttaaaactttcttttgcagggtatttagtgtttggtttacagtcagtgcagagtgggcaagttaacagaaagtttgagctagagatactggaaaaaaaaaagatcaaagaatgagaaaaatggtgatccattttggggcaaactgagaccccccaaataactctttcctcatgtgtatggtgctcctcatgactcgtcttgtattttgcctttctgatacccatcagaactgctgctgctctaacttatactctttaccttgcccagatctccgcgtaaggaatgctttatgatcaacttgccataggactgatggattaaccagtgttcggctttatttgaagtctatgccctgcacagctcttgtatgtattttagatgctagaagtttttttagcatgtgatgtgtgattcttgtttgaattctaggtaccttgtgaattccagaaaaagagactgtgcttcacgattgttagtcccatgaacttgcactatctatctttcatggtgatgttttgaaaatacaatcaggaaaaaacccaacacctttggaatttaaaatagaatcatatcatgaaatttaaaaagaatctcttctgttgcatttcctcacccctaagtaacagctacatttaagtaaaatgcaggtggtaggggaaaaaaaaccatggcgagatggtggtttagtggaataaactgattactggtttttttgtttttttttttttttttaaagaaagaagcttcatcacagatactttccagtttctcttttatacttttttgaaagattactttttaggaacatttggtatgatatgcataaaattatttatccatttatgggcaaaatgatacaagtagcatcttgattgaacatcatttacctcagatattcaaccagcagtacgttttttatgcagtctcaacccatatcccatttgttacctctcagaatattggtaagcagttattttcgctttactctgtatttcttgtgttttgggcacaggttattgtactactgtcaaatcgtacttgctattttttctgcaagtatttaacagaaagcttaaaatccccataaaaccccaccttggataagtgattgttaaatattgtacaaataaaatgtatgctatccccattccatccccaagttaaataaaaaaatgaatacggta

SEQ ID NO: 104238 - DNA, 2367 bp, Homo sapiens
  Payload ID: 477
  Gene Symbol: ACVR2A
  Gene Name: activin A receptor, type IIA
  Uniprot ID: P27037
  ENST ID: ENST00000404590
  CDS Start-End: 171-1712
gccgccccttccccgcgccgcagccgcctcgccgccaccgccgcgagctcggccgccagtggtcctcggactttaggtgtctgggttgaaggaggtttgtctccgaggaagacccagggaactggatatctagcgagaacttcctccggattccccggcgcctcgggaaaatgggagctgctgcaaagttggcgtttgccgtctttcttatctcctgttcttcaggtgctatacttggtagatcagaaactcaggagtgtcttttctttaatgctaattgggaaaaagacagaaccaatcaaactggtgttgaaccgtgttatggtgacaaagataaacggcggcattgttttgctacctggaagaatatttctggttccattgaaatagtgaaacaaggttgttggctggatgatatcaactgctatgacaggactgattgtgtagaaaaaaaagacagccctgaagtatatttttgttgctgtgagggcaatatgtgtaatgaaaagttttcttattttccggagatggaagtcacacagcccacttcaaatccagttacacctaagccaccctattacaacatcctgctctattccttggtgccacttatgttaattgcggggattgtcatttgtgcattttgggtgtacaggcatcacaagatggcctaccctcctgtacttgttccaactcaagacccaggaccacccccaccttctccattactaggtttgaaaccactgcagttattagaagtgaaagcaaggggaagatttggttgtgtctggaaagcccagttgcttaacgaatatgtggctgtcaaaatatttccaatacaggacaaacagtcatggcaaaatgaatacgaagtctacagtttgcctggaatgaagcatgagaacatattacagttcattggtgcagaaaaacgaggcaccagtgttgatgtggatctttggctgatcacagcatttcatgaaaagggttcactatcagactttcttaaggctaatgtggtctcttggaatgaactgtgtcatattgcagaaaccatggctagaggattggcatatttacatgaggatatacctggcctaaaagatggccacaaacctgccatatctcacagggacatcaaaagtaaaaatgtgctgttgaaaaacaacctgacagcttgcattgctgactttgggttggccttaaaatttgaggctggcaagtctgcaggcgatacccatggacaggttggtacccggaggtacatggctccagaggtattagagggtgctataaacttccaaagggatgcatttttgaggatagatatgtatgccatgggattagtcctatgggaactggcttctcgctgtactgctgcagatggacctgtagatgaatacatgttgccatttgaggaggaaattggccagcatccatctcttgaagacatgcaggaagttgttgtgcataaaaaaaagaggcctgttttaagagattattggcagaaacatgctggaatggcaatgctctgtgaaaccattgaagaatgttgggatcacgacgcagaagccaggttatcagctggatgtgtaggtgaaagaattacccagatgcagagactaacaaatattattaccacagaggacattgtaacagtggtcacaatggtgacaaatgttgactttcctcccaaagaatctagtctatgatggttgcgccatctgtgcacactaagaaatgggactctgaactggagctgctaagctaaagaaactgcttacagtttattttctgtgtaaaatgagtaggatgtctcttggaaatgttaagaaagaagaccctttgttgaaaaatgttgctctgggagacttactgcattgccgacagcacagatgtgaaggacatgagactaagagaaaccttgcaaactctataaagaaacttttgaaaaagtgtacatgaagaatgtagccctctccaaatcaaggatcttttggacctggctaatggagtgtttgaaaactgacatcagatttcttaatgtctgtcagaagacactaattccttaaatgaactactgctattttttttaaatcaaaaacttttcatttcagattttaaaaagggtaacttgtttttattgcatttgctgttgtttctataaatgactattgtaatgccaatatgacacagcttgtgaatgtttagtgtgctgctgttctgtgtacataaagtcatcaaagtggggtacagtaaagaggcttccaagcattactttaacctccctcaacaaggtatacctcagttccacggttgctaaattataaaattgaaaacactaacaaaatttgaataataaatcga

SEQ ID NO: 104239 - DNA, 5166 bp, Homo sapiens
  Payload ID: 477
  Gene Symbol: ACVR2A
  Gene Name: activin A receptor, type IIA
  Uniprot ID: P27037
  ENST ID: ENST00000535787
  CDS Start-End: 397-1614
aggagaccgaaaacgcggccgagcccggagcccggagctggagccagagcctggaccagaacttggccgccgcctgcaccgccgccgccgctgccgcccgccgccccttccccgcgccgcagccgcctcgccgccaccgccgcgagctcggccgccagtggtcctcggactttaggtgtctgggttgaagacagaaccaatcaaactggtgttgaaccgtgttatggtgacaaagataaacggcggcattgttttgctacctggaagaatatttctggttccattgaaatagtgaaacaaggttgttggctggatgatatcaactgctatgacaggactgattgtgtagaaaaaaaagacagccctgaagtatatttttgttgctgtgagggcaatatgtgtaatgaaaagttttcttattttccggagatggaagtcacacagcccacttcaaatccagttacacctaagccaccctattacaacatcctgctctattccttggtgccacttatgttaattgcggggattgtcatttgtgcattttgggtgtacaggcatcacaagatggcctaccctcctgtacttgttccaactcaagacccaggaccacccccaccttctccattactaggtttgaaaccactgcagttattagaagtgaaagcaaggggaagatttggttgtgtctggaaagcccagttgcttaacgaatatgtggctgtcaaaatatttccaatacaggacaaacagtcatggcaaaatgaatacgaagtctacagtttgcctggaatgaagcatgagaacatattacagttcattggtgcagaaaaacgaggcaccagtgttgatgtggatctttggctgatcacagcatttcatgaaaagggttcactatcagactttcttaaggctaatgtggtctcttggaatgaactgtgtcatattgcagaaaccatggctagaggattggcatatttacatgaggatatacctggcctaaaagatggccacaaacctgccatatctcacagggacatcaaaagtaaaaatgtgctgttgaaaaacaacctgacagcttgcattgctgactttgggttggccttaaaatttgaggctggcaagtctgcaggcgatacccatggacaggttggtacccggaggtacatggctccagaggtattagagggtgctataaacttccaaagggatgcatttttgaggatagatatgtatgccatgggattagtcctatgggaactggcttctcgctgtactgctgcagatggacctgtagatgaatacatgttgccatttgaggaggaaattggccagcatccatctcttgaagacatgcaggaagttgttgtgcataaaaaaaagaggcctgttttaagagattattggcagaaacatgctggaatggcaatgctctgtgaaaccattgaagaatgttgggatcacgacgcagaagccaggttatcagctggatgtgtaggtgaaagaattacccagatgcagagactaacaaatattattaccacagaggacattgtaacagtggtcacaatggtgacaaatgttgactttcctcccaaagaatctagtctatgatggttgcgccatctgtgcacactaagaaatgggactctgaactggagctgctaagctaaagaaactgcttacagtttattttctgtgtaaaatgagtaggatgtctcttggaaatgttaagaaagaagaccctttgttgaaaaatgttgctctgggagacttactgcattgccgacagcacagatgtgaaggacatgagactaagagaaaccttgcaaactctataaagaaacttttgaaaaagtgtacatgaagaatgtagccctctccaaatcaaggatcttttggacctggctaatggagtgtttgaaaactgacatcagatttcttaatgtctgtcagaagacactaattccttaaatgaactactgctattttttttaaatcaaaaacttttcatttcagattttaaaaagggtaacttgtttttattgcatttgctgttgtttctataaatgactattgtaatgccaatatgacacagcttgtgaatgtttagtgtgctgctgttctgtgtacataaagtcatcaaagtggggtacagtaaagaggcttccaagcattactttaacctccctcaacaaggtatacctcagttccacggttgctaaattataaaattgaaaacactaacaaaatttgaataataaatcgatccatgttttgtaacaaattcactgtgttatttaaggaaaaaaaggtaagctatgcttagtgccaacaataagtggccattcgtaaagcagtgttttagcatttcttgtgctggcttgtaatgtagggaaaaaaagtgctgttttttgaaaagatggtgtcatttcccccttcttcccatgttttaaagccccatcttatatccagttcccaaaatttgcatacttacctaagtattttttttaggtgtgctgtgtttggggaatatttgaaaatttaaagcatgatttaaaattttttaaagtgagctgtgacactggaaagctcttcattttatcttttaaaatagagttttttctatttatatatgtaaaattgtagtgtatttcttttcaccaaacagtgtgtgggacattctttatcactgttttaggatcacctcaggaagtgtcgttacccagaattccccactgtctgctatgagacttgtaactttatcactatacttctgcttggtgccatcttgtcagagtaatatttgatgtctgtgatatgtaaagaattatcctaggataaagatattaaactttaagcagatttcagatgttactgctttaaaacaaatcagggataacaaattaaacgtataacttaaaatatgcaatgacatttagaggtaaccaatgttgatataggtagcatagcctagcctcctccccaaaattgcttttacaactaacactgatactaatttaggatagttcatgccttatccttgctaagaaaatggaattgatggtaggcaggtgctaaagtgcttttcaaaacaatattacgttagaatacaattggattcttcctcaaatttatacaggccaaaaagtaaaacattaattttctgaatttccagattaccaatcaattaatcaacaaatagccagtattatgctgtgtatttctgtcaggtcattttaaaatccatgttaattttataaaagaattttttacatgtcactgtcaggagctcactgtgaatgtgttgtcttcaaatggttatttaaccacacagtacactacattttacatatatgtacgtaatctctgggaatagtaaattaattatgttatttataaacaatacataggtcaacagactttaagcagggaggaaaagaagagtaatagcgtctgtgtgctgcagaccattcagaactgtcacgtgtgtccccatggtctcattcattgtattcctagcaattcccttttcaatgttgagttcacctctttatttcacaaagtacttggtctctcaatttcttgatctggttttgcttccatttaaaaactaatcaagaagggaaaatattgagaatgtgcatacaagaaaatcattaatttcctgaagatgaatttctacctgttgtgaacatttaactttctttttaaaagttaaacaaaaataaacaagggatattatgatgaatgtttggcttatgtgagtactagagataaaatttttaaacccagttattcacaatataaaatgttttcaagttagaaaaaatttttagaaatcctgggtattgtatttaactgtagctaaccaattttaaaacttgtattcttttgagaactattattaatagaaaaactttttataagcagtaaaataagaatgttccagtgactacctgtccttatacctagtcttgttaaaactttcttttgcagggtatttagtgtttggtttacagtcagtgcagagtgggcaagttaacagaaagtttgagctagagatactggaaaaaaaaaagatcaaagaatgagaaaaatggtgatccattttggggcaaactgagaccccccaaataactctttcctcatgtgtatggtgctcctcatgactcgtcttgtattttgcctttctgatacccatcagaactgctgctgctctaacttatactctttaccttgcccagatctccgcgtaaggaatgctttatgatcaacttgccataggactgatggattaaccagtgttcggctttatttgaagtctatgccctgcacagctcttgtatgtattttagatgctagaagtttttttagcatgtgatgtgtgattcttgtttgaattctaggtaccttgtgaattccagaaaaagagactgtgcttcacgattgttagtcccatgaacttgcactatctatctttcatggtgatgttttgaaaatacaatcaggaaaaaacccaacacctttggaatttaaaatagaatcatatcatgaaatttaaaaagaatctcttctgttgcatttcctcacccctaagtaacagctacatttaagtaaaatgcaggtggtaggggaaaaaaaaccatggcgagatggtggtttagtggaataaactgattactggtttttttgtttttttttttttttttaaagaaagaagcttcatcacagatactttccagtttctcttttatacttttttgaaagattactttttaggaacatttggtatgatatgcataaaattatttatccatttatgggcaaaatgatacaagtagcatcttgattgaacatcatttacctcagatattcaaccagcagtacgttttttatgcagtctcaacccatatcccatttgttacctctcagaatattggtaagcagttattttcgctttactctgtatttcttgtgttttgggcacaggttattgtactactgtcaaatcgtacttgctattttttctgcaagtatttaacagaaagcttaaaatccccataaaaccccaccttggataagtgattgttaaatattgtacaaataaaatgtatgctatccccattccatccccaagttaaataaaaaaatgaatacggtatg

SEQ ID NO: 104240 - DNA, 11821 bp, Homo sapiens
  Payload ID: 478
  Gene Symbol: ACVR2B
  Gene Name: activin A receptor, type IIB
  Uniprot ID: Q13705
  ENST ID: ENST00000352511
  CDS Start-End: 473-2011
cgcccgcctctttgtatccaacatccgggtttccccgctggctcggctccgtggccgccgctcaggagccattttggactcggttcagctcccctcccccccacccctccccccgttcatggcccctccggactcggcccctgcgcccggggcccgggcccagccccgccgcgctatgcctgagtcgggcgcgccccggcccgtgccccgccgccgccccccggcccccgcgtcgccccggagcccgggccgcagcctgcgccgcccgcagcggccctgagcccggccccgccgaccggcccttggagcccgaacgctgctcggggacgaaggcgcaggaagcgcgcagggaacgagaccgaaggaaggagcgggaaggagagcgcagccgccgcctggccctgcgcgccccgggagcgccgtgcggccctgcccgcgggctccgggtgtgcgcggggcggcgccgcggaacatgacggcgccctgggtggccctcgccctcctctggggatcgctgtgcgccggctctgggcgtggggaggctgagacacgggagtgcatctactacaacgccaactgggagctggagcgcaccaaccagagcggcctggagcgctgcgaaggcgagcaggacaagcggctgcactgctacgcctcctggcgcaacagctctggcaccatcgagctcgtgaagaagggctgctggctagatgacttcaactgctacgataggcaggagtgtgtggccactgaggagaacccccaggtgtacttctgctgctgtgaaggcaacttctgcaacgaacgcttcactcatttgccagaggctgggggcccggaagtcacgtacgagccacccccgacagcccccaccctgctcacggtgctggcctactcactgctgcccatcgggggcctttccctcatcgtcctgctggccttttggatgtaccggcatcgcaagcccccctacggtcatgtggacatccatgaggaccctgggcctccaccaccatcccctctggtgggcctgaagccactgcagctgctggagatcaaggctcgggggcgctttggctgtgtctggaaggcccagctcatgaatgactttgtagctgtcaagatcttcccactccaggacaagcagtcgtggcagagtgaacgggagatcttcagcacacctggcatgaagcacgagaacctgctacagttcattgctgccgagaagcgaggctccaacctcgaagtagagctgtggctcatcacggccttccatgacaagggctccctcacggattacctcaaggggaacatcatcacatggaacgaactgtgtcatgtagcagagacgatgtcacgaggcctctcatacctgcatgaggatgtgccctggtgccgtggcgagggccacaagccgtctattgcccacagggactttaaaagtaagaatgtattgctgaagagcgacctcacagccgtgctggctgactttggcttggctgttcgatttgagccagggaaacctccaggggacacccacggacaggtaggcacgagacggtacatggctcctgaggtgctcgagggagccatcaacttccagagagatgccttcctgcgcattgacatgtatgccatggggttggtgctgtgggagcttgtgtctcgctgcaaggctgcagacggacccgtggatgagtacatgctgccctttgaggaagagattggccagcacccttcgttggaggagctgcaggaggtggtggtgcacaagaagatgaggcccaccattaaagatcactggttgaaacacccgggcctggcccagctttgtgtgaccatcgaggagtgctgggaccatgatgcagaggctcgcttgtccgcgggctgtgtggaggagcgggtgtccctgattcggaggtcggtcaacggcactacctcggactgtctcgtttccctggtgacctctgtcaccaatgtggacctgccccctaaagagtcaagcatctaagcccaggacatgagtgtctgtccagactcagtggatctgaagaaaaaaggaaaaaaagttgtgttttgttttggaaatcccataaaaccaacaaacacataaaatgcagctgctattttaccttgactttttattattattattataattattataattattattattaatattattttttggattggatcagtttttaccagcatattgctctactgtatcacaaacagcggacacgtcagcaggcgttgaggtgctgagctgtggatgcagaaccagcgccatgctgaagagcctcagccacctcctgtcctttgggattcgtttttcccgctttctctttgtttgtcgtctcagaatctgtgacacaaagaaacccatctcctgtcttaggaaacctaatgctgcaaactctacctagaggaacctttgaagactgttacataagaacataccttcctcagaagaggagtttcctctgccctctgcccttctcccctgcctccctccctcccctccttttattttgttttagtgagcttaagaaacagcagatgtgtctttcacggatctaacgggtgttgtcctgatcgagaaaaaaactgggatgagaatggtttggactggagttggaaggggaggacggtactgggggtagggtttggaacagagctacactggactcgggcacattcggagcagcatcctttagtatggaggctacttctcaggtaaccaggaattgaggggaaggaccttgtggaggccgagcattaacagcaagagcggggtttggagaaagtctgagattgggtgcagccctgacttacctgctggccctgaccagtttcttttcactaacttggccttgggcataggatgaaacattttttctgccctaattttaaaactaggtgagggtagaatcatcacaggttaggaatacattcttcataagacacgatgctgtaaatacccttaatggacgaaaagttgaaatacttttgtttcctcttggagcagttcagggaaatgcccacaggggattgtcctgcacagatagggcaagaggatttcctgggtggagtctgccaaggcctgcctcgctggggaccccagagtcctgcacctctggttccgccccaggtggtgacattactgtccccgttctgtggctcgtggacaagactttctccagaccccttaaagtggtacatattctaaaaaactgtttttctattatgccataaccttgctctagtcagtgaatgttcctaatgctgctgtttcaacatttgaattctttttaatttatgaaacatgctaaattttttttttcaaacaaaacacacacatccacatatacacatgcttcgctatgtggcttccaaggtttaaattttgaaaagtaaaagaattaaaacttcacgaccacagatcacctcaaaccagaaatacctcagaattttctacttatgtaaggtttattatatattttgttagttgtgttgtcttgtagtaagtatattttaatgtaagttggcttttgtgacaaggaagtttaaaagaaatagagaaaaagaaaaaagtttgcatcttctagggagtgctaccatttttgtttgataacgcccccttgtaaataattgtcatcaactgtaggttggctgtctgggccaagtctgggcatttatcagtcttgtttgtgaaggcttttccttctggtttctttagatcattttatttaaaaacagtgcatctcttcatcgtgagggtaggcaaggcgggggccgtggggagaggttgacctgggtgagaactgaagaggccgcctcctcttgggttgtttggagcttcacatgtaattcacatgtaacatgtaacttgatcggtcagtgttcagaatgacaagtaaccccgcttaaacttggtagaaggatggcccttagacctgaatggggtgattttacttgggatttaacttcttcagcaaattaacagcaacgttggaagagatctgtggcgcctctgtgaagcacaccgtgactcaggccagtcttttagtgcagcgtgtctgggagtgaagggttttgcccttgctggtcttggagtccacagtgtgaggggcactgcacatgcctgggcatctacctagtgtgctatgttcagtgtctggggcttactgccccggggtcctttcctctgggtgttggggcacagggtgctatgggaggcccatttgcttccctctcggagctcagtttttgcttcatgggtcaaaatgtgggctggccaagtggttacaggaacagggtttcggtaagctatgttgtctttttttttttttttttttttttttttaatggtttgattttgtgctgtggtattttttttcccttagaataatttttaatggcaaaacaggccttacagcagttgcttttctttaccatttatttctttaagaagctttaaaatatttattgaaaagtgccatatctaatttctttagctttcgcctcaggcagtgcaggcatctttacttttcatcctcagaagaaacaaacgactaacaaatgtagcaaatttactgcaggaatagttaggtcatgatactacctgaacactaaaccccagcctctttgtttggttttagttcctctgggtggtttttcttttgtgtgctggcttgattcttgtgagaagttttgacctggccaagggagggttgagccatggttctggtgtgggactttgcggtcaagacacagtacagacaggtcaggcctgcgtgccttttctctgggtggcctccccgttaggcccaccgtacgctcagccactatagtgtccctgtggggccttgccatcagattgtgtgtcaggagatggtacctttttggtgtggctggggaggagtgtggtccatgccagttctttgggcttcaggccactcttcccctcatgctgtggtgtaaagtgcacccatcaggtggtatatctggttctgatggcaagaagaaggtgggggatctccttatagggcatgggtctaggagcacagatgggccttttgccccgggtaaatgcttgtctgtttgctgtcatgtgttctttgaggagtgagccatctcgagccctgctttgaatttactgggtcatagagcctctgcctgtgctcttttccataatgacttcatgtgacatgcacttttggtgggctcagataattggtttctttttgtttttgacctcaggctctgtggcagactggggaaaatggggcctggcatcattttccctgtcaatgggaggggctgttccatgcagggtgggaggggaccaagttagcagagagtagccaaggatccttgcttcttcctttctagtgtgctgtcatccaagcaggctcctggctgtagggatgggccttggggaagaatcttctttgaaagcatctatgataactgagaagtcatccctagttggagaaatccagtaatgagcagaaggaggaagcaagtgaggacagaggccattgtattacagtgtcacgcagagggccctcaatgatggggcattggggaaggctgtagacatagtcatcagaacatcctggcctggcataagctgggttttctcctgggaccattggtcctcagcaggagttctttgcatgagttgctcaggggcaagggctgcaagtgggctgtgcttaggagaaagtgacacctggcagtgagggaagatggtgagcattattagcctttgttgtccagcatggccttcttgtcctgtctgctctggagaggagcctgtgggaccagtcctgcctggggagggcatacccacacgtgccagctgattctgactctgaatacatcatgtccggacttgggggtgtttctgcagaaaaaggaggttgtttttcagccttgaacatcttcaggaggatagagactcttgctcacatattcttagcaaagggaagggtctctcatctccaggccacagagatagttcttccattgccctaagaggctaggctaaccctcttgacataacttagacagcaaagcacttcatcctgtagttgggctctgtcacctttctcttcagttggccacattctcgtttcctccatcctgctatgctttgtgtgctcgggctgtgtgtggggtttttccctggtggaaggaagcccagctgtgtattgaatgtccttcatgtgttgtgtgtggctcagaaagcctgtcacttggcccctgtgctctgagccgtgagggtggggaggtggctgttccattaaagtgggagtattggatggccctcttgaaactagaattttgccttttttagtatgcagtataaagtttccagcatctattggtaacacaaagatttgctggtttttaaaataatacagtaagcataagtatgtaagtttttagaattggtactagaagttggacagctagttattctcgagaactttatttcactagaaaaatatactaattggaaagcagtttccaggagttaactcagtttaattttcagtctcagttattttagcctgttgagtttttgatggcacacctttggagagatggccacgcctgattcccatttcaggggcatcagaccatacctttttaagaagctccgtgaatctagtcatctacccttcatcctgggcgaacagccaaaaagagaaggggacaaggtgtctttttctccttctcactggggtgacatgaattcttttagttaatggctgtttgcaaattctaaactaatgaaatacttagcagctaacatgttcaatctagtaatgatgagtttaaatctcaattgacagtaatgttttagataaacaggcccagtaattcagttgatgaactgtatatcttctcagtctagatttgtaaatgtttaatgaattcagggttataagcatagttctttaagtaagattccagatagttgatttgcaaccagcagtctacctatgaatgtatcccaaacctttagaagattggaaaagatttttgaaataatgatttagttttgtaggaaaaacacccccttgaaaattaattcggttgacccagtaacattttttaaaacaattggtggctccaaaaggcctgccaacaaagaaaagtccaaattatctagtgggacattttgaatgttttatgtttattttgggtccactgtaaactttggttcaaaaaagaatttgaatttaaagaatttaccattatttaaattattaccaagtttttacattttcatgatggtattttccaggtatgaatgaaacatgactttttgattgtggtacttcctgtatcccctgtagtgccaaaaccagtgatactttatttgctcctatggcagctcatagaggtaaccgaagtgatttttcctcagtaattgaaacacatattctctaaatgccaatgtgtggtgatgggccctgcactgccttcatttctctagggcagtgtctttggattgtctagggcctaggtaattctgagaactactgtaaaccaaccacagggcactaaagcaatgtacacaccactctttgtgtgtatggaaggggttatataaacctgggctatgctggacatctacagaagagtattacattcacttgcaaagtttacatttttgagctcacagttatgaaaaatatgacccacaagtttttcaggcaggtgaggatgggtcttcttgcaaatgcatgagttctgtcttgagtcctgggaacttctctgttggttgagtgtgggctcattccctgactctcctaatcatgtttgcgtcagaatgttagcattgtaaataaaagaataggttgtataatagatacacaacacttgaaactttactttaaaaaaatcgatagttctacatatatatttagttatatcacttgacagatttcttctacacagtgtggagattgttttataccacagattatttttataaagttagtgaatttgaatgattttgtaatcagagctaatgagctttacctttcaagagaaacgtacactggagcatgagtggtgtggaacttttacttagtgtttatatggattcttgtgatacactggcagactggagtcaatttgcgggtcttttttggccaaaactccacttgtggttgtgtaggacagtgatattcagctcagcttcttgtggattgggaggagagagggcctgcaatgtgttttacattggtgcttcctcctgagatttctgttgaacaaagggttctgaggtcaaaaattagtttgtaagcctttgccataggacatagtcatgtgagagtgtttgggggaacagaaattgtataggggtgcctattggggtgggatgggactcgaataagattcaggtacaaaaactttgaaatgagaatctggtggtttgagtaatccaccagactgaattatctaagatcacattatccaggttggggggcagaattacccagttaagtaattgttcagaaaagtggggagggtggcatgtggatgcagtgatccaattaaatggagagctgccaggcacattttgtcctctctggtcagtgagaatggttgggttggctcgctgcttcaatctgtggaatcagccaggagcccagtgaggaagctcagaaccccagtaacagcagagcatctttcagatagctccagagttttcctgcttttctgaggaagctcagcatcactgccacaatacggaaagtggtcttcattttagcctatttatttttaggcagagagtggatggttatttgtgtgggacttttggtggcgatatataatgaataattaagttaatttctggtatgcataatggccagtcctgaggcccagctgaagacctgtcccccagaccctgcccgctggcttcaggctgctgcttctagacagaggtgcactggacgggatagttttatcaagagaatccctaatgtgtcattttaaaccagctgtgctttttattcattctggttgagcgtataggtttacactttaccctttttatacttggaataaatttagttccagcagatctagtagcactccagaaaccaaccccatctgttccccataaaaagaacattttctctgctctccagccacgtgtcttggaatgtaattctgttgtgcctttgtttttatcactctcttcgccccaaaagcaactgctgtaagcttttttctacttgtcttttctagtccccaacctctacctttttcctttttcccagccctaatttctggatgcacttctgtgatccaggtattttaagaaccagttacctcagacctcatgttgaacagtgtcgccatctgggtcctcttgatactgcagacttttaacgtacacatgcaggaaccctgctgagcgtgggcacttgttttaaagcaaaactcttcccaaggactgaagaaagggcttctggcaagctcgtcatggcattgtggtgggatgggtctagagtgtcatctgaatggtgcttcctgtgttcctctttgaattctgccattttcagtattcttgtgtgtctgaataggcaaagcgatttaattggctggtcttgcacgcaaattagttccaaagataagctctttgtaacacatttccagtcgctaatgctcaaatgtagaacattcctttaaatggcaggataaaaaacccactatccaccatagtgcattttgggaagatgtctgtagcatatgttgctgtgaaattaggccttgtgggatatggctgtttgtcattttgatgtattttaaataaatatatatattttttaaagagccttttttaccagttcaaaaagtttaattaaccagcagtcaccgcatctgaatttttgtctctggggcatagatggcagaccaagattaaaagtggtaactcagctatacgagcatgggctaccttcctgggctctcctgcagtcctgtagacctgctgttccgcagaccatgggacacaaggtcagtgtgttcccagtgagggtcccaagtcagtcatcttaagtgtttgttctctgccccattcagtggactgttgacttcagtccctgcaagtgctttagcccgagtggggttttctcagagcactgccacgagttaagtgtgtgtttagccaaataatttctccgtaagggaaaaatgcagtcacccaaattttaccaacaatgacagagatgagagtagaaaagattaggcaacatctgagttttaacttgaaaagtgtccaagtcatcatgaaaggccgactgggagcaagtgattattagagattcttcaggagacctcatctgaaaatgttaagactgccagtgagggaaggaattgttaaaatgccagcggcttttttttcctctttttttctgtaattctgtaaaaatgcagagaaagttgagtggtacttcagaattgagggagagggttaccgcagagtagaaatatatttctagatttcagttccacaccacaaatccacaacaatgccatttttcaactgtacaaaaatctgcttatgaactggacatgatcttaatggtagtgtcaaaggccaagtttttcacctgttaatatttttccacatttgtccttgaatctgaataactttatacagtactgtaaatttaacttacatcgagtttgttgtcaattcttatgaaaagagctttctgcatgtaacacatacggttaaagaacacagcaaaggacaaaatttgcaggaacagttttggaaccaacagaaaatgtcaccttttatttgccatcttatatatatctatcagttttaccagctacttctaaatttgtacattatttgtaagggaaagaaggaaaaccctaagacttgtctaacttagtggagaatgtgtgtgttgggcttaggatggatagctaagtcttattgagctgtgttacctaacttgtatataaaaattgtaattaaaagtttgggttcacctgtttctcacagtttaaaatgatgagtaattgcaaactctggaaatgtgactagtatatgatttaaggctgtagaagcaaggaagctctttcaagtgctaaaactaaagacttctagtttttggctcaaataagtactgtttgtataccaggatatgtgagatgtaaatgtagtaggtcacttttcacccttgtagctataaaataaaaattttgtagaacagaaatagcttgtactactgaattaacaaaagttatactaaagtatcatgtttaaaaaaaatatatatatatatacagagttaagcttgttgctgttaccctgtctggatttgaaaagtgtgctgatttatatatatatattacacacacacacacacacacacacacacacacacacacacacacacacacacacacacacacacacacacacatacacctaaaatggcctaaagcagacatccatgtaattacagttgcaaaatgaaaacattttggaaagaacattgtatcatagttcattcatttgcagtggatctttgttcctttttactgtggtaattttagaaatgagtgtcaagtttgaaattagatctgctaagttggggttttgctgcttgaactctgcactgggtcctcaaataaaccgatgtgaatgtagttttttccccctgtgtgaagaagcagttacaccccaacaataggaggaaaaatctagaactatttcaagttttatctttttgtatatgaaaataaaataataataaaacaa

SEQ ID NO: 104241 - DNA, 5963 bp, Homo sapiens
  Payload ID: 479
  Gene Symbol: ADNP
  Gene Name: activity-dependent neuroprotector homeobox
  Uniprot ID: Q9H2P0
  ENST ID: ENST00000349014
  CDS Start-End: 298-3606
aatattcttaactagtcaaactgagtcatgtgtactctgctctgctggaaaagtgactttctgtcttccatcaatcgtggcagaggcgtttccaagaggaggctgggcaggcaaaaacaggtgtctaaaccctactgattgagggctggctatgtgtattctaagctggaagaaatggactgttgaaggggaagaagaaccatgtcttactcatctctctattcctagcacagttgagtggctaagtgcaagtgctctgaaaatgattgtctaacagatgaacaatatatagaaactatgttccaacttcctgtcaacaatcttggcagtttaagaaaagcccggaaaactgtgaaaaaaatacttagtgacattgggttggaatactgtaaagaacatatagaagattttaaacaatttgaacctaatgacttttatttgaaaaacactacatgggaggatgtaggactgtgggacccatcacttacgaaaaaccaggactatcggacaaaacctttctgctgcagcgcttgtccattttcctcaaaattcttctctgcctacaaaagtcatttccgcaatgtccatagtgaagactttgaaaataggattctccttaattgcccctactgtaccttcaatgcagacaaaaagactttggaaacacacattaaaatatttcatgctccgaacgccagcgcaccaagtagcagcctcagcactttcaaagataaaaacaaaaatgatggccttaaacctaagcaggctgacagtgtagagcaagctgtttattactgtaagaagtgcacttaccgagatcctctttatgaaatagttaggaagcacatttacagggaacattttcagcatgtggcagcaccttacatagcaaaggcaggagaaaaatcactcaatggggcagtccccttaggctcgaatgcccgagaagagagtagtattcactgcaagcgatgccttttcatgccaaagtcctatgaagctttggtacagcatgtcatcgaagaccatgaacgtataggctatcaggtcactgccatgattgggcacacaaatgtagtggttccccgatccaaacccttgatgctaattgctcccaaacctcaagacaagaagagcatgggactcccaccaaggatcggttcccttgcttctggaaatgtccggtctttaccatcacagcagatggtgaatcgactctcaataccaaagcctaacttaaattctacaggagtcaacatgatgtccagtgttcatctgcagcagaacaactatggagtcaaatctgtaggccagggttacagtgttggtcagtcaatgagactgggtctaggtggcaacgcaccagtttccattcctcaacaatctcagtctgtaaagcagttacttccaagtggaaacggaaggtcttatgggcttgggtcagagcagaggtcccaggcaccagcaagatactccctgcagtctgctaatgcctcttctctctcatcgggccagttaaagtctccttccctctctcagtcacaggcatccagagtgttaggtcagtccagttccaaacctgctgcagctgccacaggccctcccccaggtaacacttcctcaactcaaaagtggaaaatatgtacaatctgtaatgagctttttcctgaaaatgtctatagtgtgcacttcgaaaaagaacataaagctgagaaagtcccagcagtagccaactacattatgaaaatacacaattttactagcaaatgcctctactgtaatcgctatttacccacagatactctgctcaaccatatgttaattcatggtctgtcttgtccatattgccgttcaactttcaatgatgtggaaaagatggccgcacacatgcggatggttcacattgatgaagagatgggacctaaaacagattctactttgagttttgatttgacattgcagcagggtagtcacactaacatccatctcctggtaactacatacaatctgagggatgccccagctgaatctgttgcttaccatgcccaaaataatcctccagttcctccaaagccacagccaaaggttcaggaaaaggcagatatccctgtaaaaagttcacctcaagctgcagtgccctataaaaaagatgttgggaaaaccctttgtcctctttgcttttcaatcctaaaaggacccatatctgatgcacttgcacatcacttacgagagaggcaccaagttattcagacggttcatccagttgagaaaaagctcacctacaaatgtatccattgccttggtgtgtataccagcaacatgaccgcctcaactatcactctgcatctagttcactgcaggggcgttggaaagacccaaaatggccaggataagacaaatgcaccctctcggcttaatcagtctccaagtctggcacctgtgaagcgcacttacgagcaaatggaatttcccttactgaaaaaacgaaagttagatgatgatagtgattcacccagcttctttgaagagaagcctgaagagcctgttgttttagctttagaccccaagggtcatgaagatgattcctatgaagccaggaaaagctttctaacaaagtatttcaacaaacagccctatcccaccaggagagaaattgagaagctagcagccagtttatggttatggaagagtgacatcgcttcccattttagtaacaaaaggaagaagtgtgtccgtgattgtgaaaagtacaagcctggcgtgttgctggggtttaacatgaaagaattaaataaagtcaagcatgagatggattttgatgctgagtggctatttgaaaatcatgatgagaaggattccagagtcaatgctagtaagactgctgacaaaaagctcaaccttgggaaggaagatgacagttcctcagacagttttgaaaatttggaagaagaatccaatgaaagtggtagcccttttgaccctgtttttgaagttgaacctaaaatctctaacgataacccagaggaacatgtactgaaggtaattcctgaggatgcttcagaatctgaggagaagctagaccaaaaagaggatggttcaaaatacgaaactattcatttgactgaggaaccaaccaaactaatgcacaatgcatctgatagtgaggttgaccaagacgatgttgttgagtggaaagacggtgcttctccatctgagagtgggcctggatcccaacaagtgtcagactttgaggacaatacctgcgaaatgaaaccaggaacctggtctgacgagtcttcccaaagcgaagatgcaaggagcagtaagccagctgccaaaaaaaaggctaccatgcaaggtgacagagagcagttgaaatggaagaatagttcctatggaaaagttgaagggttttggtctaaggaccagtcacagtggaagaatgcatctgagaatgatgagcgcttatctaacccccagattgagtggcagaatagcacaattgacagtgaggatggggaacagtttgacaacatgactgatggagtagctgagcccatgcatggcagcttagccggagttaaactgagcagccaacaggcctaagtgccaggttccctggcgttggtgacatgctgcagcctggaactctgatatccagtgtgactgcaaagctgtcttctcactggtactgccttgtgagtactggttggactgtggggcatgtggccgctgcagttccagtggttatttctaagtctatgacaggacaggctgttcttgcttcagaaccttctctgacagacacggtaactaaatgtgaaaaaccaataagctggtgactcatgaatacacacgaggaaaagcagaggtttattttatctgccttttcaacatttctttccctctgtgaaatgattggtcagatgtctttgagaagtgttaaactaattcacatggtagtgtagggccaacatacaagctaccagtctaatgtgtatagtagactttgggaaaagcgattttttttcatgtattcattctgaatagttgaaatgtatatttgtacagtcttttagacctattcaagtgatgctcatgatcctgttactgtgtgcccatcatagatttctttttttagtgttgcccttgctgtgtaataaacgctctatctagtttacctagcaaaagctcaaaactgcgctagtatggactttttggacagacttagtttttgcacataaccttgtacaatcttgcaacagaggccagccacgtaagatatatatctggactctcttgtattataggatttttcttgttctgaatatccttgacattacagctgtcaaaaacaaaaactggtatttcagatctgttttctgaaatcttttaagctaaaatcacatgcaagaattgactttgcagctactaattttgacaccttttagatctgtataaaagtgtgttgtgttgaagcagcaaaccaatgagtgctgcattttggatatttagttttatctttagttcaacaccatcatggtggattcatttataccatctaatatatgacacactgttgtagtatgtataattttgtgatctttattttccctttgtattcattttaagcatctaaataaattgctgtattgtgcttaatgtaaatatttgctttattacacatgacagtcctgtgtgtccattatatcttttgccatttaatgccataactctttcatcagagatggcagccacagtcacagaggaaacttgtggaaaacccaagatctgtcatctgcaaatagaatgctttctcttgaggcacctggtacaaaatctgtttttcttttttttttttttttttttttttttttttaactgaaaaacaaacacccttgagtttttcagttcaccttttgttaaggagcagagcctgcatatatatgtaaatgtctcaatgataaaaaaaaaaatgtaaacatggattggcattaatttgcaagcagaatcttaatagcctgatgggttttttgtttgttttttcttctagatgaagttaaacgttcgttttcaccttacgatgggaacaactgtagtgcaggcggctctgcctctatttgccactcttggccctcttgctattaagggaaaggctttgaagagcacagcactgacagggctgtaaagatggaaggagctggtatttttaccatgcgtagattcccaagagaacttgtactaaaaagcagaaagttacaaggaagcagaattaggccaacatttccagcaattaaaacaatgatgggaaactccaatccatgaggaggctggtcagtcacctcaaggatagtggcctaaagaagtctgaagtggctgatgtccataacttctgagtctgtttccaaaagaaagactcttgttaatgctgttaccagagagtagagatttgaccagcctctccctaaaatgtaagcttctcaacaacagtacaggaagaagtgcaagagtagactagaacctttaaggaatttggggctggaacggagctatgttgcatctgttgttatacaggtagattataagttctacatgcaccagccaaaacttaggacaggatgtccccaaattaagatactacagattaccaaatcagaaataaccagctggatttaggccagctcacatttatttggaaattaccctccctgattaacaggcttctgagttgtacgtggaggactaatgagacttgtacaagacaccacggggcttggggtccaggtcccagttggatatcggaacagacacagataagtgtgtttcctcattaaggtggtgagagtgtgccttttggcattcagaaaagggtttagccaccctaagagttggaaataaagattcccaactggaaatgttgcagaatccctacaagtgtctcaataaaagccattttaaaagaa

SEQ ID NO: 104242 - DNA, 6115 bp, Homo sapiens
  Payload ID: 479
  Gene Symbol: ADNP
  Gene Name: activity-dependent neuroprotector homeobox
  Uniprot ID: Q9H2P0
  ENST ID: ENST00000371602
  CDS Start-End: 321-3629
ttgagcccagaaggttgaggctatggtgaatcgtgagtgcactgcagtcaatgaaccatgagtgcactgcactccagcctgcgcgacagagtaagactctgtcttaagaaaaggaaggaaggatggatggatggatatatcaagccatatgcacatgaaagcaggtgtgtgtctgtgtgtgtacacactagatgaggatatctatgcaccttttttgtcagatgggtaggttttatgatcctatcatcagtggaattagtaaatattacaagttgtacgtgttttgactttgacttaaatttttttttccaatagaaactatgttccaacttcctgtcaacaatcttggcagtttaagaaaagcccggaaaactgtgaaaaaaatacttagtgacattgggttggaatactgtaaagaacatatagaagattttaaacaatttgaacctaatgacttttatttgaaaaacactacatgggaggatgtaggactgtgggacccatcacttacgaaaaaccaggactatcggacaaaacctttctgctgcagcgcttgtccattttcctcaaaattcttctctgcctacaaaagtcatttccgcaatgtccatagtgaagactttgaaaataggattctccttaattgcccctactgtaccttcaatgcagacaaaaagactttggaaacacacattaaaatatttcatgctccgaacgccagcgcaccaagtagcagcctcagcactttcaaagataaaaacaaaaatgatggccttaaacctaagcaggctgacagtgtagagcaagctgtttattactgtaagaagtgcacttaccgagatcctctttatgaaatagttaggaagcacatttacagggaacattttcagcatgtggcagcaccttacatagcaaaggcaggagaaaaatcactcaatggggcagtccccttaggctcgaatgcccgagaagagagtagtattcactgcaagcgatgccttttcatgccaaagtcctatgaagctttggtacagcatgtcatcgaagaccatgaacgtataggctatcaggtcactgccatgattgggcacacaaatgtagtggttccccgatccaaacccttgatgctaattgctcccaaacctcaagacaagaagagcatgggactcccaccaaggatcggttcccttgcttctggaaatgtccggtctttaccatcacagcagatggtgaatcgactctcaataccaaagcctaacttaaattctacaggagtcaacatgatgtccagtgttcatctgcagcagaacaactatggagtcaaatctgtaggccagggttacagtgttggtcagtcaatgagactgggtctaggtggcaacgcaccagtttccattcctcaacaatctcagtctgtaaagcagttacttccaagtggaaacggaaggtcttatgggcttgggtcagagcagaggtcccaggcaccagcaagatactccctgcagtctgctaatgcctcttctctctcatcgggccagttaaagtctccttccctctctcagtcacaggcatccagagtgttaggtcagtccagttccaaacctgctgcagctgccacaggccctcccccaggtaacacttcctcaactcaaaagtggaaaatatgtacaatctgtaatgagctttttcctgaaaatgtctatagtgtgcacttcgaaaaagaacataaagctgagaaagtcccagcagtagccaactacattatgaaaatacacaattttactagcaaatgcctctactgtaatcgctatttacccacagatactctgctcaaccatatgttaattcatggtctgtcttgtccatattgccgttcaactttcaatgatgtggaaaagatggccgcacacatgcggatggttcacattgatgaagagatgggacctaaaacagattctactttgagttttgatttgacattgcagcagggtagtcacactaacatccatctcctggtaactacatacaatctgagggatgccccagctgaatctgttgcttaccatgcccaaaataatcctccagttcctccaaagccacagccaaaggttcaggaaaaggcagatatccctgtaaaaagttcacctcaagctgcagtgccctataaaaaagatgttgggaaaaccctttgtcctctttgcttttcaatcctaaaaggacccatatctgatgcacttgcacatcacttacgagagaggcaccaagttattcagacggttcatccagttgagaaaaagctcacctacaaatgtatccattgccttggtgtgtataccagcaacatgaccgcctcaactatcactctgcatctagttcactgcaggggcgttggaaagacccaaaatggccaggataagacaaatgcaccctctcggcttaatcagtctccaagtctggcacctgtgaagcgcacttacgagcaaatggaatttcccttactgaaaaaacgaaagttagatgatgatagtgattcacccagcttctttgaagagaagcctgaagagcctgttgttttagctttagaccccaagggtcatgaagatgattcctatgaagccaggaaaagctttctaacaaagtatttcaacaaacagccctatcccaccaggagagaaattgagaagctagcagccagtttatggttatggaagagtgacatcgcttcccattttagtaacaaaaggaagaagtgtgtccgtgattgtgaaaagtacaagcctggcgtgttgctggggtttaacatgaaagaattaaataaagtcaagcatgagatggattttgatgctgagtggctatttgaaaatcatgatgagaaggattccagagtcaatgctagtaagactgctgacaaaaagctcaaccttgggaaggaagatgacagttcctcagacagttttgaaaatttggaagaagaatccaatgaaagtggtagcccttttgaccctgtttttgaagttgaacctaaaatctctaacgataacccagaggaacatgtactgaaggtaattcctgaggatgcttcagaatctgaggagaagctagaccaaaaagaggatggttcaaaatacgaaactattcatttgactgaggaaccaaccaaactaatgcacaatgcatctgatagtgaggttgaccaagacgatgttgttgagtggaaagacggtgcttctccatctgagagtgggcctggatcccaacaagtgtcagactttgaggacaatacctgcgaaatgaaaccaggaacctggtctgacgagtcttcccaaagcgaagatgcaaggagcagtaagccagctgccaaaaaaaaggctaccatgcaaggtgacagagagcagttgaaatggaagaatagttcctatggaaaagttgaagggttttggtctaaggaccagtcacagtggaagaatgcatctgagaatgatgagcgcttatctaacccccagattgagtggcagaatagcacaattgacagtgaggatggggaacagtttgacaacatgactgatggagtagctgagcccatgcatggcagcttagccggagttaaactgagcagccaacaggcctaagtgccaggttccctggcgttggtgacatgctgcagcctggaactctgatatccagtgtgactgcaaagctgtcttctcactggtactgccttgtgagtactggttggactgtggggcatgtggccgctgcagttccagtggttatttctaagtctatgacaggacaggctgttcttgcttcagaaccttctctgacagacacggtaactaaatgtgaaaaaccaataagctggtgactcatgaatacacacgaggaaaagcagaggtttattttatctgccttttcaacatttctttccctctgtgaaatgattggtcagatgtctttgagaagtgttaaactaattcacatggtagtgtagggccaacatacaagctaccagtctaatgtgtatagtagactttgggaaaagcgattttttttcatgtattcattctgaatagttgaaatgtatatttgtacagtcttttagacctattcaagtgatgctcatgatcctgttactgtgtgcccatcatagatttctttttttagtgttgcccttgctgtgtaataaacgctctatctagtttacctagcaaaagctcaaaactgcgctagtatggactttttggacagacttagtttttgcacataaccttgtacaatcttgcaacagaggccagccacgtaagatatatatctggactctcttgtattataggatttttcttgttctgaatatccttgacattacagctgtcaaaaacaaaaactggtatttcagatctgttttctgaaatcttttaagctaaaatcacatgcaagaattgactttgcagctactaattttgacaccttttagatctgtataaaagtgtgttgtgttgaagcagcaaaccaatgagtgctgcattttggatatttagttttatctttagttcaacaccatcatggtggattcatttataccatctaatatatgacacactgttgtagtatgtataattttgtgatctttattttccctttgtattcattttaagcatctaaataaattgctgtattgtgcttaatgtaaatatttgctttattacacatgacagtcctgtgtgtccattatatcttttgccatttaatgccataactctttcatcagagatggcagccacagtcacagaggaaacttgtggaaaacccaagatctgtcatctgcaaatagaatgctttctcttgaggcacctggtacaaaatctgtttttcttttttttttttttttttttttttttttttaactgaaaaacaaacacccttgagtttttcagttcaccttttgttaaggagcagagcctgcatatatatgtaaatgtctcaatgataaaaaaaaaaatgtaaacatggattggcattaatttgcaagcagaatcttaatagcctgatgggttttttgtttgttttttcttctagatgaagttaaacgttcgttttcaccttacgatgggaacaactgtagtgcaggcggctctgcctctatttgccactcttggccctcttgctattaagggaaaggctttgaagagcacagcactgacagggctgtaaagatggaaggagctggtatttttaccatgcgtagattcccaagagaacttgtactaaaaagcagaaagttacaaggaagcagaattaggccaacatttccagcaattaaaacaatgatgggaaactccaatccatgaggaggctggtcagtcacctcaaggatagtggcctaaagaagtctgaagtggctgatgtccataacttctgagtctgtttccaaaagaaagactcttgttaatgctgttaccagagagtagagatttgaccagcctctccctaaaatgtaagcttctcaacaacagtacaggaagaagtgcaagagtagactagaacctttaaggaatttggggctggaacggagctatgttgcatctgttgttatacaggtagattataagttctacatgcaccagccaaaacttaggacaggatgtccccaaattaagatactacagattaccaaatcagaaataaccagctggatttaggccagctcacatttatttggaaattaccctccctgattaacaggcttctgagttgtacgtggaggactaatgagacttgtacaagacaccacggggcttggggtccaggtcccagttggatatcggaacagacacagataagtgtgtttcctcattaaggtggtgagagtgtgccttttggcattcagaaaagggtttagccaccctaagagttggaaataaagattcccaactggaaatgttgcagaatccctacaagtgtctcaataaaagccattttaaaagaatattgttgctactgtttgcttttcaaataatctggagatcgttggctatggcaacgtgctgccacctaattagagaatgcctgtaaatgtaggctgaacacttctaacatgagaaaacctaagtatcct

SEQ ID NO: 104243 - DNA, 6261 bp, Homo sapiens
  Payload ID: 479
  Gene Symbol: ADNP
  Gene Name: activity-dependent neuroprotector homeobox
  Uniprot ID: Q9H2P0
  ENST ID: ENST00000396029
  CDS Start-End: 596-3904
atcttgtgccccctccccctcccgcaggcagcgctaagggggattttggcgtcttctcagacacagctccctctctcggtccccgctgctgaggagcgagaggagcgcggccgccgccgcccgcgccggtgaagccgcctctcccacaccctccgtctcctccctccgcccctcctttgtctgcaccgctcgacgacgccgccgccgcccgccgctctgctgcgcccgccgcgccccccggcagcacccgcggccgcggcgcgagccggagtccgccgagccggagcgcgacgaggccccgggcgcgccctccccgctgccgccaccgccgtgccgccgccatccgcccgccgccgccgccgctgtccggcccccgagcacgccggccccgcgcgcgcctcgaggccgagtcaaggtgtgagatgcacaatgcgaaacctaggccccagcttttacaccatgatgcgcagggttgtactttttgtactgaactgataggtggcctagtggttatgccctgtactaccattttgaggatctggactccgtttcctgccttgctctttggaccacattgtcaattcacaccgaaactatgttccaacttcctgtcaacaatcttggcagtttaagaaaagcccggaaaactgtgaaaaaaatacttagtgacattgggttggaatactgtaaagaacatatagaagattttaaacaatttgaacctaatgacttttatttgaaaaacactacatgggaggatgtaggactgtgggacccatcacttacgaaaaaccaggactatcggacaaaacctttctgctgcagcgcttgtccattttcctcaaaattcttctctgcctacaaaagtcatttccgcaatgtccatagtgaagactttgaaaataggattctccttaattgcccctactgtaccttcaatgcagacaaaaagactttggaaacacacattaaaatatttcatgctccgaacgccagcgcaccaagtagcagcctcagcactttcaaagataaaaacaaaaatgatggccttaaacctaagcaggctgacagtgtagagcaagctgtttattactgtaagaagtgcacttaccgagatcctctttatgaaatagttaggaagcacatttacagggaacattttcagcatgtggcagcaccttacatagcaaaggcaggagaaaaatcactcaatggggcagtccccttaggctcgaatgcccgagaagagagtagtattcactgcaagcgatgccttttcatgccaaagtcctatgaagctttggtacagcatgtcatcgaagaccatgaacgtataggctatcaggtcactgccatgattgggcacacaaatgtagtggttccccgatccaaacccttgatgctaattgctcccaaacctcaagacaagaagagcatgggactcccaccaaggatcggttcccttgcttctggaaatgtccggtctttaccatcacagcagatggtgaatcgactctcaataccaaagcctaacttaaattctacaggagtcaacatgatgtccagtgttcatctgcagcagaacaactatggagtcaaatctgtaggccagggttacagtgttggtcagtcaatgagactgggtctaggtggcaacgcaccagtttccattcctcaacaatctcagtctgtaaagcagttacttccaagtggaaacggaaggtcttatgggcttgggtcagagcagaggtcccaggcaccagcaagatactccctgcagtctgctaatgcctcttctctctcatcgggccagttaaagtctccttccctctctcagtcacaggcatccagagtgttaggtcagtccagttccaaacctgctgcagctgccacaggccctcccccaggtaacacttcctcaactcaaaagtggaaaatatgtacaatctgtaatgagctttttcctgaaaatgtctatagtgtgcacttcgaaaaagaacataaagctgagaaagtcccagcagtagccaactacattatgaaaatacacaattttactagcaaatgcctctactgtaatcgctatttacccacagatactctgctcaaccatatgttaattcatggtctgtcttgtccatattgccgttcaactttcaatgatgtggaaaagatggccgcacacatgcggatggttcacattgatgaagagatgggacctaaaacagattctactttgagttttgatttgacattgcagcagggtagtcacactaacatccatctcctggtaactacatacaatctgagggatgccccagctgaatctgttgcttaccatgcccaaaataatcctccagttcctccaaagccacagccaaaggttcaggaaaaggcagatatccctgtaaaaagttcacctcaagctgcagtgccctataaaaaagatgttgggaaaaccctttgtcctctttgcttttcaatcctaaaaggacccatatctgatgcacttgcacatcacttacgagagaggcaccaagttattcagacggttcatccagttgagaaaaagctcacctacaaatgtatccattgccttggtgtgtataccagcaacatgaccgcctcaactatcactctgcatctagttcactgcaggggcgttggaaagacccaaaatggccaggataagacaaatgcaccctctcggcttaatcagtctccaagtctggcacctgtgaagcgcacttacgagcaaatggaatttcccttactgaaaaaacgaaagttagatgatgatagtgattcacccagcttctttgaagagaagcctgaagagcctgttgttttagctttagaccccaagggtcatgaagatgattcctatgaagccaggaaaagctttctaacaaagtatttcaacaaacagccctatcccaccaggagagaaattgagaagctagcagccagtttatggttatggaagagtgacatcgcttcccattttagtaacaaaaggaagaagtgtgtccgtgattgtgaaaagtacaagcctggcgtgttgctggggtttaacatgaaagaattaaataaagtcaagcatgagatggattttgatgctgagtggctatttgaaaatcatgatgagaaggattccagagtcaatgctagtaagactgctgacaaaaagctcaaccttgggaaggaagatgacagttcctcagacagttttgaaaatttggaagaagaatccaatgaaagtggtagcccttttgaccctgtttttgaagttgaacctaaaatctctaacgataacccagaggaacatgtactgaaggtaattcctgaggatgcttcagaatctgaggagaagctagaccaaaaagaggatggttcaaaatacgaaactattcatttgactgaggaaccaaccaaactaatgcacaatgcatctgatagtgaggttgaccaagacgatgttgttgagtggaaagacggtgcttctccatctgagagtgggcctggatcccaacaagtgtcagactttgaggacaatacctgcgaaatgaaaccaggaacctggtctgacgagtcttcccaaagcgaagatgcaaggagcagtaagccagctgccaaaaaaaaggctaccatgcaaggtgacagagagcagttgaaatggaagaatagttcctatggaaaagttgaagggttttggtctaaggaccagtcacagtggaagaatgcatctgagaatgatgagcgcttatctaacccccagattgagtggcagaatagcacaattgacagtgaggatggggaacagtttgacaacatgactgatggagtagctgagcccatgcatggcagcttagccggagttaaactgagcagccaacaggcctaagtgccaggttccctggcgttggtgacatgctgcagcctggaactctgatatccagtgtgactgcaaagctgtcttctcactggtactgccttgtgagtactggttggactgtggggcatgtggccgctgcagttccagtggttatttctaagtctatgacaggacaggctgttcttgcttcagaaccttctctgacagacacggtaactaaatgtgaaaaaccaataagctggtgactcatgaatacacacgaggaaaagcagaggtttattttatctgccttttcaacatttctttccctctgtgaaatgattggtcagatgtctttgagaagtgttaaactaattcacatggtagtgtagggccaacatacaagctaccagtctaatgtgtatagtagactttgggaaaagcgattttttttcatgtattcattctgaatagttgaaatgtatatttgtacagtcttttagacctattcaagtgatgctcatgatcctgttactgtgtgcccatcatagatttctttttttagtgttgcccttgctgtgtaataaacgctctatctagtttacctagcaaaagctcaaaactgcgctagtatggactttttggacagacttagtttttgcacataaccttgtacaatcttgcaacagaggccagccacgtaagatatatatctggactctcttgtattataggatttttcttgttctgaatatccttgacattacagctgtcaaaaacaaaaactggtatttcagatctgttttctgaaatcttttaagctaaaatcacatgcaagaattgactttgcagctactaattttgacaccttttagatctgtataaaagtgtgttgtgttgaagcagcaaaccaatgagtgctgcattttggatatttagttttatctttagttcaacaccatcatggtggattcatttataccatctaatatatgacacactgttgtagtatgtataattttgtgatctttattttccctttgtattcattttaagcatctaaataaattgctgtattgtgcttaatgtaaatatttgctttattacacatgacagtcctgtgtgtccattatatcttttgccatttaatgccataactctttcatcagagatggcagccacagtcacagaggaaacttgtggaaaacccaagatctgtcatctgcaaatagaatgctttctcttgaggcacctggtacaaaatctgtttttcttttttttttttttttttttttttttttttaactgaaaaacaaacacccttgagtttttcagttcaccttttgttaaggagcagagcctgcatatatatgtaaatgtctcaatgataaaaaaaaaaatgtaaacatggattggcattaatttgcaagcagaatcttaatagcctgatgggttttttgtttgttttttcttctagatgaagttaaacgttcgttttcaccttacgatgggaacaactgtagtgcaggcggctctgcctctatttgccactcttggccctcttgctattaagggaaaggctttgaagagcacagcactgacagggctgtaaagatggaaggagctggtatttttaccatgcgtagattcccaagagaacttgtactaaaaagcagaaagttacaaggaagcagaattaggccaacatttccagcaattaaaacaatgatgggaaactccaatccatgaggaggctggtcagtcacctcaaggatagtggcctaaagaagtctgaagtggctgatgtccataacttctgagtctgtttccaaaagaaagactcttgttaatgctgttaccagagagtagagatttgaccagcctctccctaaaatgtaagcttctcaacaacagtacaggaagaagtgcaagagtagactagaacctttaaggaatttggggctggaacggagctatgttgcatctgttgttatacaggtagattataagttctacatgcaccagccaaaacttaggacaggatgtccccaaattaagatactacagattaccaaatcagaaataaccagctggatttaggccagctcacatttatttggaaattaccctccctgattaacaggcttctgagttgtacgtggaggactaatgagacttgtacaagacaccacggggcttggggtccaggtcccagttggatatcggaacagacacagataagtgtgtttcctcattaaggtggtgagagtgtgccttttggcattcagaaaagggtttagccaccctaagagttggaaataaagattcccaactggaaatgttgcagaatccctacaagtgtctcaataaaagccattttaaaagaa

SEQ ID NO: 104244 - DNA, 4581 bp, Homo sapiens
  Payload ID: 479
  Gene Symbol: ADNP
  Gene Name: activity-dependent neuroprotector homeobox
  Uniprot ID: Q9H2P0
  ENST ID: ENST00000396032
  CDS Start-End: 171-3479
cggccgcggcgcgagccggagtccgccgagccggagcgcgacgaggccccgggcgcgccctccccgctgccgccaccgccgtgccgccgccatccgcccgccgccgccgccgctgtccggcccccgagcacgccggccccgcgcgcgcctcgaggccgagtcaagaaactatgttccaacttcctgtcaacaatcttggcagtttaagaaaagcccggaaaactgtgaaaaaaatacttagtgacattgggttggaatactgtaaagaacatatagaagattttaaacaatttgaacctaatgacttttatttgaaaaacactacatgggaggatgtaggactgtgggacccatcacttacgaaaaaccaggactatcggacaaaacctttctgctgcagcgcttgtccattttcctcaaaattcttctctgcctacaaaagtcatttccgcaatgtccatagtgaagactttgaaaataggattctccttaattgcccctactgtaccttcaatgcagacaaaaagactttggaaacacacattaaaatatttcatgctccgaacgccagcgcaccaagtagcagcctcagcactttcaaagataaaaacaaaaatgatggccttaaacctaagcaggctgacagtgtagagcaagctgtttattactgtaagaagtgcacttaccgagatcctctttatgaaatagttaggaagcacatttacagggaacattttcagcatgtggcagcaccttacatagcaaaggcaggagaaaaatcactcaatggggcagtccccttaggctcgaatgcccgagaagagagtagtattcactgcaagcgatgccttttcatgccaaagtcctatgaagctttggtacagcatgtcatcgaagaccatgaacgtataggctatcaggtcactgccatgattgggcacacaaatgtagtggttccccgatccaaacccttgatgctaattgctcccaaacctcaagacaagaagagcatgggactcccaccaaggatcggttcccttgcttctggaaatgtccggtctttaccatcacagcagatggtgaatcgactctcaataccaaagcctaacttaaattctacaggagtcaacatgatgtccagtgttcatctgcagcagaacaactatggagtcaaatctgtaggccagggttacagtgttggtcagtcaatgagactgggtctaggtggcaacgcaccagtttccattcctcaacaatctcagtctgtaaagcagttacttccaagtggaaacggaaggtcttatgggcttgggtcagagcagaggtcccaggcaccagcaagatactccctgcagtctgctaatgcctcttctctctcatcgggccagttaaagtctccttccctctctcagtcacaggcatccagagtgttaggtcagtccagttccaaacctgctgcagctgccacaggccctcccccaggtaacacttcctcaactcaaaagtggaaaatatgtacaatctgtaatgagctttttcctgaaaatgtctatagtgtgcacttcgaaaaagaacataaagctgagaaagtcccagcagtagccaactacattatgaaaatacacaattttactagcaaatgcctctactgtaatcgctatttacccacagatactctgctcaaccatatgttaattcatggtctgtcttgtccatattgccgttcaactttcaatgatgtggaaaagatggccgcacacatgcggatggttcacattgatgaagagatgggacctaaaacagattctactttgagttttgatttgacattgcagcagggtagtcacactaacatccatctcctggtaactacatacaatctgagggatgccccagctgaatctgttgcttaccatgcccaaaataatcctccagttcctccaaagccacagccaaaggttcaggaaaaggcagatatccctgtaaaaagttcacctcaagctgcagtgccctataaaaaagatgttgggaaaaccctttgtcctctttgcttttcaatcctaaaaggacccatatctgatgcacttgcacatcacttacgagagaggcaccaagttattcagacggttcatccagttgagaaaaagctcacctacaaatgtatccattgccttggtgtgtataccagcaacatgaccgcctcaactatcactctgcatctagttcactgcaggggcgttggaaagacccaaaatggccaggataagacaaatgcaccctctcggcttaatcagtctccaagtctggcacctgtgaagcgcacttacgagcaaatggaatttcccttactgaaaaaacgaaagttagatgatgatagtgattcacccagcttctttgaagagaagcctgaagagcctgttgttttagctttagaccccaagggtcatgaagatgattcctatgaagccaggaaaagctttctaacaaagtatttcaacaaacagccctatcccaccaggagagaaattgagaagctagcagccagtttatggttatggaagagtgacatcgcttcccattttagtaacaaaaggaagaagtgtgtccgtgattgtgaaaagtacaagcctggcgtgttgctggggtttaacatgaaagaattaaataaagtcaagcatgagatggattttgatgctgagtggctatttgaaaatcatgatgagaaggattccagagtcaatgctagtaagactgctgacaaaaagctcaaccttgggaaggaagatgacagttcctcagacagttttgaaaatttggaagaagaatccaatgaaagtggtagcccttttgaccctgtttttgaagttgaacctaaaatctctaacgataacccagaggaacatgtactgaaggtaattcctgaggatgcttcagaatctgaggagaagctagaccaaaaagaggatggttcaaaatacgaaactattcatttgactgaggaaccaaccaaactaatgcacaatgcatctgatagtgaggttgaccaagacgatgttgttgagtggaaagacggtgcttctccatctgagagtgggcctggatcccaacaagtgtcagactttgaggacaatacctgcgaaatgaaaccaggaacctggtctgacgagtcttcccaaagcgaagatgcaaggagcagtaagccagctgccaaaaaaaaggctaccatgcaaggtgacagagagcagttgaaatggaagaatagttcctatggaaaagttgaagggttttggtctaaggaccagtcacagtggaagaatgcatctgagaatgatgagcgcttatctaacccccagattgagtggcagaatagcacaattgacagtgaggatggggaacagtttgacaacatgactgatggagtagctgagcccatgcatggcagcttagccggagttaaactgagcagccaacaggcctaagtgccaggttccctggcgttggtgacatgctgcagcctggaactctgatatccagtgtgactgcaaagctgtcttctcactggtactgccttgtgagtactggttggactgtggggcatgtggccgctgcagttccagtggttatttctaagtctatgacaggacaggctgttcttgcttcagaaccttctctgacagacacggtaactaaatgtgaaaaaccaataagctggtgactcatgaatacacacgaggaaaagcagaggtttattttatctgccttttcaacatttctttccctctgtgaaatgattggtcagatgtctttgagaagtgttaaactaattcacatggtagtgtagggccaacatacaagctaccagtctaatgtgtatagtagactttgggaaaagcgattttttttcatgtattcattctgaatagttgaaatgtatatttgtacagtcttttagacctattcaagtgatgctcatgatcctgttactgtgtgcccatcatagatttctttttttagtgttgcccttgctgtgtaataaacgctctatctagtttacctagcaaaagctcaaaactgcgctagtatggactttttggacagacttagtttttgcacataaccttgtacaatcttgcaacagaggccagccacgtaagatatatatctggactctcttgtattataggatttttcttgttctgaatatccttgacattacagctgtcaaaaacaaaaactggtatttcagatctgttttctgaaatcttttaagctaaaatcacatgcaagaattgactttgcagctactaattttgacaccttttagatctgtataaaagtgtgttgtgttgaagcagcaaaccaatgagtgctgcattttggatatttagttttatctttagttcaacaccatcatggtggattcatttataccatctaatatatgacacactgttgtagtatgtataattttgtgatctttattttccctttgtattcattttaagcatctaaataaattgctgtattgtgcttaatgtaaatatttgctttattacacatgacagtcctgtgtgtccatta

SEQ ID NO: 104245 - DNA, 773 bp, Homo sapiens
  Payload ID: 479
  Gene Symbol: ADNP
  Gene Name: activity-dependent neuroprotector homeobox
  ENST ID: ENST00000534467
  CDS Start-End: 256-773
gcacaatgcgaaacctaggccccagcttttacaccatgatgcgcagggttgtactttttgtactgaactgataggtggcctagtggttatgccctgtactaccattttgaggatctggactccgtttcctgccttgctctttggaccacattgtcaattcacaccgaataccgtagcagtaggcaggacagttccaattcaacaaaaacctctttaccctggcactcaaaactgtaatgatgatgaactgaaactatgttccaacttcctgtcaacaatcttggcagtttaagaaaagcccggaaaactgtgaaaaaaatacttagtgacattgggttggaatactgtaaagaacatatagaagattttaaacaatttgaacctaatgacttttatttgaaaaacactacatgggaggatgtaggactgtgggacccatcacttacgaaaaaccaggactatcggacaaaacctttctgctgcagcgcttgtccattttcctcaaaattcttctctgcctacaaaagtcatttccgcaatgtccatagtgaagactttgaaaataggattctccttaattgcccctactgtaccttcaatgcagacaaaaagactttggaaacacacattaaaatatttcatgctccgaacgccagcgcaccaagtagcagcctcagcactttcaaagataaaaacaaaaatgatggccttaaacctaagcaggctgacagtgtagagcaagctgtttattactgtaagaagtgcacttaccg

SEQ ID NO: 104246 - DNA, 6224 bp, Homo sapiens
  Payload ID: 479
  Gene Symbol: ADNP
  Gene Name: activity-dependent neuroprotector homeobox
  Uniprot ID: Q9H2P0
  ENST ID: ENST00000621696
  CDS Start-End: 430-3738
cggccgcggcgcgagccggagtccgccgagccggagcgcgacgaggccccgggcgcgccctccccgctgccgccaccgccgtgccgccgccatccgcccgccgccgccgccgctgtccggcccccgagcacgccggccccgcgcgcgcctcgaggccgagtcaaggtgtgagatgcacaatgcgaaacctaggccccagcttttacaccatgatgcgcagggttgtactttttgtactgaactgataggtggcctagtggttatgccctgtactaccattttgaggatctggactccgtttcctgccttgctctttggaccacattgtcaattcacaccgaataccgtagcagtaggcaggacagttccaattcaacaaaaacctctttaccctggcactcaaaactgtaatgatgatgaactgaaactatgttccaacttcctgtcaacaatcttggcagtttaagaaaagcccggaaaactgtgaaaaaaatacttagtgacattgggttggaatactgtaaagaacatatagaagattttaaacaatttgaacctaatgacttttatttgaaaaacactacatgggaggatgtaggactgtgggacccatcacttacgaaaaaccaggactatcggacaaaacctttctgctgcagcgcttgtccattttcctcaaaattcttctctgcctacaaaagtcatttccgcaatgtccatagtgaagactttgaaaataggattctccttaattgcccctactgtaccttcaatgcagacaaaaagactttggaaacacacattaaaatatttcatgctccgaacgccagcgcaccaagtagcagcctcagcactttcaaagataaaaacaaaaatgatggccttaaacctaagcaggctgacagtgtagagcaagctgtttattactgtaagaagtgcacttaccgagatcctctttatgaaatagttaggaagcacatttacagggaacattttcagcatgtggcagcaccttacatagcaaaggcaggagaaaaatcactcaatggggcagtccccttaggctcgaatgcccgagaagagagtagtattcactgcaagcgatgccttttcatgccaaagtcctatgaagctttggtacagcatgtcatcgaagaccatgaacgtataggctatcaggtcactgccatgattgggcacacaaatgtagtggttccccgatccaaacccttgatgctaattgctcccaaacctcaagacaagaagagcatgggactcccaccaaggatcggttcccttgcttctggaaatgtccggtctttaccatcacagcagatggtgaatcgactctcaataccaaagcctaacttaaattctacaggagtcaacatgatgtccagtgttcatctgcagcagaacaactatggagtcaaatctgtaggccagggttacagtgttggtcagtcaatgagactgggtctaggtggcaacgcaccagtttccattcctcaacaatctcagtctgtaaagcagttacttccaagtggaaacggaaggtcttatgggcttgggtcagagcagaggtcccaggcaccagcaagatactccctgcagtctgctaatgcctcttctctctcatcgggccagttaaagtctccttccctctctcagtcacaggcatccagagtgttaggtcagtccagttccaaacctgctgcagctgccacaggccctcccccaggtaacacttcctcaactcaaaagtggaaaatatgtacaatctgtaatgagctttttcctgaaaatgtctatagtgtgcacttcgaaaaagaacataaagctgagaaagtcccagcagtagccaactacattatgaaaatacacaattttactagcaaatgcctctactgtaatcgctatttacccacagatactctgctcaaccatatgttaattcatggtctgtcttgtccatattgccgttcaactttcaatgatgtggaaaagatggccgcacacatgcggatggttcacattgatgaagagatgggacctaaaacagattctactttgagttttgatttgacattgcagcagggtagtcacactaacatccatctcctggtaactacatacaatctgagggatgccccagctgaatctgttgcttaccatgcccaaaataatcctccagttcctccaaagccacagccaaaggttcaggaaaaggcagatatccctgtaaaaagttcacctcaagctgcagtgccctataaaaaagatgttgggaaaaccctttgtcctctttgcttttcaatcctaaaaggacccatatctgatgcacttgcacatcacttacgagagaggcaccaagttattcagacggttcatccagttgagaaaaagctcacctacaaatgtatccattgccttggtgtgtataccagcaacatgaccgcctcaactatcactctgcatctagttcactgcaggggcgttggaaagacccaaaatggccaggataagacaaatgcaccctctcggcttaatcagtctccaagtctggcacctgtgaagcgcacttacgagcaaatggaatttcccttactgaaaaaacgaaagttagatgatgatagtgattcacccagcttctttgaagagaagcctgaagagcctgttgttttagctttagaccccaagggtcatgaagatgattcctatgaagccaggaaaagctttctaacaaagtatttcaacaaacagccctatcccaccaggagagaaattgagaagctagcagccagtttatggttatggaagagtgacatcgcttcccattttagtaacaaaaggaagaagtgtgtccgtgattgtgaaaagtacaagcctggcgtgttgctggggtttaacatgaaagaattaaataaagtcaagcatgagatggattttgatgctgagtggctatttgaaaatcatgatgagaaggattccagagtcaatgctagtaagactgctgacaaaaagctcaaccttgggaaggaagatgacagttcctcagacagttttgaaaatttggaagaagaatccaatgaaagtggtagcccttttgaccctgtttttgaagttgaacctaaaatctctaacgataacccagaggaacatgtactgaaggtaattcctgaggatgcttcagaatctgaggagaagctagaccaaaaagaggatggttcaaaatacgaaactattcatttgactgaggaaccaaccaaactaatgcacaatgcatctgatagtgaggttgaccaagacgatgttgttgagtggaaagacggtgcttctccatctgagagtgggcctggatcccaacaagtgtcagactttgaggacaatacctgcgaaatgaaaccaggaacctggtctgacgagtcttcccaaagcgaagatgcaaggagcagtaagccagctgccaaaaaaaaggctaccatgcaaggtgacagagagcagttgaaatggaagaatagttcctatggaaaagttgaagggttttggtctaaggaccagtcacagtggaagaatgcatctgagaatgatgagcgcttatctaacccccagattgagtggcagaatagcacaattgacagtgaggatggggaacagtttgacaacatgactgatggagtagctgagcccatgcatggcagcttagccggagttaaactgagcagccaacaggcctaagtgccaggttccctggcgttggtgacatgctgcagcctggaactctgatatccagtgtgactgcaaagctgtcttctcactggtactgccttgtgagtactggttggactgtggggcatgtggccgctgcagttccagtggttatttctaagtctatgacaggacaggctgttcttgcttcagaaccttctctgacagacacggtaactaaatgtgaaaaaccaataagctggtgactcatgaatacacacgaggaaaagcagaggtttattttatctgccttttcaacatttctttccctctgtgaaatgattggtcagatgtctttgagaagtgttaaactaattcacatggtagtgtagggccaacatacaagctaccagtctaatgtgtatagtagactttgggaaaagcgattttttttcatgtattcattctgaatagttgaaatgtatatttgtacagtcttttagacctattcaagtgatgctcatgatcctgttactgtgtgcccatcatagatttctttttttagtgttgcccttgctgtgtaataaacgctctatctagtttacctagcaaaagctcaaaactgcgctagtatggactttttggacagacttagtttttgcacataaccttgtacaatcttgcaacagaggccagccacgtaagatatatatctggactctcttgtattataggatttttcttgttctgaatatccttgacattacagctgtcaaaaacaaaaactggtatttcagatctgttttctgaaatcttttaagctaaaatcacatgcaagaattgactttgcagctactaattttgacaccttttagatctgtataaaagtgtgttgtgttgaagcagcaaaccaatgagtgctgcattttggatatttagttttatctttagttcaacaccatcatggtggattcatttataccatctaatatatgacacactgttgtagtatgtataattttgtgatctttattttccctttgtattcattttaagcatctaaataaattgctgtattgtgcttaatgtaaatatttgctttattacacatgacagtcctgtgtgtccattatatcttttgccatttaatgccataactctttcatcagagatggcagccacagtcacagaggaaacttgtggaaaacccaagatctgtcatctgcaaatagaatgctttctcttgaggcacctggtacaaaatctgtttttcttttttttttttttttttttttttttttttaactgaaaaacaaacacccttgagtttttcagttcaccttttgttaaggagcagagcctgcatatatatgtaaatgtctcaatgataaaaaaaaaaatgtaaacatggattggcattaatttgcaagcagaatcttaatagcctgatgggttttttgtttgttttttcttctagatgaagttaaacgttcgttttcaccttacgatgggaacaactgtagtgcaggcggctctgcctctatttgccactcttggccctcttgctattaagggaaaggctttgaagagcacagcactgacagggctgtaaagatggaaggagctggtatttttaccatgcgtagattcccaagagaacttgtactaaaaagcagaaagttacaaggaagcagaattaggccaacatttccagcaattaaaacaatgatgggaaactccaatccatgaggaggctggtcagtcacctcaaggatagtggcctaaagaagtctgaagtggctgatgtccataacttctgagtctgtttccaaaagaaagactcttgttaatgctgttaccagagagtagagatttgaccagcctctccctaaaatgtaagcttctcaacaacagtacaggaagaagtgcaagagtagactagaacctttaaggaatttggggctggaacggagctatgttgcatctgttgttatacaggtagattataagttctacatgcaccagccaaaacttaggacaggatgtccccaaattaagatactacagattaccaaatcagaaataaccagctggatttaggccagctcacatttatttggaaattaccctccctgattaacaggcttctgagttgtacgtggaggactaatgagacttgtacaagacaccacggggcttggggtccaggtcccagttggatatcggaacagacacagataagtgtgtttcctcattaaggtggtgagagtgtgccttttggcattcagaaaagggtttagccaccctaagagttggaaataaagattcccaactggaaatgttgcagaatccctacaagtgtctcaataaaagccattttaaaagaatattgttgctactgtttgcttttcaaataatctggagatcgttggctatggcaacgtgctgccacctaattagagaatgcctgtaaatgtaggctgaacacttctaacatgagaaaacctaagtatcct

SEQ ID NO: 104247 - DNA, 2948 bp, Homo sapiens
  Payload ID: 480
  Gene Symbol: ARC
  Gene Name: activity-regulated cytoskeleton-associated protein
  Uniprot ID: Q7LC44
  ENST ID: ENST00000356613
  CDS Start-End: 202-1392
tcgggcgcggcgtcctccctccgcagcagccgagccggacctgcctccccgggcgtgctccgccggccccgccgccggcccgcagcgacagacaggcgctccccgcagctccgcacgggacccaggccgccggaccccagcgccggaccaccctctgtccgccccgaggagtttgccgcctgccggagcacctgcgcacagatggagctggaccaccggaccagcggcgggctccacgcctaccccgggccgcggggcgggcaggtggccaagcccaacgtgatcctgcagatcgggaagtgccgggccgagatgctggagcacgtgcggcggacgcaccggcacctgctggccgaggtgtccaagcaggtggagcgcgagctgaaggggctgcaccggtcggtcgggaagctggagagcaacctggacggctacgtgcccacgagcgactcgcagcgctggaagaagtccatcaaggcctgcctgtgccgctgccaggagaccatcgccaacctggagcgctgggtcaagcgcgagatgcacgtgtggcgcgaggtgttctaccgcctggagcgctgggccgaccgcctggagtccacgggcggcaagtacccggtgggcagcgagtcagcccgccacaccgtttccgtgggcgtggggggtcccgagagctactgccacgaggcagacggctacgactacaccgtcagcccctacgccatcaccccgcccccagccgctggcgagctgcccgggcaggagcccgccgaggcccagcagtaccagccgtgggtccccggcgaggacgggcagcccagccccggcgtggacacgcagatcttcgaggaccctcgagagttcctgagccacctagaggagtacttgcggcaggtgggcggctctgaggagtactggctgtcccagatccagaatcacatgaacgggccggccaagaagtggtgggagttcaagcagggctccgtgaagaactgggtggagttcaagaaggagttcctgcagtacagcgagggcacgctgtcccgagaggccatccagcgcgagctggacctgccgcagaagcagggcgagccgctggaccagttcctgtggcgcaagcgggacctgtaccagacgctctacgtggacgcggacgaggaggagatcatccagtacgtggtgggcaccctgcagcccaagctcaagcgtttcctgcgccaccccctgcccaagaccctggagcagctcatccagaggggcatggaggtgcaggatgacctggagcaggcggccgagccggccggcccccacctcccggtggaggatgaggcggagaccctcacgcccgcccccaacagcgagtccgtggccagtgaccggacccagcccgagtagagggcatcccggagcccccagcctgcccactacatccagcctgtggctttgcccaccaggacttttgagctggggctgactcctgcaggggaagccctggtccagctgggtgccccctcgagctccgggcggactcgcacacactcgtgtcatccagatgtgagcaccgcacccagcggcaaagagccctcccccctgcagggctccacccatcaccctccctccgtctgtctttccggcctggaccccaccctccacactctcaggccatcacagaacaccccagcttcctcattctgctacaacacccaggccctctggacatccagaaaaccaagtgtccggatggcaggggccagcggccaccaagctcatgggacacccagagcagaagctagggcagagccaatgctgagggagcctcgacttccggcgccgccgccctctcccggcatccgcagagccagctgacgccctccctgcctcccagggcagctggccagcctcgggcagcgcggccccctcctcccaggggagagtagaagtcgcacacgcagcagagcagacctgatgtcccggtgcttcctggcccctcagctccagtgattcacgcccgcctggagaagaatcagagctcagctcatgactcacccatggcaggcggagggtcccagaggggctgagtcctcaaatccggctgaggcagcagctggcaccatcagagccaggagagtgacaacaggtctcaaggttcccacaaagtctttgctgctgtgctgggcaccacccacccctcaccttgcaggctgcctgcgtgggaggcgaagtcccaggacagcccagaggggggctacagagaggagtcggctgcagcagagggcaggagccccagcttagccctgagcgccagcgcgaggaccagggcctgccactaagcccgccccgctggccgccagctgcccgtccccagagccactgcagcaggagtcgggccctgcctccctcccagcagggaaaccccgcccgctgccaggccatcctctctgccagaggctttcatgagccccaaggctggggccacagctcctacccctgcccagcagccctgagctcagctgcaggaaggacatcccagaagccatggctcctggggcgcttccaggcattctgccctgccccgacaccagaaccctggtgctggtgggccactagcgtctgcagcctaagcaggtgctggctcagggttcatcgttctgccttgtccactgggggaccagccctgcagaccactctgacaagtcttcagcccacaccctgccagccccacagattttatttttgcacataagccataaccaatcctcaaggctggcacaggctttggggaagccctggagcctgtgaagaccctggaaacctcatgaggctgtggccaacccctgccccttgccccacacagaccaggccttaaatgtcggtccaggccctgtgcaccttaccccagagacagactctttttgtaagattttgttaataaaacactgaaacttcctgga

SEQ ID NO: 104248 - DNA, 3220 bp, Homo sapiens
  Payload ID: 481
  Gene Symbol: APEH
  Gene Name: acylaminoacyl-peptide hydrolase
  Uniprot ID: P13798
  ENST ID: ENST00000296456
  CDS Start-End: 401-2599
ctcaaccccttctctcgtaggcccttctaccctccccgaagccgggctcccgggttccgcttccacagggccgccccctctcctccgagatccaacgcctcgcccctcggtaagaggcccaggactcagcccacggccccgccccccacttggctagtccgcccctggcgagacccctgctctcacccacccaggacttctcgctcccaggccgggtcctctcaccgtcaaggcccgccccctgccaacggtcctcacccattagccgaaggccccgcccctcacagattgccgcagggcaggggcggagacagcccgggccgtcccaggctccgcccccggaagcctcacttccgggcgcgagcacgccccgcctcgccccggcggcagagaggagactatggaacgtcaggtgctgctgagcgagcccgaggaggcggcggctctgtatcggggccttagccgccagcccgcgctgagcgccgcctgcctgggcccggaggtcaccacgcagtacggcggccaataccggacggtgcacactgagtggacccagagggacctggaacgcatggagaacattcgattctgccgccaatacctggtgttccatgacggggactcagtggtgtttgcaggacctgcaggcaacagtgtggagacccggggggaactgctgagcagagagtctccttcaggcaccatgaaagctgtgctgcgcaaggctggaggcacgggccctggggaagagaagcagttcctggaggtctgggagaagaaccggaagctcaagagcttcaacctgtcagcgctggagaaacatgggcctgtttatgaggatgactgctttggctgcctgtcctggtcgcactcggagacacacttgttgtatgtggcagagaagaagcgccccaaggccgagtccttctttcagaccaaagccttggacgtcagtgccagcgatgatgagatagccaggctgaagaagccagaccaagccatcaagggggatcagtttgtgttttatgaagactggggagaaaacatggtttccaaaagcatccctgtgctctgcgtgctggatgtcgagagtggcaacatctctgtgcttgagggggtccctgagaatgtgtcccctggacaggcattttgggcccctggagatgctggtgtggtgtttgtgggctggtggcatgagcccttccggttgggcatccgcttttgcaccaatcgcaggtcagccctgtattatgtggacctcatcggggggaagtgtgagctcctctcggatgactccctggctgtctcttctccccggctgagcccagaccaatgtcgcattgtctacctgcagtacccatctctgatcccccatcaccaatgcagccagctgtgcctgtatgactggtataccaaggttacctcagtggtggtagatgttgtgcctcggcagctgggagagaacttctctgggatctactgcagccttctgcctttgggatgctggtcagctgacagccagagagtggtctttgactcggctcagcgcagccggcaggacctgtttgctgtggacacccaagtgggcactgtgacctccctcacagctggagggtcaggtgggagctggaagttgctcacaattgaccaggacctcatggtggcacagttttccacacccagcctacctccaaccctgaaagttgggttcctgccttctgcagggaaggagcagtcagtgttgtgggtgtccctggaggaggccgagcccattcccgacatccactggggcatccgggtgctacagccacccccagagcaagagaatgtgcagtatgctggccttgactttgaagcaatcctgctgcagcctggcagccctccagataagacccaagtgcccatggtggtcatgccccacggggggccccattcatcctttgtcactgcctggatgctgttcccagccatgctttgcaagatgggctttgcggtactactagtgaactatcgtggctccacgggctttggccaggacagcatcctctccctcccaggcaatgtgggccaccaggatgtgaaggatgtccagtttgcagtggaacaggtgctccaggaggaacactttgatgcaagccatgtggcccttatgggtggttcccatggtggcttcatttcctgccacttgattggtcagtacccagagacctacagggcctgcgtggcccggaaccccgtgatcaacatcgcctccatgttgggctccactgacatccctgactggtgcgtggtggaggctggctttcctttcagcagtgactgcctgccagacctcagcgtgtgggctgagatgctggacaaatcgcccatcagatacatccctcaggtgaagacaccactgttactgatgttgggccaggaggaccggcgtgtgcccttcaagcagggcatggagtattaccgtgccctcaagacccggaatgtgcctgttcggctcctgctctatcccaaaagcacccacgcattatcagaggtggaggtggagtcagacagcttcatgaatgctgtgctctggctacgcacacacttgggcagctgaagccctgccattctgcatgagctgatcagcctgtgccacacttcgctcttgaggagctcaacggtctggcagggcagcaggaggctttctgggctctggactccacggatgcgtgggcagaggaatgtgggctatgtagtcataataaattaggacacagagcctggttcctgctggtactttgtaccaaaccatccccaaccccacctcccactctggggtgcagagaccctaggttctgggtgtggcagccacaagggcttcatctgcctccagtgtgagaagggagggaacagtgagaggcttagcctctgcctgtcctggcaaccaggactctgtaccagcctagcttccctgctgcagccccttccattagcaactactctgtaccacccttcccaagagtatgtctggaggactagtgtgaggccctgtctttccacggcacccatgggcaaaagtagtcccagggacattgccttggttggggaagcccctaggctggacagatcacctagcccagggtgtgctgggctcaagccacccgagccctagcaaggagtcactgacacatttcctggaagcaaaggctaagaagcatctgtacaggcataaagagga

SEQ ID NO: 104249 - DNA, 963 bp, Homo sapiens
  Payload ID: 481
  Gene Symbol: APEH
  Gene Name: acylaminoacyl-peptide hydrolase
  ENST ID: ENST00000447436
  CDS Start-End: 18-170
gcggcagagaggagactatggaacgtcaggtgctgctgagcgagcccgaggaggcggcggctctgtatcggggccttagccgccagcccgcgctgagcgccgcctgcctgggcccggaggtcaccacgcagtacggcggccaataccggacggtgcacactgactgctgagcagagagtctccttcaggcaccatgaaagctgtgctgcgcaaggctggaggcacgggccctggggaagagaagcagttcctggaggtctgggagaagaaccggaagctcaagagcttcaacctgtcagcgctggagaaacatgggcctgtttatgaggatgactgctttggctgcctgtcctggtcgcactcggagacacacttgttgtatgtggcagagaagaagcgccccaaggccgagtccttctttcagaccaaagccttggacgtcagtgccagcgatgatgagatagccaggctgaagaagccagaccaagccatcaaggcattttgggcccctggagatgctggtgtggtgtttgtgggctggtggcatgagcccttccggttgggcatccgcttttgcaccaatcgcaggtcagccctgtattatgtggacctcatcggggggaagtgtgagctcctctcggatgactccctggctgtctcttctccccggctgagcccagaccaatgtcgcattgtctacctgcagtacccatctctgatcccccatcaccaatgcagccagctgtgcctgtatgactggtataccaaggttacctcagtggtggtagatgttgtgcctcggcagctgggagagaacttctctgggatctactgcagccttctgcctttgggatgctggtcagctgacagccagagagtggtctttgactcggctcagcgcagccggcaggacctgtttgctgtggacacccaagtgggcactgtgacctccctcacagctgg

SEQ ID NO: 104250 - DNA, 924 bp, Homo sapiens
  Payload ID: 481
  Gene Symbol: APEH
  Gene Name: acylaminoacyl-peptide hydrolase
  ENST ID: ENST00000442186
  CDS Start-End: 1-924
acgccccgcctcgccccggcggcagagaggagactatggaacgtcagactgctgagcagagagtctccttcaggcaccatgaaagctgtgctgcgcaaggctggaggcacgggccctggggaagagaagcagttcctggaggtctgggagaagaaccggaagctcaagagcttcaacctgtcagcgctggagaaacatgggcctgtttatgaggatgactgctttggctgcctgtcctggtcgcactcggagacacacttgttgtatgtggcagagaagaagcgccccaaggccgagtccttctttcagaccaaagccttggacgtcagtgccagcgatgatgagatagccaggctgaagaagccagaccaagccatcaagggggatcagtttgtgttttatgaagactggggagaaaacatggtttccaaaagcatccctgtgctctgcgtgctggatgtcgagagtggcaacatctctgtgcttgagggggtccctgagaatgtgtcccctggacaggcattttgggcccctggagatgctggtgtggtgtttgtgggctggtggcatgagcccttccggttgggcatccgcttttgcaccaatcgcaggtcagccctgtattatgtggacctcatcggggggaagtgtgagctcctctcggatgactccctggctgtctcttctccccggctgagcccagaccaatgtcgcattgtctacctgcagtacccatctctgatcccccatcaccaatgcagccagctgtgcctgtatgactggtataccaaggttacctcagtggtggtagatgttgtgcctcggcagctgggagagaacttctctgggatctactgcagccttctgcctttgggatgctggtcagctgacagccagagagtggtctttgactcggctcagcgc

SEQ ID NO: 104251 - DNA, 708 bp, Homo sapiens
  Payload ID: 481
  Gene Symbol: APEH
  Gene Name: acylaminoacyl-peptide hydrolase
  ENST ID: ENST00000447541
  CDS Start-End: 1-165
actgctgagcagagagtctccttcaggcaccatgaaagctgtgctgcgcaaggctggaggcacgggccctggggaagagaagcagttcctggaggtctgggagaagaaccggaagctcaagagcttcaacctgtcagcgctggagaaacatgggcctgtttatgaggatgggggatcagtttgtgttttatgaagactggggagaaaacatggtttccaaaagcatccctgtgctctgcgtgctggatgtcgagagtggcaacatctctgtgcttgagggggtccctgagaatgtgtcccctggacaggcattttgggcccctggagatgctggtgtggtgtttgtgggctggtggcatgagcccttccggttgggcatccgcttttgcaccaatcgcaggtcagccctgtattatgtggacctcatcggggggaagtgtgagctcctctcggatgactccctggctgtctcttctccccggctgagcccagaccaatgtcgcattgtctacctgcagtacccatctctgatcccccatcaccaatgcagccagctgtgcctgtatgactggtataccaaggttacctcagtggtggtagatgttgtgcctcggcagctgggagagaacttctctgggatctactgcagccttctgcctttgggatgctggtcagctgacagccagagagtggtctttgactcggctc

SEQ ID NO: 104252 - DNA, 855 bp, Homo sapiens
  Payload ID: 481
  Gene Symbol: APEH
  Gene Name: acylaminoacyl-peptide hydrolase
  ENST ID: ENST00000446089
  CDS Start-End: 43-219
cgcgagcacgccccgcctcgccccggcggcagagaggagactatggaacgtcagactgctgagcagagagtctccttcaggcaccatgaaagctgtgctgcgcaaggctggaggcacgggccctggggaagagaagcagttcctggaggtctgggagaagaaccggaagctcaagagcttcaacctgtcagcgctggagaaacatgggcctgtttatgaggatgactgctttggctgcctgtcctggtcgcactcggagacacacttgttgtatgtggcagagaagaagcgccccaaggccgagtccttctttcagaccaaagccttggacgtcagtgccagcgatgatgagatagccaggctgaagaagccagaccaagccatcaaggcattttgggcccctggagatgctggtgtggtgtttgtgggctggtggcatgagcccttccggttgggcatccgcttttgcaccaatcgcaggtcagccctgtattatgtggacctcatcggggggaagtgtgagctcctctcggatgactccctggctgtctcttctccccggctgagcccagaccaatgtcgcattgtctacctgcagtacccatctctgatcccccatcaccaatgcagccagctgtgcctgtatgactggtataccaaggttacctcagtggtggtagatgttgtgcctcggcagctgggagagaacttctctgggatctactgcagccttctgcctttgggatgctggtcagctgacagccagagagtggtctttgactcggctcagcgcagccggcaggacctgtttgctgtggacacccaagtgggcactgtgacctccctcacagctgg

SEQ ID NO: 104253 - DNA, 853 bp, Homo sapiens
  Payload ID: 481
  Gene Symbol: APEH
  Gene Name: acylaminoacyl-peptide hydrolase
  ENST ID: ENST00000457042
  CDS Start-End: 1-853
caggtgctgctgagcgagcccgaggaggcggcggctctgtatcggggccttagccgccagcccgcgctgagcgccgcctgcctgggcccggaggtcaccacgcagtacggcggccaataccggacggtgcacactgagtggacccagagggacctggaacgcatggagaacattcgattctgccgccaatacctggtgttccatgacggggactcagtggtgtttgcaggacctgcaggcaacagtgtggagacccggggggaactgctgagcagagagtctccttcaggcaccatgaaagctgtgctgcgcaaggctggaggcacgggccctggggaagagaagcagttcctggaggtctgggagaagaaccggaagctcaagagcttcaacctgtcagcgctggagaaacatgggcctgtttatgaggatgactgctttggctgcctgtcctggtcgcactcggagacacacttgttgtatgtggcagagaagaagcgccccaaggccgagtccttctttcagaccaaagccttggacgtcagtgccagcgatgatgagatagccaggctgaagaagccagaccaagccatcaaggcattttgggcccctggagatgctggtgtggtgtttgtgggctggtggcatgagcccttccggttgggcatccgcttttgcaccaatcgcaggtcagccctgtattatgtggacctcatcggggggaagtgtgagctcctctcggatgactccctggctgtctcttctccccggctgagcccagaccaatgtcgcattgtctacctgcagtacccatctctgatcccccatcaccaatgcagccagctgtgcctgg

SEQ ID NO: 104254 - DNA, 825 bp, Homo sapiens
  Payload ID: 481
  Gene Symbol: APEH
  Gene Name: acylaminoacyl-peptide hydrolase
  ENST ID: ENST00000449966
  CDS Start-End: 129-825
tctcgtaggcccttctaccctccccgaagccgggctcccgggttccgcttccacagggccgccccctctcctccgagatccaacgcctcgcccctcgactgctgagcagagagtctccttcaggcaccatgaaagctgtgctgcgcaaggctggaggcacgggccctggggaagagaagcagttcctggaggtctgggagaagaaccggaagctcaagagcttcaacctgtcagcgctggagaaacatgggcctgtttatgaggatgactgctttggctgcctgtcctggtcgcactcggagacacacttgttgtatgtggcagagaagaagcgccccaaggccgagtccttctttcagaccaaagccttggacgtcagtgccagcgatgatgagatagccaggctgaagaagccagaccaagccatcaagggggatcagtttgtgttttatgaagactggggagaaaacatggtttccaaaagcatccctgtgctctgcgtgctggatgtcgagagtggcaacatctctgtgcttgagggggtccctgagaatgtgtcccctggacaggcattttgggcccctggagatgctggtgtggtgtttgtgggctggtggcatgagcccttccggttgggcatccgcttttgcaccaatcgcaggtcagccctgtattatgtggacctcatcggggggaagtgtgagctcctctcggatgactccctggctgtctcttctccccggctgagcccagaccaatgtcgcattgtctacctgcagtacccatctctgatcccccatcaccaatgcagccagctgtgcctgg

SEQ ID NO: 104255 - DNA, 2249 bp, Homo sapiens
  Payload ID: 481
  Gene Symbol: APEH
  Gene Name: acylaminoacyl-peptide hydrolase
  ENST ID: ENST00000438011
  CDS Start-End: 36-2249
acgccccgcctcgccccggcggcagagaggagactatggaacgtcaggtgctgctgagcgagcccgaggaggcggcggctctgtatcggggccttagccgccagcccgcgctgagcgccgcctgcctgggcccggaggtcaccacgcagtacggcggccaataccggacggtgcacactgagtggacccagagggacctggaacgcatggagaacattcgattctgccgccaatacctggtgttccatgacggggactcagtggtgtttgcaggacctgcaggcaacagtgtggagacccggggggaactgctgagcagagagtctccttcaggcaccatgaaagctgtgctgcgcaaggctggaggcacgggccctggggaagagaagcagttcctggaggtctgggagaagaaccggaagctcaagagcttcaacctgtcagcgctggagaaacatgggcctgtttatgaggatgactgctttggctgcctgtcctggtcgcactcggagacacacttgttgtatgtggcagagaagaagcgccccaaggccgagtccttctttcagaccaaagccttggacgtcagtgccagcgatgatgagatagccaggctgaagaagccagaccaagccatcaagggggatcagtttgtgttttatgaagactggggagaaaacatggtttccaaaagcatccctgtgctctgcgtgctggatgtcgagagtggcaacatctctgtgcttgagggggtccctgagaatgtgtcccctggacaggcattttgggcccctggagatgctggtgtggtgtttgtgggctggtggcatgagcccttccggttgggcatccgcttttgcaccaatcgcaggtcagccctgtattatgtggacctcatcggggggaagtgtgagctcctctcggatgactccctggctgtctcttctccccggctgagcccagaccaatgtcgcattgtctacctgcagtacccatctctgatcccccatcaccaatgcagccagctgtgcctgtatgactggtataccaaggttacctcagtggtggtagatgttgtgcctcggcagctgggagagaacttctctgggatctactgcagccttctgcctttgggatgctggtcagctgacagccagagagtggtctttgactcggctcagcgcagccggcaggacctgtttgctgtggacacccaagtgggcactgtgacctccctcacagctggagggtcaggtgggagctggaagttgctcacaattgaccaggacctcatggtggcacagttttccacacccagcctacctccaaccctgaaagttgggttcctgccttctgcagggaaggagcagtcagtgttgtgggtgtccctggaggaggccgagcccattcccgacatccactggggcatccgggtgctacagccacccccagagcaagagaatgtgcagtatgctggccttgactttgaagcaatcctgctgcagcctggcagccctccagataagacccaagtgcccatggtggtcatgccccacggggggccccattcatcctttgtcactgcctggatgctgttcccagccatgctttgcaagatgggctttgcggtactactagtgaactatcgtggctccacgggctttggccaggacagcatcctctccctcccaggcaatgtgggccaccaggatgtgaaggatgtccagtttgcagtggaacaggtgctccaggaggaacactttgatgcaagccatgtggcccttatgggtggttcccatggtggcttcatttcctgccacttgattggtcagtacccagagacctacagggcctgcgtggcccggaaccccgtgatcaacatcgcctccatgttgggctccactgacatccctgactgctcggtgtcttgcaggtgcgtggtggaggctggctttcctttcagcagtgactgcctgccagacctcagcgtgtgggctgagatgctggacaaatcgcccatcagatacatccctcaggtgaagacaccactgttactgatgttgggccaggaggaccggcgtgtgcccttcaagcagggcatggagtattaccgtgccctcaagacccggaatgtgcctgttcggctcctgctctatcccaaaagcacccacgcattatcagaggtggaggtggagtcagacagcttcatgaatgctgtgctctggctacgcacacacttgggcagctga

SEQ ID NO: 104256 - DNA, 830 bp, Homo sapiens
  Payload ID: 481
  Gene Symbol: APEH
  Gene Name: acylaminoacyl-peptide hydrolase
  ENST ID: ENST00000469362
  CDS Start-End: 1-144
cagagagtggtctttgactcggctcagcgcagccggcaggacctgtttgctgtggacacccaagtgggagctggaagttgctcacaattgaccaggacctcatggtggcacagttttccacacccagcctacctccaaccctgaaagttgggttcctgccttctgcagggaaggagcagtcagtgttgtgggtgtccctggaggaggccgagcccattcccgacatccactggggcatccgggtgctacagccacccccagagcaagagaatgtgcagtatgctggccttgactttgaagcaatcctgctgcagcctggcagccctccagataagacccaagtgcccatggtggtcatgccccacggggggccccattcatcctttgtcactgcctggatgctgttcccagccatgctttgcaagatgggctttgcggtactactagtgaactatcgtggctccacgggctttggccaggacagcatcctctccctcccaggcaatgtgggccaccaggatgtgaaggatgtccagtttgcagtggaacaggtgctccaggaggaacactttgatgcaagccatgtggcccttatgggtggttcccatggtggcttcatttcctgccacttgattggtcagtacccagagacctacagggcctgcgtggcccggaaccccgtgatcaacatcgcctccatgttgggctccactgacatccctgactggtgcgtggtggaggctggctttcctttcagcagtgactgcctgccagacctcagcgtgtgggctgagatgctggacaaatcgcccatcagatacatccctcag

SEQ ID NO: 104257 - DNA, 3573 bp, Homo sapiens
  Payload ID: 482
  Gene Symbol: ACBD3
  Gene Name: acyl-CoA binding domain containing 3
  Uniprot ID: Q9H3P7
  ENST ID: ENST00000366812
  CDS Start-End: 56-1642
ggaagtcgatacgtggctgccgtctgtccccgctgaggaggtgcagcagccggagatggcggcggtgctgaacgcagagcgactcgaggtgtccgtcgacggcctcacgctcagcccggacccggaggagcggcctggggcggagggcgccccgctgctgccgccaccgctgccaccgccctcgccacctggatccggtcgcggcccgggcgcctcaggggagcagcccgagcccggggaggcggcggctgggggcgcggcggaggaggcgcggcggctggagcagcgctggggtttcggcctggaggagttgtacggcctggcactgcgcttcttcaaagaaaaagatggcaaagcatttcatccaacttatgaagaaaaattgaagcttgtggcactgcataagcaagttcttatgggcccatataatccagacacttgtcctgaggttggattctttgatgtgttggggaatgacaggaggagagaatgggcagccctgggaaacatgtctaaagaggatgccatggtggagtttgtcaagctcttaaataggtgttgccatctcttttcaacatatgttgcgtcccacaaaatagagaaggaagagcaagaaaaaaaaaggaaggaggaagaggagcgaaggcggcgtgaagaggaagaaagagaacgtctgcaaaaggaggaagagaaacgtaggagagaagaagaggaaaggcttcgacgggaggaagaggaaaggagacggatagaagaagaaaggcttcggttggagcagcaaaagcagcagataatggcagctttaaactcccagactgccgtgcagttccagcagtatgcagcccaacagtatccagggaactacgaacagcagcaaattctcatccgccagttgcaggagcaacactatcagcagtacatgcagcagttgtatcaagtccagcttgcacagcaacaggcagcattacagaaacaacaggaagtagtagtggctgggtcttccttgcctacatcatcaaaagtgaatgcaactgtaccaagtaatatgatgtcagttaatggacaggccaaaacacacactgacagctccgaaaaagaactggaaccagaagctgcagaagaagccctggagaatggaccaaaagaatctcttccagtaatagcagctccatccatgtggacacgacctcagatcaaagacttcaaagagaagattcagcaggatgcagattccgtgattacagtgggccgaggagaagtggtcactgttcgagtacccacccatgaagaaggatcatatctcttttgggaatttgccacagacaattatgacattgggtttggggtgtattttgaatggacagactctccaaacactgctgtcagcgtgcatgtcagtgagtccagcgatgacgacgaggaggaagaagaaaacatcggttgtgaagagaaagccaaaaagaatgccaacaagcctttgctggatgagattgtgcctgtgtaccgacgggactgtcatgaggaggtgtatgctggcagccatcaatatccagggagaggagtctatctcctcaagtttgacaactcctactctttgtggcggtcaaaatcagtctactacagagtctattatactagataaaaatgttgttacaaagtctggagtctagggttgggcagaagatgacatttaatttggaaatttctttttacttttgtggagcattagagtcacagtttaccttattgatattggtctgatggtttgtgaactcttgctgggaatcaaaatttccttgagactctttagcattcatactttggggttaaaggagattcctcagactcatccagcccttgggtgctgaccagcagagtcactagtggatgctgaagttacatgagctacatgttaaatatttaaagtctccaaaataaaacaccccaacgttgaccttacccggctgatggttagccccttgctgcctgctccatgtgtcttatgagagcccgtagttacagtgtcctctaatttgaaatccataagttaacaagtctatatcaggtgcagctggctttgattaaaggccatttttaaaacttaaaaactcaacacctcacagattataatagaaaaagaaatggcctcagtttgatctcgttcagaatgacccagattgtttctgctttgggtgcagctgtttagttcagagttatattacagagaattattttctgagataatcttaaactagaatgttcaaaactaattgataattgaagtatcaagatacgtagaacacctcagagatttttcttcaggaacttccacaaactttgaatccttgtatctttatttggtattcatactactagtagcaaaatacaggttttttgttttgttttgttttgttttggcttcatagagtatctcaaattgaaacttttctgcacaaagaataaaattaaggattttataaactcaaattggcacctactgaattaaaatacataaaatcatttaaatataattcagcatatgggaagtaacattgcactaatatggaaatcactgccagagacagtctattttcttttaatttgttactacttagtcacaaaccccacattattccagtttggaattacttattaaggagaattggaaatacatatgcccatgcttaaattttatagctttaatttgtgttatttctttattgacgggaagaggtacatctttttttccttactgaaaacaaatatggattaattgcctcaaatttgtataagtgattggctagtgattcttgttttcagaagggagagtggtatagatagaaaatgacaaagatggcaatatacacttaatgttgttattgtatgttgttactgaagtacttagatttttaaaatttcaaatcctaaatcacttcttgtaggagggttttcattaactgcagtatatacagttcactacatatgggttgtttgagttttttgtgtgctgtatttctttctgttttttaatacctggttttgtacatatctaactctgttctcttttggttgttcagaaactggattttttttttcttaagcagtgcttaatttgtgttttttaattttgattcagaagtagtcccagctcataggtgttcatactgttacatccagaacatttgtcaggctctctgtcagctttcatgtacatatggtatagaaaccatggagttaggcacttcctggattttttttttatgagaaaaatactgtatttaaaatgtaaaataaacttttaaaaagcaggcactaatatatatttcttccagcctttgattacaaatttgtccttgcacatgttaagatgaattatctcctaaaaatatcattgttcttgggagcagtgtatgttactttacatagcagcggttcctgtcatgtgttcatgtcagaatatttttggttttaaactttcttattgcctttggctgttgattagtacagtacaagtgcgatttcaaaaagatcttgaaagtaatatatttaatcaattaaaatgtttatctgtaa

SEQ ID NO: 104258 - DNA, 1806 bp, Homo sapiens
  Payload ID: 483
  Gene Symbol: ACBD4
  Gene Name: acyl-CoA binding domain containing 4
  Uniprot ID: Q8NC06
  ENST ID: ENST00000321854
  CDS Start-End: 284-1201
ggcgagagaggacccaggtgtcctggcagtgggcgccgcggggcacacgctgggccaaggtgcaggcggccagggtgggagactgttcgccccgccctgagtactcctatcttgtttctccacctgttcgggagttggagatgtgcacctaaaggaggcgcatctggggacggacacatctggcactgaggccctcgccacctgcctcgccacctggcgaccctgaccccaccacactgccttgagagtcgctcaaaagtagggccccagggctcgcagcagcatgggcaccgagaaagaaagcccagagcccgactgccagaaacagttccaggctgcagtgagcgtcatccagaacctgcccaagaacggttcttaccgcccctcctatgaagagatgctgcgattctacagttactacaagcaggccaccatggggccctgcctggtcccccggcccgggttctgggaccccattggacgatataagtgggacgcctggaacagtctgggcaagatgagcagggaggaggccatgtctgcctacatcactgaaatgaaactggtggcacagaaggtgatcgacacagtgcccctgggtgaggtggcagaggacatgtttggttacttcgagcccctgtaccaggtgatccctgacatgccgaggcccccagagaccttcctgagaagggtcacaggttggaaagagcaggttgtgaatggagatgttggggctgtttcagagcctccctgcctccccaaggaaccggcacccccaagcccagagtcccattcacccagggacctggactccgaggttttctgtgattccctggagcagctggagcctgagctggtttggacagagcagcgggcagcatctggaggaaagcgtgatcccaggaacagccccgtgccccccacaaagaaagaggggttgcggggcagcccgccggggccccaggagttggacgtgtggctgctggggacagttcgagcactacaggagagcatgcaggaggtgcaggcgagggtgcagagcctggagagcatgccccggccccctgagcagaggccgcagcccaggcccagtgctcggccatggccccttgggctcccggggcccgcgctgctcttcttcctcctgtggcccttcgtcgtccagtggctcttccgaatgtttcggacccaaaagaggtgactgtcagtggaggggtctctgcagccaactgagactatcttgctgtgccctgagccttcctagggtttagaagaacagcattcaaaattccccgtcctgtcagtgtttgccttcgcacctcctcccctaaagcagcgcggggggcaaataagaccccacccctccctgcagcttcacagggacgcttccttccctccccgcaaccaccccaggctcccctgggaggctgcagttgtggtacacgtccccggtgctgggttggccgtgactcgggggcggggcgatcgggtctcagcccctgccttccccagtctctgggtcacccgaattttcccacccctgcttctccccgaggaggttgagctcttgagcaagttgggacttgggccggggcctggaagaatgattggctgggaggccgcgggagggaggccaggaggcccggaccagttgggaggagtgagcaggccccgggggagggggatgagcgcagtttgctcgctttcctcccctgccggccccctccgcccccacacacactcgggacgtcttcattgaagattcacttacaaaggaatgtttcactaaataaaagaaaaccagaa

SEQ ID NO: 104259 - DNA, 1453 bp, Homo sapiens
  Payload ID: 483
  Gene Symbol: ACBD4
  Gene Name: acyl-CoA binding domain containing 4
  Uniprot ID: Q8NC06
  ENST ID: ENST00000376955
  CDS Start-End: 298-1104
agccgcggggtggtggcgagagaggacccaggtgtcctggcagtgggcgccgcggggcacacgctgggccaaggtgcaggcggccagggtgggagactgttcgccccgccctgagtactcctatcttgtttctccacctgttcgggagttggagatgtgcacctaaaggaggcgcatctggggacggacacatctggcactgaggccctcgccacctgcctcgccacctggcgaccctgaccccaccacactgccttgagagtcgctcaaaagtagggccccagggctcgcagcagcatgggcaccgagaaagaaagcccagagcccgactgccagaaacagttccaggctgcagtgagcgtcatccagaacctgcccaagaacggttcttaccgcccctcctatgaagagatgctgcgattctacagttactacaagcaggccaccatggggccctgcctggtcccccggcccgggttctgggaccccattggacgatataagtgggacgcctggaacagtctgggcaagatgagcagggaggaggccatgtctgcctacatcactgaaatgaaactggtggcacagaaggtgatcgacacagtgcccctgggtgaggtggcagaggacatgtttggttacttcgagcccctgtaccaggtgatccctgacatgccgaggcccccagagaccttcctgagaagggtcacaggttggaaagagcaggttgtgaatggagatgttggggctgtttcagagcctccctgcctccccaaggaaccggcacccccaagcccagagtcccattcacccagggacctggactccgaggttttctgtgattccctggagcagctggagcctgagctgagcagcgggcagcatctggaggaaagcgtgatcccaggaacagccccgtgccccccacaaagaaagaggggttgcggggcagcccgccggggccccaggagttggacgtgtggctgctggggacagttcgagcactacaggagagcatgcaggaggtgcaggcgagggtgcagagcctggagagcatgccccggccccctgagcagtctcactctgtcggtcagactggagtgaagtggcgtgaactcagctcactgcaacctccgcctccccgggttcaagcaattctctgcctcagcctcccgagtagctgggattacaggcgcccaccaccatgcccggctaattttttttgtatttttagtagagacggggtttcaccatcttggccacgctggtcttgaactcctgacctcgtgaccacctgcctcggcctcccaaagtgctgggatgacaggcgtgagccatcccacccggtctgccacagtcattcttttttatgctcagacagtcacaactttggccattcaagaccctttcataccggatcttatgttcttataacacgacctgatgaatcttt

SEQ ID NO: 104260 - DNA, 1986 bp, Homo sapiens
  Payload ID: 483
  Gene Symbol: ACBD4
  Gene Name: acyl-CoA binding domain containing 4
  Uniprot ID: Q8NC06
  ENST ID: ENST00000398322
  CDS Start-End: 459-1376
agtaggaagccgcggggtggtggcgagagaggacccaggtgtcctggcagtgggcgccgcggggcacacgctgggccaaggtgcaggcggccagggtgggagactgttcgccccgccctgagtactcctatcttgtttctccacctgttcgggagttggagatgtgcacctaaaggaggcgcatctggggacggacacatctggcactgaggccctcgccacctgcctcgccacctggcgaccctgaccccaccacactgccttgaggtaggaaaaggaggctcctcaaccacaacttctgacctcccagggtgtctgaggcctctaaagagcttagtttgcccctctgggaagtgaatccttggcttatggtgccggggggaccctggaggccccctcacacgaaggctgcttcttgcagagtcgctcaaaagtagggccccagggctcgcagcagcatgggcaccgagaaagaaagcccagagcccgactgccagaaacagttccaggctgcagtgagcgtcatccagaacctgcccaagaacggttcttaccgcccctcctatgaagagatgctgcgattctacagttactacaagcaggccaccatggggccctgcctggtcccccggcccgggttctgggaccccattggacgatataagtgggacgcctggaacagtctgggcaagatgagcagggaggaggccatgtctgcctacatcactgaaatgaaactggtggcacagaaggtgatcgacacagtgcccctgggtgaggtggcagaggacatgtttggttacttcgagcccctgtaccaggtgatccctgacatgccgaggcccccagagaccttcctgagaagggtcacaggttggaaagagcaggttgtgaatggagatgttggggctgtttcagagcctccctgcctccccaaggaaccggcacccccaagcccagagtcccattcacccagggacctggactccgaggttttctgtgattccctggagcagctggagcctgagctggtttggacagagcagcgggcagcatctggaggaaagcgtgatcccaggaacagccccgtgccccccacaaagaaagaggggttgcggggcagcccgccggggccccaggagttggacgtgtggctgctggggacagttcgagcactacaggagagcatgcaggaggtgcaggcgagggtgcagagcctggagagcatgccccggccccctgagcagaggccgcagcccaggcccagtgctcggccatggccccttgggctcccggggcccgcgctgctcttcttcctcctgtggcccttcgtcgtccagtggctcttccgaatgtttcggacccaaaagaggtgactgtcagtggaggggtctctgcagccaactgagactatcttgctgtgccctgagccttcctagggtttagaagaacagcattcaaaattccccgtcctgtcagtgtttgccttcgcacctcctcccctaaagcagcgcggggggcaaataagaccccacccctccctgcagcttcacagggacgcttccttccctccccgcaaccaccccaggctcccctgggaggctgcagttgtggtacacgtccccggtgctgggttggccgtgactcgggggcggggcgatcgggtctcagcccctgccttccccagtctctgggtcacccgaattttcccacccctgcttctccccgaggaggttgagctcttgagcaagttgggacttgggccggggcctggaagaatgattggctgggaggccgcgggagggaggccaggaggcccggaccagttgggaggagtgagcaggccccgggggagggggatgagcgcagtttgctcgctttcctcccctgccggccccctccgcccccacacacactcgggacgtcttcattgaagattcacttacaaaggaatgtttcactaaataaaagaaaaccagaatcttc

SEQ ID NO: 104261 - DNA, 2026 bp, Homo sapiens
  Payload ID: 483
  Gene Symbol: ACBD4
  Gene Name: acyl-CoA binding domain containing 4
  Uniprot ID: Q8NC06
  ENST ID: ENST00000431281
  CDS Start-End: 470-1495
gcggtgcgagggcggggccaggcggtggcctggaagcccggagcctcagcgctcgcccctgctctgcctaagtgtctagagagctgagtgggttgcctcggatcggccaggcctggatatcagcgaacagatgcggatttccaccagggggcgctaggacgccacgacctttcactatgtgcaccagggggcgctgccgcccgccttggccatcccgggctgggaagtccgacccttcgattaagccccgcctgattgggaaaggctctgagaaactatttgcatgatcttgaaagagctgtgctgaatggttgaggtagttggagatgtgcacctaaaggaggcgcatctggggacggacacatctggcactgaggccctcgccacctgcctcgccacctggcgaccctgaccccaccacactgccttgagagtcgctcaaaagtagggccccagggctcgcagcagcatgggcaccgagaaagaaagcccagagcccgactgccagaaacagttccaggctgcagtgagcgtcatccagaacctgcccaagaacggttcttaccgcccctcctatgaagagatgctgcgattctacagttactacaagcaggccaccatggggccctgcctggtcccccggcccgggttctgggaccccattggacgatataagtgggacgcctggaacagtctgggcaagatgagcagggaggaggccatgtctgcctacatcactgaaatgaaactggtggcacagaaggtgatcgacacagtgcccctgggtgaggtggcagaggacatgtttggttacttcgagcccctgtaccaggtgatccctgacatgccgaggcccccagagaccttcctgagaagggtcacaggttggaaagagcaggttgtgaatggagatgttggggctgtttcagagcctccctgcctccccaaggaaccggcacccccaagcccagcttccctctgggcagtaactctaccaacccctccacagagtcccattcacccagggacctggactccgaggttttctgtgattccctggagcagctggagcctgagctggtttggacagagcagcgggcagcatctggaggaaagcgtgatcccaggaacagccccgtgccccccacaaagaaagaggggttgcggggcagcccgccggggccccaggagttggacgtgtggctgctggggacagttcgagcactacaggagagcatgcaggaggtgcaggcgagggtgcagagcctggagagcatgccccggccccctgagcagaggccgcagcccaggcccagtgctcggccatggccccttgggctcccggggcccgcgctgctcttcttcctcctgtggcccttcgtcgtccagtggctcttccgaatgtttcggacccaaaagaggtgactgtcagtggaggggtctctgcagccaactgagactatcttgctgtgccctgagccttcctagggtttagaagaacagcattcaaaattccccgtcctgtcagtgtttgccttcgcacctcctcccctaaagcagcgcggggggcaaataagaccccacccctccctgcagcttcacagggacgcttccttccctccccgcaaccaccccaggctcccctgggaggctgcagttgtggtacacgtccccggtgctgggttggccgtgactcgggggcggggcgatcgggtctcagcccctgccttccccagtctctgggtcacccgaattttcccacccctgcttctccccgaggaggttgagctcttgagcaagttgggacttgggccggggcctggaagaatgattggctgggaggccgcgggagggaggccaggaggcccggaccagttgggaggagtgagcaggccccgggggagggggatgagcgcagtttgctcgctttcctcccctgccggccccctccgcccccacacacactcgggacgtcttcattgaagattcacttacaaaggaatgtttcactaaataaaagaaaacc

SEQ ID NO: 104262 - DNA, 1579 bp, Homo sapiens
  Payload ID: 483
  Gene Symbol: ACBD4
  Gene Name: acyl-CoA binding domain containing 4
  Uniprot ID: Q8NC06
  ENST ID: ENST00000586346
  CDS Start-End: 345-1370
gatctgcgtcgccatcccggccctgctggaccccggggtcagtaggaagccgcggggtggtggcgagagaggacccaggtgtcctggcagtgggcgccgcggggcacacgctgggccaaggtgcaggcggccagggtgggagactgttcgccccgccctgagtactcctatcttgtttctccacctgttcgggagttggagatgtgcacctaaaggaggcgcatctggggacggacacatctggcactgaggccctcgccacctgcctcgccacctggcgaccctgaccccaccacactgccttgagagtcgctcaaaagtagggccccagggctcgcagcagcatgggcaccgagaaagaaagcccagagcccgactgccagaaacagttccaggctgcagtgagcgtcatccagaacctgcccaagaacggttcttaccgcccctcctatgaagagatgctgcgattctacagttactacaagcaggccaccatggggccctgcctggtcccccggcccgggttctgggaccccattggacgatataagtgggacgcctggaacagtctgggcaagatgagcagggaggaggccatgtctgcctacatcactgaaatgaaactggtggcacagaaggtgatcgacacagtgcccctgggtgaggtggcagaggacatgtttggttacttcgagcccctgtaccaggtgatccctgacatgccgaggcccccagagaccttcctgagaagggtcacaggttggaaagagcaggttgtgaatggagatgttggggctgtttcagagcctccctgcctccccaaggaaccggcacccccaagcccagcttccctctgggcagtaactctaccaacccctccacagagtcccattcacccagggacctggactccgaggttttctgtgattccctggagcagctggagcctgagctggtttggacagagcagcgggcagcatctggaggaaagcgtgatcccaggaacagccccgtgccccccacaaagaaagaggggttgcggggcagcccgccggggccccaggagttggacgtgtggctgctggggacagttcgagcactacaggagagcatgcaggaggtgcaggcgagggtgcagagcctggagagcatgccccggccccctgagcagaggccgcagcccaggcccagtgctcggccatggccccttgggctcccggggcccgcgctgctcttcttcctcctgtggcccttcgtcgtccagtggctcttccgaatgtttcggacccaaaagaggtgactgtcagtggaggggtctctgcagccaactgagactatcttgctgtgccctgagccttcctagggtttagaagaacagcattcaaaattccccgtcctgtcagtgtttgccttcgcacctcctcccctaaagcagcgcggggggcaaataagaccccacccctccctgcagcttcacagggacgcttccttccctccccgcaaccaccccaggctcccctgggaggctgcagttgtggtacacgtccccggtgctgggttggccgtgactcgggggcgg

SEQ ID NO: 104263 - DNA, 1998 bp, Homo sapiens
  Payload ID: 483
  Gene Symbol: ACBD4
  Gene Name: acyl-CoA binding domain containing 4
  Uniprot ID: Q8NC06
  ENST ID: ENST00000591859
  CDS Start-End: 438-1463
ggaagcccggagcctcagcgctcgcccctgctctgcctaagtgtctagagagctgagtgggttgcctcggatcggccaggcctggatatcagcgaacagatgcggatttccaccagggggcgctaggacgccacgacctttcactatgtgcaccagggggcgctgccgcccgccttggccatcccgggctgggaagtccgacccttcgattaagccccgcctgattgggaaaggctctgagaaactatttgcatgatcttgaaagagctgtgctgaatggttgaggagttggagatgtgcacctaaaggaggcgcatctggggacggacacatctggcactgaggccctcgccacctgcctcgccacctggcgaccctgaccccaccacactgccttgagagtcgctcaaaagtagggccccagggctcgcagcagcatgggcaccgagaaagaaagcccagagcccgactgccagaaacagttccaggctgcagtgagcgtcatccagaacctgcccaagaacggttcttaccgcccctcctatgaagagatgctgcgattctacagttactacaagcaggccaccatggggccctgcctggtcccccggcccgggttctgggaccccattggacgatataagtgggacgcctggaacagtctgggcaagatgagcagggaggaggccatgtctgcctacatcactgaaatgaaactggtggcacagaaggtgatcgacacagtgcccctgggtgaggtggcagaggacatgtttggttacttcgagcccctgtaccaggtgatccctgacatgccgaggcccccagagaccttcctgagaagggtcacaggttggaaagagcaggttgtgaatggagatgttggggctgtttcagagcctccctgcctccccaaggaaccggcacccccaagcccagcttccctctgggcagtaactctaccaacccctccacagagtcccattcacccagggacctggactccgaggttttctgtgattccctggagcagctggagcctgagctggtttggacagagcagcgggcagcatctggaggaaagcgtgatcccaggaacagccccgtgccccccacaaagaaagaggggttgcggggcagcccgccggggccccaggagttggacgtgtggctgctggggacagttcgagcactacaggagagcatgcaggaggtgcaggcgagggtgcagagcctggagagcatgccccggccccctgagcagaggccgcagcccaggcccagtgctcggccatggccccttgggctcccggggcccgcgctgctcttcttcctcctgtggcccttcgtcgtccagtggctcttccgaatgtttcggacccaaaagaggtgactgtcagtggaggggtctctgcagccaactgagactatcttgctgtgccctgagccttcctagggtttagaagaacagcattcaaaattccccgtcctgtcagtgtttgccttcgcacctcctcccctaaagcagcgcggggggcaaataagaccccacccctccctgcagcttcacagggacgcttccttccctccccgcaaccaccccaggctcccctgggaggctgcagttgtggtacacgtccccggtgctgggttggccgtgactcgggggcggggcgatcgggtctcagcccctgccttccccagtctctgggtcacccgaattttcccacccctgcttctccccgaggaggttgagctcttgagcaagttgggacttgggccggggcctggaagaatgattggctgggaggccgcgggagggaggccaggaggcccggaccagttgggaggagtgagcaggccccgggggagggggatgagcgcagtttgctcgctttcctcccctgccggccccctccgcccccacacacactcgggacgtcttcattgaagattcacttacaaaggaatgtttcactaaataaaagaaaaccagaa

SEQ ID NO: 104264 - DNA, 1684 bp, Homo sapiens
  Payload ID: 483
  Gene Symbol: ACBD4
  Gene Name: acyl-CoA binding domain containing 4
  ENST ID: ENST00000592162
  CDS Start-End: 302-1111
aggaagccgcggggtggtggcgagagaggacccaggtgtcctggcagtgggcgccgcggggcacacgctgggccaaggtgcaggcggccagggtgggagactgttcgccccgccctgagtactcctatcttgtttctccacctgttcgggagttggagatgtgcacctaaaggaggcgcatctggggacggacacatctggcactgaggccctcgccacctgcctcgccacctggcgaccctgaccccaccacactgccttgagagtcgctcaaaagtagggccccagggctcgcagcagcatgggcaccgagaaagaaagcccagagcccgactgccagaaacagttccaggctgcagtgagcgtcatccagaacctgcccaagaacggttcttaccgcccctcctatgaagagatgctgcgattctacagttactacaagcaggccaccatggggccctgcctggtcccccggcccgggttctgggaccccattggacgatataagtgggacgcctggaacagtctgggcaagatgagcagggaggaggccatgtctgcctacatcactgaaatgaaactggtggcacagaaggtgatcgacacagtgcccctgggtgaggtggcagaggacatgtttggttacttcgagcccctgtaccaggtgatccctgacatgccgaggcccccagagaccttcctgagaagggtcacaggttggaaagagcaggttgtgaatggagatgttggggctgtttcagagcctccctgcctccccaaggaaccggcacccccaagcccagagtcccattcacccagggacctggactccgaggttttctgtgattccctggagcagctggagcctgagctggtttggacagagcagcgggcagcatctggaggaaagcgtgatcccaggaacagccccgtgccccccacaaagaaagaggccgcagcccaggcccagtgctcggccatggccccttgggctcccggggcccgcgctgctcttcttcctcctgtggcccttcgtcgtccagtggctcttccgaatgtttcggacccaaaagaggtgactgtcagtggaggggtctctgcagccaactgagactatcttgctgtgccctgagccttcctagggtttagaagaacagcattcaaaattccccgtcctgtcagtgtttgccttcgcacctcctcccctaaagcagcgcggggggcaaataagaccccacccctccctgcagcttcacagggacgcttccttccctccccgcaaccaccccaggctcccctgggaggctgcagttgtggtacacgtccccggtgctgggttggccgtgactcgggggcggggcgatcgggtctcagcccctgccttccccagtctctgggtcacccgaattttcccacccctgcttctccccgaggaggttgagctcttgagcaagttgggacttgggccggggcctggaagaatgattggctgggaggccgcgggagggaggccaggaggcccggaccagttgggaggagtgagcaggccccgggggagggggatgagcgcagtttgctcgctttcctcccctgccggccccctccgcccccacacacactcgggacgtcttcattgaagattcacttacaaaggaatgtttcactaaataaaagaaaaccagaa

SEQ ID NO: 104265 - DNA, 494 bp, Homo sapiens
  Payload ID: 483
  Gene Symbol: ACBD4
  Gene Name: acyl-CoA binding domain containing 4
  ENST ID: ENST00000589798
  CDS Start-End: 38-154
agtcgctcaaaagtagggccccagggctcgcagcagcatgggcaccgagaaagaaagcccagagcccgactgccagaaacagttccaggctgcagtgagcgtcatccagaacctgcccaagaacgggacgcctggaacagtctgggcaagatgagcagggaggaggccatgtctgcctacatcactgaaatgaaactggtggcacagaaggtgatcgacacagtgcccctgggtgaggtggcagaggacatgtttggttacttcgagcccctgtaccaggtgatccctgacatgccgaggcccccagagaccttcctgagaagggtcacaggttggaaagagcaggttgtgaatggagatgttggggctgtttcagagcctccctgcctccccaaggaaccggcacccccaagcccagagtcccattcacccagggacctggactccgaggttttctgtgattccctggagcagctggagcctgagctggtgag

SEQ ID NO: 104266 - DNA, 1276 bp, Homo sapiens
  Payload ID: 483
  Gene Symbol: ACBD4
  Gene Name: acyl-CoA binding domain containing 4
  Uniprot ID: Q8NC06
  ENST ID: ENST00000619916
  CDS Start-End: 470-1276
gcggtgcgagggcggggccaggcggtggcctggaagcccggagcctcagcgctcgcccctgctctgcctaagtgtctagagagctgagtgggttgcctcggatcggccaggcctggatatcagcgaacagatgcggatttccaccagggggcgctaggacgccacgacctttcactatgtgcaccagggggcgctgccgcccgccttggccatcccgggctgggaagtccgacccttcgattaagccccgcctgattgggaaaggctctgagaaactatttgcatgatcttgaaagagctgtgctgaatggttgaggtagttggagatgtgcacctaaaggaggcgcatctggggacggacacatctggcactgaggccctcgccacctgcctcgccacctggcgaccctgaccccaccacactgccttgagagtcgctcaaaagtagggccccagggctcgcagcagcatgggcaccgagaaagaaagcccagagcccgactgccagaaacagttccaggctgcagtgagcgtcatccagaacctgcccaagaacggttcttaccgcccctcctatgaagagatgctgcgattctacagttactacaagcaggccaccatggggccctgcctggtcccccggcccgggttctgggaccccattggacgatataagtgggacgcctggaacagtctgggcaagatgagcagggaggaggccatgtctgcctacatcactgaaatgaaactggtggcacagaaggtgatcgacacagtgcccctgggtgaggtggcagaggacatgtttggttacttcgagcccctgtaccaggtgatccctgacatgccgaggcccccagagaccttcctgagaagggtcacaggttggaaagagcaggttgtgaatggagatgttggggctgtttcagagcctccctgcctccccaaggaaccggcacccccaagcccagagtcccattcacccagggacctggactccgaggttttctgtgattccctggagcagctggagcctgagctgagcagcgggcagcatctggaggaaagcgtgatcccaggaacagccccgtgccccccacaaagaaagaggggttgcggggcagcccgccggggccccaggagttggacgtgtggctgctggggacagttcgagcactacaggagagcatgcaggaggtgcaggcgagggtgcagagcctggagagcatgccccggccccctgagcagtctcactctgtcggtcagactggagtga

SEQ ID NO: 104267 - DNA, 1747 bp, Homo sapiens
  Payload ID: 484
  Gene Symbol: ACBD5
  Gene Name: acyl-CoA binding domain containing 5
  Uniprot ID: Q5T8D3
  ENST ID: ENST00000375888
  CDS Start-End: 66-1670
ggaactgacccgcttcgctcccgggcctcctccttttggggcatgttgatccgcggctgcgctccatgttccagtttcatgcaggctcttgggaaagctggtgctgctgctgcctgattcccgccgacagaccttgggaccggggccaacactggcagctggagatggcggacacgagatccgtgcacgagactaggtttgaggcggccgtgaaggtgatccagagtttgccgaagaatggttcattccagccaacaaatgaaatgatgcttaaattttatagcttctataagcaggcaactgaaggaccctgtaaactttcaaggcctggattttgggatcctattggaagatataaatgggatgcttggagttcactgggtgatatgaccaaagaggaagccatgattgcatatgttgaagaaatgaaaaagattattgaaactatgccaatgactgagaaagttgaagaattgctgcgtgtcataggtccattttatgaaattgtcgaggacaaaaagagtggcaggagttctgatataacctcagtccgactggagaaaatctctaaatgtttagaagatcttggtaatgttctcacttctactccaaacgccaaaaccgttaatggtaaagctgaaagcagtgacagtggagccgagtctgaggaagaagaggcccaagaagaagtgaaaggagcagaacaaagtgataatgataagaaaatgatgaagaagtcagcagaccataagaatttggaagtcattgtcactaatggctatgataaagatggctttgttcaggatatacagaatgacattcatgccagttcttccctgaatggcagaagcactgaagaagtaaagcccattgatgaaaacttggggcaaactggaaaatctgctgtttgcattcaccaagatataaatgatgatcatgttgaagatgttacaggaattcagcatttgacaagcgattcagacagtgaagtttactgtgattctatggaacaatttggacaagaagagtctttagacagctttacgtccaacaatggaccatttcagtattacttgggtggtcattccagtcaacccatggaaaattctggatttcgtgaagatattcaagtacctcctggaaatggcaacattgggaatatgcaggtggttgcagttgaaggaaaaggtgaagtcaagcatggaggagaagatggcaggaataacagcggagcaccacaccgggagaagcgaggcggagaaactgacgaattctctaatgttagaagaggaagaggacataggatgcaacacttgagcgaaggaaccaagggccggcaggtgggaagtggaggtgatggggagcgctggggctccgacagagggtcccgaggcagcctcaatgagcagatcgccctcgtgctgatgagactgcaggaggacatgcagaatgtccttcagagactgcagaaactggaaacgctgactgctttgcaggcaaaatcatcaacatcaacattgcagactgctcctcagcccacctcacagagaccatcttggtggcccttcgagatgtctcctggtgtgctaacgtttgccatcatatggccttttattgcacagtggttggtgtatttatactatcaaagaaggagaagaaaactgaactgaggaaaatggtgttttcctcaagaagactactggaactggatgacctcagaatgaactggattgtggtgttcacaaga

SEQ ID NO: 104268 - DNA, 4173 bp, Homo sapiens
  Payload ID: 484
  Gene Symbol: ACBD5
  Gene Name: acyl-CoA binding domain containing 5
  ENST ID: ENST00000375897
  CDS Start-End: 387-1958
tgcactgctgctgcggcggcggcggcgccagtgggtcctccggtgactctggggcggggctgtggggagggcacggactgacagacggactccggcggaatggggggtgtggctgctccgccagggtccccagggtgggagagcggctccgcggccaccgatgcccggaccccctctgtcttctgctagacatgctcttcctctcggtgagttgttttgctgtcgtcgcgggccggattcgtggccttagtcacgccccgggggaggaggaaggagccgggccgcttcgatctgtgtggcctggatagggcagggcaaaggggaactgacccgcttcgctcccgggcctcctccttttggggcatgttgatccgcggctgcgctccatgttccagtttcatgcaggctcttgggaaagctggtgctgctgctgcctgattcccgccgacagaccttgggaccggggccaacactggcagctggagatggcggacacgagatccgtgcacgagactaggtttgaggcggccgtgaaggtgatccagagtttgccgaagaatggttcattccagccaacaaatgaaatgatgcttaaattttatagcttctataagcaggcaactgaaggaccctgtaaactttcaaggcctggattttgggatcctattggaagatataaatgggatgcttggagttcactgggtgatatgaccaaagaggaagccatgattgcatatgttgaagaaatgaaaaagattattgaaactatgccaatgactgagaaagttgaagaattgctgcgtgtcataggtccattttatgaaattgtcgaggacaaaaagagtggcaggagttctgatataacctcagatcttggtaatgttctcacttctactccaaacgccaaaaccgttaatggtaaagctgaaagcagtgacagtggagccgagtctgaggaagaagaggcccaagaagaagtgaaaggagcagaacaaagtgataatgataagaaaatgatgaagaagtcagcagaccataagaatttggaagtcattgtcactaatggctatgataaagatggctttgttcaggatatacagaatgacattcatgccagttcttccctgaatggcagaagcactgaagaagtaaagcccattgatgaaaacttggggcaaactggaaaatctgctgtttgcattcaccaagatataaatgatgatcatgttgaagatgttacaggaattcagcatttgacaagcgattcagacagtgaagtttactgtgattctatggaacaatttggacaagaagagtctttagacagctttacgtccaacaatggaccatttcagtattacttgggtggtcattccagtcaacccatggaaaattctggatttcgtgaagatattcaagtacctcctggaaatggcaacattgggaatatgcaggtggttgcagttgaaggaaaaggtgaagtcaagcatggaggagaagatggcaggaataacagcggagcaccacaccgggagaagcgaggcggagaaactgacgaattctctaatgttagaagaggaagaggacataggatgcaacacttgagcgaaggaaccaagggccggcaggtgggaagtggaggtgatggggagcgctggggctccgacagagggtcccgaggcagcctcaatgagcagatcgccctcgtgctgatgagactgcaggaggacatgcagaatgtccttcagagactgcagaaactggaaacgctgactgctttgcaggcaaaatcatcaacatcaacattgcagactgctcctcagcccacctcacagagaccatcttggtggcccttcgagatgtctcctggtgtgctaacgtttgccatcatatggccttttattgcacagtggttggtgtatttatactatcaaagaaggagaagaaaactgaactgaggaaaatggtgttttcctcaagaagactactggaactggatgacctcagaatgaactggattgtggtgttcacaagaaaatcttagtttgtgatgattacattgctttttgttgtccagtagtttagtttgtgtacatatatacacatatatattttgcactacacaaacgataacattttaaggactaatattgctgatacttgaataatcaatctctactaggttataagtagtatacacagatttaccctgcccttgaacttgaaggacattaaattattaatgatcatttggtaacatgtttacctgattatcttccatagagtaacataagctgcttttcaaaggtaccattgtgataatgagatcaaatttataagttattatttttaattttctaaattaaataaaagaaagaatgcaaaccaggagtgaatttcaaatgagatgtaatcgactttatatcttagtcacggagttgccatggcatgtagtagaaaaccacaggaagaatggtcatattcactttgtgggctgcccataatctttcttgggcattcacaactcttgagtttggtgttcaggcatcattattaaaaagtggagtcctatgtaccagactgagtttttacaaatgatttgcaggctagacataacccactgatggaaatggtgaagaatgagcttcatgtaggtttaaaagtgtattctgagcctgtagatgattaatcaggtttttattcaatcatataaatgtattcctttgtaatcatttttgtttaactgaggatatctagtgtctgcttcatagggtgctttgaaatataaaatgaaaacttatttatactgtttttacaacagtcaaaaaggaaacacacgaaaatcacttttctgcaactgatgaactatatagactggactcttaacctcttagtgcctcagtttttccttcggggtatactattttagatacacctacttcacaggagtactggagggatttgcaagctaacgggccaaatgcttccataggaataaggcatgcccagctaacagaaatttaagtccctcttccccacctctctcatctagaccaaaaagaagactacaatttagatccttggagacttttcctgtatgccttccaaaacttcctgctcacttagatgtaccttgtgctttgaagatttctttgatgcagtctttgtaacaaataatttttttttttaaatggagtttctctcttgttgcccaggctggagggcaatggcgtgatcttggctcactgcaacttccacctcctgggttcaagtgattctcctgcctcactcccaagtagctgggattacaggcatgcaccaccatgcctggctaattttgtatttttagtagagacggggtttctccatgttggtaaggctgatctcaaactcccaacctcaggtgatctgcctgcctcggcctcccaaagtgctgggattagaggcgtgagccactgcacctggcctgtagcaaataatttttaagcattctcaagatgtatgatgttgggtttaacatcatatgttcacagtgttttaaataagaaataatctgtctttagtatacagaatggttctttgtttgcctgaaaagtataagaatacaatttacttttcccaaactctttttccttatttttttctttcaaataactttaattatttaatcccatactgattaaaatatgtctgtctaaagggatctactactatttgcttttaaaaaagtgttccctatttatttaggaaaaagtgaagcaagcaactgaatttatatgtaaaaataacatttagacctgtggatcaaagattattttcaaaaatgagatatcaatttggtatcagtaaaaagtgtcttttctcttagtatataaataaataaaatgcaaattaagagtgtaagcagttgtgaatcattacaagcagtctgggataactaactcctagggataaccatttctatcctgttccaaagtcttattttatagtttgaaaagcactttgcacacagttcttgtatataaaagtaaagatgtaattataggatatagtgttcctgctttgtttaataagaacctcatttaaacttgacagctatggtatttttttaatgataacttcttttctgtttattgtaaaactaagttaaaaataaaaggttaatgagaaatg

SEQ ID NO: 104269 - DNA, 3685 bp, Homo sapiens
  Payload ID: 484
  Gene Symbol: ACBD5
  Gene Name: acyl-CoA binding domain containing 5
  Uniprot ID: Q5T8D3
  ENST ID: ENST00000375901
  CDS Start-End: 222-1472
accggacaggccttgtccggcaataccaagtttcatgcaggctcttgggaaagctggtgctgctgctgcctgattcccgccgacagaccttgggaccggggccaacactggcagctggagatggcggacacgagatccgtgcacgagactaggtttgaggcggccgtgaaggtgatccagagtttgccgaagaatgggatgcttggagttcactgggtgatatgaccaaagaggaagccatgattgcatatgttgaagaaatgaaaaagattattgaaactatgccaatgactgagaaagttgaagaattgctgcgtgtcataggtccattttatgaaattgtcgaggacaaaaagagtggcaggagttctgatataacctcagatcttggtaatgttctcacttctactccaaacgccaaaaccgttaatggtaaagctgaaagcagtgacagtggagccgagtctgaggaagaagaggcccaagaagaagtgaaaggagcagaacaaagtgataatgataagaaaatgatgaagaagtcagcagaccataagaatttggaagtcattgtcactaatggctatgataaagatggctttgttcaggatatacagaatgacattcatgccagttcttccctgaatggcagaagcactgaagaagtaaagcccattgatgaaaacttggggcaaactggaaaatctgctgtttgcattcaccaagatataaatgatgatcatgttgaagatgttacaggaattcagcatttgacaagcgattcagacagtgaagtttactgtgattctatggaacaatttggacaagaagagtctttagacagctttacgtccaacaatggaccatttcagtattacttgggtggtcattccagtcaacccatggaaaattctggatttcgtgaagatattcaagtacctcctggaaatggcaacattgggaatatgcaggtggttgcagttgaaggaaaaggtgaagtcaagcatggaggagaagatggcaggaataacagcggagcaccacaccgggagaagcgaggcggagaaactgacgaattctctaatgttagaagaggaagaggacataggatgcaacacttgagcgaaggaaccaagggccggcaggtgggaagtggaggtgatggggagcgctggggctccgacagagggtcccgaggcagcctcaatgagcagatcgccctcgtgctgatgagactgcaggaggacatgcagaatgtccttcagagactgcagaaactggaaacgctgactgctttgcaggcaaaatcatcaacatcaacattgcagactgctcctcagcccacctcacagagaccatcttggtggcccttcgagatgtctcctggtgtgctaacgtttgccatcatatggccttttattgcacagtggttggtgtatttatactatcaaagaaggagaagaaaactgaactgaggaaaatggtgttttcctcaagaagactactggaactggatgacctcagaatgaactggattgtggtgttcacaagaaaatcttagtttgtgatgattacattgctttttgttgtccagtagtttagtttgtgtacatatatacacatatatattttgcactacacaaacgataacattttaaggactaatattgctgatacttgaataatcaatctctactaggttataagtagtatacacagatttaccctgcccttgaacttgaaggacattaaattattaatgatcatttggtaacatgtttacctgattatcttccatagagtaacataagctgcttttcaaaggtaccattgtgataatgagatcaaatttataagttattatttttaattttctaaattaaataaaagaaagaatgcaaaccaggagtgaatttcaaatgagatgtaatcgactttatatcttagtcacggagttgccatggcatgtagtagaaaaccacaggaagaatggtcatattcactttgtgggctgcccataatctttcttgggcattcacaactcttgagtttggtgttcaggcatcattattaaaaagtggagtcctatgtaccagactgagtttttacaaatgatttgcaggctagacataacccactgatggaaatggtgaagaatgagcttcatgtaggtttaaaagtgtattctgagcctgtagatgattaatcaggtttttattcaatcatataaatgtattcctttgtaatcatttttgtttaactgaggatatctagtgtctgcttcatagggtgctttgaaatataaaatgaaaacttatttatactgtttttacaacagtcaaaaaggaaacacacgaaaatcacttttctgcaactgatgaactatatagactggactcttaacctcttagtgcctcagtttttccttcggggtatactattttagatacacctacttcacaggagtactggagggatttgcaagctaacgggccaaatgcttccataggaataaggcatgcccagctaacagaaatttaagtccctcttccccacctctctcatctagaccaaaaagaagactacaatttagatccttggagacttttcctgtatgccttccaaaacttcctgctcacttagatgtaccttgtgctttgaagatttctttgatgcagtctttgtaacaaataatttttttttttaaatggagtttctctcttgttgcccaggctggagggcaatggcgtgatcttggctcactgcaacttccacctcctgggttcaagtgattctcctgcctcactcccaagtagctgggattacaggcatgcaccaccatgcctggctaattttgtatttttagtagagacggggtttctccatgttggtaaggctgatctcaaactcccaacctcaggtgatctgcctgcctcggcctcccaaagtgctgggattagaggcgtgagccactgcacctggcctgtagcaaataatttttaagcattctcaagatgtatgatgttgggtttaacatcatatgttcacagtgttttaaataagaaataatctgtctttagtatacagaatggttctttgtttgcctgaaaagtataagaatacaatttacttttcccaaactctttttccttatttttttctttcaaataactttaattatttaatcccatactgattaaaatatgtctgtctaaagggatctactactatttgcttttaaaaaagtgttccctatttatttaggaaaaagtgaagcaagcaactgaatttatatgtaaaaataacatttagacctgtggatcaaagattattttcaaaaatgagatatcaatttggtatcagtaaaaagtgtcttttctcttagtatataaataaataaaatgcaaattaagagtgtaagcagttgtgaatcattacaagcagtctgggataactaactcctagggataaccatttctatcctgttccaaagtcttattttatagtttgaaaagcactttgcacacagttcttgtatataaaagtaaagatgtaattataggatatagtgttcctgctttgtttaataagaacctcatttaaacttgacagctatggtatttttttaatgataacttcttttctgtttattgtaaaactaagttaaaaataaaaggttaatgagaaa

SEQ ID NO: 104270 - DNA, 3848 bp, Homo sapiens
  Payload ID: 484
  Gene Symbol: ACBD5
  Gene Name: acyl-CoA binding domain containing 5
  Uniprot ID: Q5T8D3
  ENST ID: ENST00000375905
  CDS Start-End: 163-1635
taagcccgcggggcagggcgaggggcgggcgtcggggacattaccggacaggccttgtccggcaataccaagtttcatgcaggctcttgggaaagctggtgctgctgctgcctgattcccgccgacagaccttgggaccggggccaacactggcagctggagatggcggacacgagatccgtgcacgagactaggtttgaggcggccgtgaaggtgatccagagtttgccgaagaatggttcattccagccaacaaatgaaatgatgcttaaattttatagcttctataagcaggcaactgaaggaccctgtaaactttcaaggcctggattttgggatcctattggaagatataaatgggatgcttggagttcactgggtgatatgaccaaagaggaagccatgattgcatatgttgaagaaatgaaaaagattattgaaactatgccaatgactgagaaagttgaagaattgctgcgtgtcataggtccattttatgaaattgtcgaggacaaaaagagtggcaggagttctgatataacctcagatcttggtaatgttctcacttctactccaaacgccaaaaccgttaatggtaaagctgaaagcagtgacagtggagccgagtctgaggaagaagaggcccaagaagaagtgaaaggagcagaacaaagtgataatgataagaaaatgatgaagaagtcagcagaccataagaatttggaagtcattgtcactaatggctatgataaagatggctttgttcaggatatacagaatgacattcatgccagttcttccctgaatggcagaagcactgaagaagtaaagcccattgatgaaaacttggggcaaactggaaaatctgctgtttgcattcaccaagatataaatgatgatcatgttgaagatgttacaggaattcagcatttgacaagcgattcagacagtgaagtttactgtgattctatggaacaatttggacaagaagagtctttagacagctttacgtccaacaatggaccatttcagtattacttgggtggtcattccagtcaacccatggaaaattctggatttcgtgaagatattcaagtacctcctggaaatggcaacattgggaatatgcaggtggttgcagttgaaggaaaaggtgaagtcaagcatggaggagaagatggcaggaataacagcggagcaccacaccgggagaagcgaggcggagaaactgacgaattctctaatgttagaagaggaagaggacataggatgcaacacttgagcgaaggaaccaagggccggcaggtgggaagtggaggtgatggggagcgctggggctccgacagagggtcccgaggcagcctcaatgagcagatcgccctcgtgctgatgagactgcaggaggacatgcagaatgtccttcagagactgcagaaactggaaacgctgactgctttgcaggcaaaatcatcaacatcaacattgcagactgctcctcagcccacctcacagagaccatcttggtggcccttcgagatgtctcctggtgtgctaacgtttgccatcatatggccttttattgcacagtggttggtgtatttatactatcaaagaaggagaagaaaactgaactgaggaaaatggtgttttcctcaagaagactactggaactggatgacctcagaatgaactggattgtggtgttcacaagaaaatcttagtttgtgatgattacattgctttttgttgtccagtagtttagtttgtgtacatatatacacatatatattttgcactacacaaacgataacattttaaggactaatattgctgatacttgaataatcaatctctactaggttataagtagtatacacagatttaccctgcccttgaacttgaaggacattaaattattaatgatcatttggtaacatgtttacctgattatcttccatagagtaacataagctgcttttcaaaggtaccattgtgataatgagatcaaatttataagttattatttttaattttctaaattaaataaaagaaagaatgcaaaccaggagtgaatttcaaatgagatgtaatcgactttatatcttagtcacggagttgccatggcatgtagtagaaaaccacaggaagaatggtcatattcactttgtgggctgcccataatctttcttgggcattcacaactcttgagtttggtgttcaggcatcattattaaaaagtggagtcctatgtaccagactgagtttttacaaatgatttgcaggctagacataacccactgatggaaatggtgaagaatgagcttcatgtaggtttaaaagtgtattctgagcctgtagatgattaatcaggtttttattcaatcatataaatgtattcctttgtaatcatttttgtttaactgaggatatctagtgtctgcttcatagggtgctttgaaatataaaatgaaaacttatttatactgtttttacaacagtcaaaaaggaaacacacgaaaatcacttttctgcaactgatgaactatatagactggactcttaacctcttagtgcctcagtttttccttcggggtatactattttagatacacctacttcacaggagtactggagggatttgcaagctaacgggccaaatgcttccataggaataaggcatgcccagctaacagaaatttaagtccctcttccccacctctctcatctagaccaaaaagaagactacaatttagatccttggagacttttcctgtatgccttccaaaacttcctgctcacttagatgtaccttgtgctttgaagatttctttgatgcagtctttgtaacaaataatttttttttttaaatggagtttctctcttgttgcccaggctggagggcaatggcgtgatcttggctcactgcaacttccacctcctgggttcaagtgattctcctgcctcactcccaagtagctgggattacaggcatgcaccaccatgcctggctaattttgtatttttagtagagacggggtttctccatgttggtaaggctgatctcaaactcccaacctcaggtgatctgcctgcctcggcctcccaaagtgctgggattagaggcgtgagccactgcacctggcctgtagcaaataatttttaagcattctcaagatgtatgatgttgggtttaacatcatatgttcacagtgttttaaataagaaataatctgtctttagtatacagaatggttctttgtttgcctgaaaagtataagaatacaatttacttttcccaaactctttttccttatttttttctttcaaataactttaattatttaatcccatactgattaaaatatgtctgtctaaagggatctactactatttgcttttaaaaaagtgttccctatttatttaggaaaaagtgaagcaagcaactgaatttatatgtaaaaataacatttagacctgtggatcaaagattattttcaaaaatgagatatcaatttggtatcagtaaaaagtgtcttttctcttagtatataaataaataaaatgcaaattaagagtgtaagcagttgtgaatcattacaagcagtctgggataactaactcctagggataaccatttctatcctgttccaaagtcttattttatagtttgaaaagcactttgcacacagttcttgtatataaaagtaaagatgtaattataggatatagtgttcctgctttgtttaataagaacctcatttaaacttgacagctatggtatttttttaatgataacttcttttctgtttattgtaaaactaagttaaaaataaaaggttaatgagaaa

SEQ ID NO: 104271 - DNA, 3921 bp, Homo sapiens
  Payload ID: 484
  Gene Symbol: ACBD5
  Gene Name: acyl-CoA binding domain containing 5
  Uniprot ID: Q5T8D3
  ENST ID: ENST00000396271
  CDS Start-End: 128-1705
gggagggcacggactgacagacggactccggcggaatggggggtgtggctgctccgccagggtccccagggtgggagagcggctccgcggccaccgatgcccggaccccctctgtcttctgctagacatgctcttcctctcgtttcatgcaggctcttgggaaagctggtgctgctgctgcctgattcccgccgacagaccttgggaccggggccaacactggcagctggagatggcggacacgagatccgtgcacgagactaggtttgaggcggccgtgaaggtgatccagagtttgccgaagaatggttcattccagccaacaaatgaaatgatgcttaaattttatagcttctataagcaggcaactgaaggaccctgtaaactttcaaggcctggattttgggatcctattggaagatataaatgggatgcttggagttcactgggtgatatgaccaaagaggaagccatgattgcatatgttgaagaaatgaaaaagattattgaaactatgccaatgactgagaaagttgaagaattgctgcgtgtcataggtccattttatgaaattgtcgaggacaaaaagagtggcaggagttctgatataacctcagatcttggtaatgttctcacttctactccaaacgccaaaaccgttaatggtaaagctgaaagcagtgacagtggagccgagtctgaggaagaagaggcccaagaagaagtgaaaggagcagaacaaagtgataatgataagaaaatgatgaagaagtcagcagaccataagaatttggaagtcattgtcactaatggctatgataaagatggctttgttcaggatatacagaatgacattcatgccagttcttccctgaatggcagaagcactgaagaagtaaagcccattgatgaaaacttggggcaaactggaaaatctgctgtttgcattcaccaagatataaatgatgatcatgttgaagatgttacaggaattcagcatttgacaagcgattcagacagtgaagtttactgtgattctatggaacaatttggacaagaagagtctttagacagctttacgtccaacaatggaccatttcagtattacttgggtggtcattccagtcaacccatggaaaattctggatttcgtgaagatattcaagtacctcctggaaatggcaacattgggaatatgcaggtggttgcagttgaaggaaaaggtgaagtcaagcatggaggagaagatggcaggaataacagcggagcaccacaccgggagaagcgaggcggagaaactgacgaattctctaatgttagaagaggaagaggacataggatgcaacacttgagcgaaggaaccaagggccggcaggtgggaagtggaggtgatggggagcgctggggctccgacagagggtcccgaggcagcctcaatgagcagatcgccctcgtgctgatgagactgcaggaggacatgcagaatgtccttcagagactgcagaaactggaaacgctgactgctttgcaggcaaaatcatcaacatcaacattgcagactgctcctcagcccacctcacagagaccatcttggtggcccttcgagatgtctcctggtgtgctaacgtttgccatcatatggccttttattgcacagtggttggtgtatttatactatcaaagaaggagaagaaaactgaactgaggaaaatggtgttttcctcaagaagactactggaactggatgacctcagaatgaactggattgtggtgttcacaagaaaatcttagtttgtgatgattacattgctttttgttgtccagtagtttagtttgtgtacatatatacacatatatattttgcactacacaaacgataacattttaaggactaatattgctgatacttgaataatcaatctctactaggttataagtagtatacacagatttaccctgcccttgaacttgaaggacattaaattattaatgatcatttggtaacatgtttacctgattatcttccatagagtaacataagctgcttttcaaaggtaccattgtgataatgagatcaaatttataagttattatttttaattttctaaattaaataaaagaaagaatgcaaaccaggagtgaatttcaaatgagatgtaatcgactttatatcttagtcacggagttgccatggcatgtagtagaaaaccacaggaagaatggtcatattcactttgtgggctgcccataatctttcttgggcattcacaactcttgagtttggtgttcaggcatcattattaaaaagtggagtcctatgtaccagactgagtttttacaaatgatttgcaggctagacataacccactgatggaaatggtgaagaatgagcttcatgtaggtttaaaagtgtattctgagcctgtagatgattaatcaggtttttattcaatcatataaatgtattcctttgtaatcatttttgtttaactgaggatatctagtgtctgcttcatagggtgctttgaaatataaaatgaaaacttatttatactgtttttacaacagtcaaaaaggaaacacacgaaaatcacttttctgcaactgatgaactatatagactggactcttaacctcttagtgcctcagtttttccttcggggtatactattttagatacacctacttcacaggagtactggagggatttgcaagctaacgggccaaatgcttccataggaataaggcatgcccagctaacagaaatttaagtccctcttccccacctctctcatctagaccaaaaagaagactacaatttagatccttggagacttttcctgtatgccttccaaaacttcctgctcacttagatgtaccttgtgctttgaagatttctttgatgcagtctttgtaacaaataatttttttttttaaatggagtttctctcttgttgcccaggctggagggcaatggcgtgatcttggctcactgcaacttccacctcctgggttcaagtgattctcctgcctcactcccaagtagctgggattacaggcatgcaccaccatgcctggctaattttgtatttttagtagagacggggtttctccatgttggtaaggctgatctcaaactcccaacctcaggtgatctgcctgcctcggcctcccaaagtgctgggattagaggcgtgagccactgcacctggcctgtagcaaataatttttaagcattctcaagatgtatgatgttgggtttaacatcatatgttcacagtgttttaaataagaaataatctgtctttagtatacagaatggttctttgtttgcctgaaaagtataagaatacaatttacttttcccaaactctttttccttatttttttctttcaaataactttaattatttaatcccatactgattaaaatatgtctgtctaaagggatctactactatttgcttttaaaaaagtgttccctatttatttaggaaaaagtgaagcaagcaactgaatttatatgtaaaaataacatttagacctgtggatcaaagattattttcaaaaatgagatatcaatttggtatcagtaaaaagtgtcttttctcttagtatataaataaataaaatgcaaattaagagtgtaagcagttgtgaatcattacaagcagtctgggataactaactcctagggataaccatttctatcctgttccaaagtcttattttatagtttgaaaagcactttgcacacagttcttgtatataaaagtaaagatgtaattataggatatagtgttcctgctttgtttaataagaacctcatttaaacttgacagctatggtatttttttaatgataacttcttttctgtttattgtaaaactaagttaaaaataaaaggttaatgagaaatga

SEQ ID NO: 104272 - DNA, 876 bp, Homo sapiens
  Payload ID: 484
  Gene Symbol: ACBD5
  Gene Name: acyl-CoA binding domain containing 5
  ENST ID: ENST00000412279
  CDS Start-End: 123-876
ttaccggacaggccttgtccggcaataccaagtttcatgcaggctcttgggaaagctggtgctgctgctgcctgattcccgccgacagaccttgggaccggggccaacactggcagctggagatggcggacacgagatccgtgcacgagactaggtttgaggcggccgtgaaggtgatccagagtttgccgaagaatggttcattccagccaacaaatgaaatgatgcttaaattttatagcttctataagcaggcaactgaaggaccctgtaaactttcaaggcctggattttgggatcctattggaagatataaatgggatgcttggagttcactgggtgatatgaccaaagaggaagccatgattgcatatgttgaagaaatgaaaaagattattgaaactatgccaatgactgagaaagttgaagaattgctgcgtgtcataggtccattttatgaaattgtcgaggacaaaaagagtggcaggagttctgatataacctcagtccgactggagaaaatctctaaatgtttagaagatcttggtaatgttctcacttctactccaaacgccaaaaccgttaatggtaaagctgaaagcagtgacagtggagccgagtctgaggaagaagaggcccaagaagaagtgaaaggagcagaacaaagtgataatgataagaaaatgatgaagaagtcagcagaccataagaatttggaagtcattgtcactaatggctatgataaagatggctttgttcaggatatacagaatgacattcatgccagttcttccctgaatggcagaagcactgaagaagtaaagcccattgatgaaaacttggggcaaactggaaaatctgctgtttgcattcacc

SEQ ID NO: 104273 - DNA, 1014 bp, Homo sapiens
  Payload ID: 484
  Gene Symbol: ACBD5
  Gene Name: acyl-CoA binding domain containing 5
  ENST ID: ENST00000426079
  CDS Start-End: 258-1014
agtgggtcctccggtgactctggggcggggctgtggggagggcacggactgacagacggactccggcggaatggggggtgtggctgctccgccagggtccccagggtgggagagcggctccgcggccaccgatgcccggaccccctctgtcttctgctagacatgctcttcctctcggctcttgggaaagctggtgctgctgctgcctgattcccgccgacagaccttgggaccggggccaacactggcagctggagatggcggacacgagatccgtgcacgagactaggtttgaggcggccgtgaaggtgatccagagtttgccgaagaatggttcattccagccaacaaatgaaatgatgcttaaattttatagcttctataagcaggcaactgaaggaccctgtaaactttcaaggcctggattttgggatcctattggaagatataaatgggatgcttggagttcactgggtgatatgaccaaagaggaagccatgattgcatatgttgaagaaatgaaaaagattattgaaactatgccaatgactgagaaagttgaagaattgctgcgtgtcataggtccattttatgaaattgtcgaggacaaaaagagtggcaggagttctgatataacctcagtccgactggagaaaatctctaaatgtttagaagatcttggtaatgttctcacttctactccaaacgccaaaaccgttaatggtaaagctgaaagcagtgacagtggagccgagtctgaggaagaagaggcccaagaagaagtgaaaggagcagaacaaagtgataatgataagaaaatgatgaagaagtcagcagaccataagaatttggaagtcattgtcactaatggctatgataaagatggctttgttcaggatatacagaatgacattcatgccagttcttccctgaatggcagaagcactgaagaagtaaagcccattgatgaaaacttggggcaaactggaaaatctgctgtttgcattcaccaag

SEQ ID NO: 104274 - DNA, 1645 bp, Homo sapiens
  Payload ID: 484
  Gene Symbol: ACBD5
  Gene Name: acyl-CoA binding domain containing 5
  ENST ID: ENST00000476758
  CDS Start-End: 90-293
ggcctggatagggcagggcaaaggggaactgacccgcttcgctcccgggcctcctccttttggggcatgttgatccgcggctgcgctccatgttccagtttcatgcaggctcttgggaaagctggtgctgctgctgcctgattcccgccgacagaccttgggaccggggccaacactggcagctggagatggcggacacgagatccgtgcacgagactaggtttgaggcggccgtgaaggtgatccagagtttgccgaagaatgggatgcttggagttcactgggtgatatgaccaaagaggaagccatgattgcatatgttgaagaaatgaaaaagattattgaaactatgccaatgactgagaaagttgaagaattgctgcgtgtcataggtccattttatgaaattgtcgaggacaaaaagagtggcaggagttctgatataacctcagtccgactggagaaaatctctaaatgtttagaagctctcagaagatttgtatgcacattaaagttgagaagctctgatgtatttaccctcgggatatagctttggccacttggacaatttgcttttatcttggtaatgttctcacttctactccaaacgccaaaaccgttaatggtaaagctgaaagcagtgacagtggagccgagtctgaggaagaagaggcccaagaagaagtgaaaggagcagaacaaagtgataatgataagaaaatgatgaagaagtcagcagaccataagaatttggaagtcattgtcactaatggctatgataaagatggctttgttcaggatatacagaatgacattcatgccagttcttccctgaatggcagaagcactgaagaagtaaagcccattgatgaaaacttggggcaaactggaaaatctgctgtttgcattcaccaagatataaatgatgatcatgttgaagatgttacaggaattcagcatttgacaagcgattcagacagtgaagtttactgtgattctatggaacaatttggacaagaagagtctttagacagctttacgtccaacaatggaccatttcagtattacttgggtggtcattccagtcaacccatggaaaattctggatttcgtgaagatattcaagtacctcctggaaatggcaacattgggaatatgcaggtggttgcagttgaaggaaaaggtgaagtcaagcatggaggagaagatggcaggaataacagcggagcaccacaccgggagaagcgaggcggagaaactgacgaattctctaatgttagaagaggaagaggacataggatgcaacacttgagcgaaggaaccaagggccggcaggtgggaagtggaggtgatggggagcgctggggctccgacagagggtcccgaggcagcctcaatgagcagatcgccctcgtgctgatgagactgcaggaggacatgcagaatgtccttcagagactgcagaaactggaaacgctgactgctttgcaggcaaaatcatcaacatcaacattgcagactgctcctcagcccacctcacagagaccatcttggtggcccttcgagatgtctcctggtgtgctaacgtttgccatcatatggccttttattgcacagtggttggtgtatttatactatcaaagaa

SEQ ID NO: 104275 - DNA, 1670 bp, Homo sapiens
  Payload ID: 485
  Gene Symbol: ACBD6
  Gene Name: acyl-CoA binding domain containing 6
  Uniprot ID: Q9BR61
  ENST ID: ENST00000367595
  CDS Start-End: 689-1537
gggctgtttggaggcgcttggggcgcacaatctggggcaggcggaaccttagtcctcagcctcgcgtttcccgcgactccgctctcaccgctacactaccacacaaacggcctccttcccccacccccgggggcccatcccggtggcgggctccggagctcgggactgctaatttcagcgaaacgattaaaagacgcccctacagctgacggcactttctctcctccggcagggaaggacgtccagcgtagcgtcgcccgcgcttccccgccggcgcagagcaggcctcacagaatcgcacgccgctggcacgcacgccgccccgcccccacggcccagcgccagccgcgccccgcgctcgcacgcatcccggcctcactgcccctcgactcctgttccgttggaggggcctgaggcgagcctgagcgcgctgttggccggagggaagccggaggagaccgggtcgactgggcagagcggcagagggtcgaggagcctgctctgcacgcccagggagtagaagtgggcagggagcagggtcacgtgagggagcgcgccgcgactgagcttgggtccgactggagctcaggctcgcgacccagactggtgggccaggcctccaagccggccttacacccaatccaaggaggacagaccggacacagagggacggagcgagcaaggagacatggcttcatcattcctgcccgcgggggccatcaccggcgacagcggtggagagctgagctcaggggacgactccggggaggtggagttcccccatagccctgagatcgaggagaccagttgcctggccgagctgtttgagaaggctgccgcgcacctgcaaggcctgattcaggtggccagcagggagcagctcttgtacctgtatgccaggtacaaacaggtcaaagttggaaattgtaatactcctaaaccaagcttctttgattttgaaggaaagcaaaaatgggaagcttggaaagcacttggtgattcaagccccagccaagcaatgcaggaatatatcgcagtagttaaaaaactagatccaggttggaatcctcagataccagagaagaaaggaaaagaagcaaatacaggttttggtgggccagttattagttctctatatcatgaagaaaccatcagggaagaagacaaaaatatatttgattactgcagggaaaacaacattgaccatataaccaaagccatcaaatcgaaaaatgtggatgtgaatgtgaaagatgaagagggtagggctctacttcactgggcctgtgatcgaggacataaggaactagtcacagtgttgctgcaacatagagctgacattaactgtcaggacaatgaaggccaaacagctctacattatgcctctgcctgtgagtttctggatattgtagagctgctgctccagtctggtgctgaccccactctccgagaccaggatggctgcctgccagaggaggtgacaggctgcaaaacagtttctttggtgctgcagcggcacacaactggcaaggcttaatcaaaagactggaaaactgcagtctgtaatagcataaggcttccattatgaaagaaaactacaaaaataatacttcttttccacccgtctttggtatgtattggctaataaaatcagttctgtggaactggga

SEQ ID NO: 104276 - DNA, 1322 bp, Homo sapiens
  Payload ID: 486
  Gene Symbol: ACBD7
  Gene Name: acyl-CoA binding domain containing 7
  Uniprot ID: Q8N6N7
  ENST ID: ENST00000356189
  CDS Start-End: 49-315
agagcaccggacgacaacagcagcagcaacaacgcggcagccgccaccatggccctgcaggctgattttgacagggctgcagaagatgtgaggaagctgaaagcaagaccagatgatggagaactgaaagaactctatgggctttacaaacaagcaatagttggagacattaatattgcgtgtccaggaatgctagatttaaaaggcaaagccaaatgggaagcatggaacctcaaaaaagggttgtcgacggaagatgcgacgagtgcctatatttctaaagcaaaggagctgatagaaaaatacggaatttagaatacagcatatgaggaatttttccttttgaagacttccaaatgctatcatgacctaacatttagagggagaggcatactgttaacttgatgtatcatgtatatttttgctattagcatgagctgtagtacttagaagtatactgaaactacatagttaactcaattgtacttgcttaaaccaggtgtctttaaaagttctttttaagaaaatgtggcacatatacaccatggaatactatggagccataaaaagggatgagttcatgtcctttgcagggacatggatgaagctggaaaccatcattctcagcaaactatcacaagatcagaaaaccaagcatgttctcactcataagtgggagttgaacaatgagaacacatggacacagggaagggaacatcacacactggggcctgtcggggactagggggttaggggagggataacattaggagacatacctgatgtaggtgaccggttgatgggtacagcaaaccaccatggcacatgtatacctatgtaacaaaactgcacgttctgcatatgtatcccagaacttaaagtataaaaaaaaaaattcttttagaaaagtattttttatttttatagagttagggagtacagttgcagtttttgtttgtttgtttgttttttcttgaggagtctcactctgtcacccaggctggagtgcagtcgtgtgatctcggttcactgcaacctccgcctcctgggttcaagtgattctcttgcctcagcctcccgagtagctgggattacaggtgcttgccaccatggctggctaatttttgtatttttagtagagacggggttttgccatgttggccaggctggtctcgaactcctgacctcaggtgatctgcccaccttggcgctggggttgcaggtgtgagccaccacacctggtcacaggtgcagttttgttacatggatatattgtgtagtggggaaatctgggcttttagtgtaaccatcaccaaaatact

SEQ ID NO: 104277 - DNA, 3959 bp, Homo sapiens
  Payload ID: 487
  Gene Symbol: ACAD10
  Gene Name: acyl-CoA dehydrogenase family, member 10
  Uniprot ID: Q6JQN1
  ENST ID: ENST00000313698
  CDS Start-End: 156-3335
gtcgtggagattgcttgcgctggggtgccacacttaggctgagctgcaggttttcgcacagtcgcgagttaacctctgcttgctccagaggcctcgtcctaatccacctcggctgacggcgcgggatccctggctccgcgagcctcagcctcaccatgtgtgtcaggagctgtttccagtccccccgtctccagtgggtgtggagaacagccttcctgaaacacacccagcgcaggcaccaggggtcccaccgatggacacaccttggaggcagcacctacagagcggtgattttcgacatgggcggagttctcattccttctccagggagagtcgctgcagaatgggaggtacagaatcgtatcccttctggaactatattaaaggccttgatggaaggtggtgaaaatgggccctggatgagatttatgagagcagaaataacagcagagggttttttacgagaatttgggagactttgctctgaaatgttaaagacctccgtgcctgtggactcatttttctctctgttgaccagtgagcgagtggcaaagcagttcccagtgatgactgaggccataactcaaattcgggcaaaaggtcttcagactgcagtcttgagcaataatttttatcttcccaaccagaaaagctttttgcccctggaccggaaacagtttgatgtgattgtggagtcctgcatggaagggatctgtaagccagaccctaggatctacaagctgtgcttggagcagctcggcctgcagccctctgagtccatctttcttgatgaccttggaacaaatctaaaagaagctgccagacttggtattcacaccattaaggttaatgacccagagactgcagtaaaggaattagaagctctcttgggttttacattgagagtaggtgttccaaacactcggcctgtgaaaaagacgatggaaattccgaaagattccttgcagaagtacctcaaagacttactgggtatccagaccacaggcccattggaactacttcagtttgatcacgggcagtcaaatccaacttactacatcaggctggctaatcgtgatctagttctgaggaagaagcccccagggacactccttccatctgcccatgccatagagagggagttcaggattatgaaagcccttgcaaatgctggagtacctgtccctaacgttcttgatctctgtgaagattcaagtgtcattggcacccccttctatgtgatggagtactgcccaggtctcatctacaaagacccttccctgccaggcttggagcccagccacagacgagccatatacactgccatgaacacagtcctgtgcaaaattcacagtgtggatctgcaggctgtgggacttgaagactatgggaagcaaggggactatattccacgccaggtacgaacctgggttaagcagtatcgagcttccgaaactagcaccatcccagccatggagaggctgatcgaatggctgcccctccatcttccccgtcagcagaggaccacagtggtgcacggggacttcaggctcgacaacctggtgtttcatccagaagagccagaggtgcttgctgtccttgactgggaactttctaccttgggcgacccccttgctgatgtggcctacagctgcctggctcattacctgccatccagttttcccgtgctgagaggtattaatgactgtgacttgacacagctgggaatccctgctgcagaggagtatttcaggatgtactgtctccaaatggggctccctcccactgagaactggaacttctatatggctttttcctttttccgtgtggctgcaatcctacagggagtctacaagcgatcactcacagggcaagcaagctccacatatgcggaacaaactggaaagctgaccgaatttgtgtctaacctggcgtgggatttcgcagtcaaagaagggttccgggttttcaaagagatgcccttcacaaatccgttaacaaggtcctaccacacgtgggccaggccccagtcccagtggtgccccacaggcagcaggagttatagctccgttccagaagcttccccagctcatacctcaaggggaggtctggttatctctccagagagcctctctccacctgtcagagagctgtatcaccggctgaagcacttcatggagcaacgtgtgtaccctgcagagccagagctgcagagtcaccaggcctcagcagccaggtggagcccctccccactgatcgaagacctcaaggagaaagccaaagctgaaggactttggaaccttttcctacccttagaggctgatcccgagaaaaaatacggagcaggactgaccaatgtggaatatgcacatctgtgtgagctcatgggcacgtccctgtatgcccccgaggtatgtaactgctctgcgcctgacacgggcaacatggagctgctggtgaggtatggcaccgaagcgcagaaggctcgctggctgattcctctgctggaggggaaagcccgctcctgttttgctatgaccgagccccaggttgcctcttcagatgccaccaacattgaggcttccatcagagaggaggacagcttctatgtcataaacggtcacaaatggtggatcacaggcatcctggatcctcgttgccaactctgtgtgtttatgggaaaaacagacccacatgcaccaagacaccggcagcagtctgtgctcttggttcccatggataccccagggataaaaatcatccggcctctgacggtgtatggactggaagatgcaccaggtggccatggtgaagtccgatttgagcacgtgcgtgtgcccaaagagaacatggtcctgggccctggccgaggctttgagatcgcccagggcagactgggccccggcaggatccatcactgcatgaggctgatcgggttctcagagagggccctggcactcatgaaggcccgcgtgaagtcccgcttggcttttgggaagcccctggtggagcagggcacagtgctggcggacatcgcgcagtcgcgcgtggagattgagcaggcacggctgctggtgctgagagctgcccacctcatggacctggcaggaaacaaggctgcagccttggatatagccatgattaaaatggtcgccccgtccatggcctcccgagtgattgatcgtgcgattcaggcctttggagcagcaggcctgagcagcgactacccactggctcagttcttcacctgggcccgagccctgcgctttgccgacggccctgacgaggtgcaccgggccacggtggccaagctagagctgaagcaccgcatttagagccttggggctgcagtggctcaatgtcctggctggtccagctgtgcccagatctgtcactgatgtgcctcgaaagatccggtgtttgtggctcctgcaccctgctcagcagctctgtcccgggacagtcagggtggactcaatctttctggttctccacagaagacgtctctgcaagaagcctggagtctgtttcaggccaggaggaggggatttgctgagggccaagggggttctgggacagagtctggaaagctggtcttcaggctctcagtcccaggctgggcaggcacggtcacttcacttcagcctttcagtccctctctctctgcctgtgggaatctggacacattttgggaggcctcccaaggctgtgggacgtgcttgctctggcagctgcagggttcctgtctggcctccctggtgagcagaggggcggccacggcgggcggtggcctagagacccaggacctgggcgcctgggaaaatggaatgcaacccacattgtaaagccactggcatctgattatctccatttgaacacacagcacagaacaatcatttaaatgttattttggaaaggggttttggggacacagaagaataagtaaacacatctcggag

SEQ ID NO: 104278 - DNA, 4071 bp, Homo sapiens
  Payload ID: 487
  Gene Symbol: ACAD10
  Gene Name: acyl-CoA dehydrogenase family, member 10
  Uniprot ID: Q6JQN1
  ENST ID: ENST00000455480
  CDS Start-End: 178-3450
gaggaggtcggagcggaaggacgtcgtggagattgcttgcgctggggtgccacacttaggctgagctgcaggttttcgcacagtcgcgagttaacctctgcttgctccagaggcctcgtcctaatccacctcggctgacggcgcgggatccctggctccgcgagcctcagcctcaccatgtgtgtcaggagctgtttccagtccccccgtctccagtgggtgtggagaacagccttcctgaaacacacccagcgcaggcaccaggggtcccaccgatggacacaccttggaggcagcacctacagagcggtgattttcgacatgggcggagttctcattccttctccagggagagtcgctgcagaatgggaggtacagaatcgtatcccttctggaactatattaaaggccttgatggaaggtggtgaaaatgggccctggatgagatttatgagagcagaaataacagcagagggttttttacgagaatttgggagactttgctctgaaatgttaaagacctccgtgcctgtggactcatttttctctctgttgaccagtgagcgagtggcaaagcagttcccagtgatgactgaggccataactcaaattcgggcaaaaggtcttcagactgcagtcttgagcaataatttttatcttcccaaccagaaaagctttttgcccctggaccggaaacagtttgatgtgattgtggagtcctgcatggaagggatctgtaagccagaccctaggatctacaagctgtgcttggagcagctcggcctgcagccctctgagtccatctttcttgatgaccttggaacaaatctaaaagaagctgccagacttggtattcacaccattaagagacagggttttgccgtgttgcccaagctggtgtcgaactcctgggctcaagcgatctacccaccttaccctcccaaagtggtgagattacaggttaatgacccagagactgcagtaaaggaattagaagctctcttgggttttacattgagagtaggtgttccaaacactcggcctgtgaaaaagacgatggaaattccgaaagattccttgcagaagtacctcaaagacttactgggtatccagaccacaggcccattggaactacttcagtttgatcacgggcagtcaaatccaacttactacatcaggctggctaatcgtgatctagttctgaggaagaagcccccagggacactccttccatctgcccatgccatagagagggagttcaggattatgaaagcccttgcaaatgctggagtacctgtccctaacgttcttgatctctgtgaagattcaagtgtcattggcacccccttctatgtgatggagtactgcccaggtctcatctacaaagacccttccctgccaggcttggagcccagccacagacgagccatatacactgccatgaacacagtcctgtgcaaaattcacagtgtggatctgcaggctgtgggacttgaagactatgggaagcaaggggactatattccacgccaggtacgaacctgggttaagcagtatcgagcttccgaaactagcaccatcccagccatggagaggctgatcgaatggctgcccctccatcttccccgtcagcagaggaccacagtggtgcacggggacttcaggctcgacaacctggtgtttcatccagaagagccagaggtgcttgctgtccttgactgggaactttctaccttgggcgacccccttgctgatgtggcctacagctgcctggctcattacctgccatccagttttcccgtgctgagaggtattaatgactgtgacttgacacagctgggaatccctgctgcagaggagtatttcaggatgtactgtctccaaatggggctccctcccactgagaactggaacttctatatggctttttcctttttccgtgtggctgcaatcctacagggagtctacaagcgatcactcacagggcaagcaagctccacatatgcggaacaaactggaaagctgaccgaatttgtgtctaacctggcgtgggatttcgcagtcaaagaagggttccgggttttcaaagagatgcccttcacaaatccgttaacaaggtcctaccacacgtgggccaggccccagtcccagtggtgccccacaggcagcaggagttatagctccgttccagaagcttccccagctcatacctcaaggggaggtctggttatctctccagagagcctctctccacctgtcagagagctgtatcaccggctgaagcacttcatggagcaacgtgtgtaccctgcagagccagagctgcagagtcaccaggcctcagcagccaggtggagcccctccccactgatcgaagacctcaaggagaaagccaaagctgaaggactttggaaccttttcctacccttagaggctgatcccgagaaaaaatacggagcaggactgaccaatgtggaatatgcacatctgtgtgagctcatgggcacgtccctgtatgcccccgaggtatgtaactgctctgcgcctgacacgggcaacatggagctgctggtgaggtatggcaccgaagcgcagaaggctcgctggctgattcctctgctggaggggaaagcccgctcctgttttgctatgaccgagccccaggttgcctcttcagatgccaccaacattgaggcttccatcagagaggaggacagcttctatgtcataaacggtcacaaatggtggatcacaggcatcctggatcctcgttgccaactctgtgtgtttatgggaaaaacagacccacatgcaccaagacaccggcagcagtctgtgctcttggttcccatggataccccagggataaaaatcatccggcctctgacggtgtatggactggaagatgcaccaggtggccatggtgaagtccgatttgagcacgtgcgtgtgcccaaagagaacatggtcctgggccctggccgaggctttgagatcgcccagggcagactgggccccggcaggatccatcactgcatgaggctgatcgggttctcagagagggccctggcactcatgaaggcccgcgtgaagtcccgcttggcttttgggaagcccctggtggagcagggcacagtgctggcggacatcgcgcagtcgcgcgtggagattgagcaggcacggctgctggtgctgagagctgcccacctcatggacctggcaggaaacaaggctgcagccttggatatagccatgattaaaatggtcgccccgtccatggcctcccgagtgattgatcgtgcgattcaggcctttggagcagcaggcctgagcagcgactacccactggctcagttcttcacctgggcccgagccctgcgctttgccgacggccctgacgaggtgcaccgggccacggtggccaagctagagctgaagcaccgcatttagagccttggggctgcagtggctcaatgtcctggctggtccagctgtgcccagatctgtcactgatgtgcctcgaaagatccggtgtttgtggctcctgcaccctgctcagcagctctgtcccgggacagtcagggtggactcaatctttctggttctccacagaagacgtctctgcaagaagcctggagtctgtttcaggccaggaggaggggatttgctgagggccaagggggttctgggacagagtctggaaagctggtcttcaggctctcagtcccaggctgggcaggcacggtcacttcacttcagcctttcagtccctctctctctgcctgtgggaatctggacacattttgggaggcctcccaaggctgtgggacgtgcttgctctggcagctgcagggttcctgtctggcctccctggtgagcagaggggcggccacggcgggcggtggcctagagacccaggacctgggcgcctgggaaaatggaatgcaacccacattgtaaagccactggcatctgattatctccatttgaacacacagcacagaacaatcatttaaatgttattttggaaaggggttttggggacacagaagaataagtaaacacatctcg

SEQ ID NO: 104279 - DNA, 501 bp, Homo sapiens
  Payload ID: 487
  Gene Symbol: ACAD10
  Gene Name: acyl-CoA dehydrogenase family, member 10
  ENST ID: ENST00000514615
  CDS Start-End: 214-501
ggacgcaattttgaggaggtcggagcggaaggacgtcgtggagattgcttgcgctggggtgccacacttaggctgagctgcaggttttcgcacagtcgcgagttaacctctgcttgctccagaggcctcgtcctaatccacctcggctgacggcgcgggatccctggctccgcgagataggtacaacgaggctcagagagcctcagcctcaccatgtgtgtcaggagctgtttccagtccccccgtctccagtgggtgtggagaacagccttcctgaaacacacccagcgcaggcaccaggggtcccaccgatggacacaccttggaggcagcacctacagagcggtgattttcgacatgggcggagttctcattccttctccagggagagtcgctgcagaatgggaggtacagaatcgtatcccttctggaactatattaaaggccttgatggaaggtggtgaaaatgggccctggatgagatttatgagagcagaaata

SEQ ID NO: 104280 - DNA, 833 bp, Homo sapiens
  Payload ID: 487
  Gene Symbol: ACAD10
  Gene Name: acyl-CoA dehydrogenase family, member 10
  ENST ID: ENST00000507683
  CDS Start-End: 1-833
ggaattagaagctctcttgggttttacattgagagtaggtgttccaaacactcggcctgtgaaaaagacgatggaaattccgaaagattccttgcagaagtacctcaaagacttactgggtatccagaccacaggcccattggaactacttcagtttgatcacgggcagtcaaatccaacttactacatcaggctggctaatcgtgatctagttctgaggaagaagcccccagggacactccttccatctgcccatgccatagagagggagttcaggattatgaaagcccttgcaaatgctggagtacctgtccctaacgttcttgatctctgtgaagattcaagtgtcattggcacccccttctatgtgatggagtactgcccaggtctcatctacaaagacccttccctgccaggcttggagcccagccacagacgagccatatacactgccatgaacacagtcctgtgcaaaattcacagtgtggatctgcaggctgtgggacttgaagactatgggaagcaagggcaagcaagctccacatatgcggaacaaactggaaagctgaccgaatttgtgtctaacctggcgtgggatttcgcagtcaaagaagggttccgggttttcaaagagatgcccttcacaaatccgttaacaaggtcctaccacacgtgggccaggccccagtcccagtggtgccccacaggcagcaggagttatagctccgttccagaagcttccccagctcatacctcaaggggaggtctggttatctctccagagagcctctctccacctgtcagagagctgtatcaccggctgaagcacttca

SEQ ID NO: 104281 - DNA, 2888 bp, Homo sapiens
  Payload ID: 487
  Gene Symbol: ACAD10
  Gene Name: acyl-CoA dehydrogenase family, member 10
  ENST ID: ENST00000549590
  CDS Start-End: 183-2315
attttgaggaggtcggagcggaaggacgtcgtggagattgcttgcgctggggtgccacacttaggctgagctgcaggttttcgcacagtcgcgagttaacctctgcttgctccagaggcctcgtcctaatccacctcggctgacggcgcgggatccctggctccgcgagcctcagcctcaccatgtgtgtcaggagctgtttccagtccccccgtctccagtgggtgtggagaacagccttcctgaaacacacccagcgcaggcaccaggggtcccaccgatggacacaccttggaggcagcacctacagagcggtgattttcgacatgggcggagttctcattccttctccagggagagtcgctgcagaatgggaggtacagaatcgtatcccttctggaactatattaaaggccttgatggaaggtggtgaaaatgggccctggatgagatttatgagagcagaaataacagcagagggttttttacgagaatttgggagactttgctctgaaatgttaaagacctccgtgcctgtggactcatttttctctctgttgaccagtgagcgagtggcaaagcagttcccagtgatgactgaggccataactcaaattcgggcaaaaggtcttcagactgcagtcttgagcaataatttttatcttcccaaccagaaaagctttttgcccctggaccggaaacagtttgatgtgattgtggagtcctgcatggaagggatctgtaagccagaccctaggatctacaagctgtgcttggagcagctcggcctgcagccctctgagtccatctttcttgatgaccttggaacaaatctaaaagaagctgccagacttggtattcacaccattaaggttaatgacccagagactgcagtaaaggaattagaagctctcttgggttttacattgagagtaggtgttccaaacactcggcctgtgaaaaagacgatggaaattccgaaagattccttgcagaagtacctcaaagacttactgggtatccagaccacaggcccattggaactacttcagtttgatcacgggcagtcaaatccaacttactacatcaggctggctaatcgtgatctagttctgaggaagaagcccccagggacactccttccatctgcccatgccatagagagggagttcaggattatgaaagcccttgcaaatgctggagtacctgtccctaacgttcttgatctctgtgaagattcaagtgtcattggcacccccttctatgtgatggagtactgcccaggtctcatctacaaagacccttccctgccaggcttggagcccagccacagacgagccatatacactgccatgaacacagtcctgtgcaaaattcacagtgtggatctgcaggctgtgggacttgaagactatgggaagcaaggggactatattccacgccaggtacgaacctgggttaagcagtatcgagcttccgaaactagcaccatcccagccatggagaggctgatcgaatggctgcccctccatcttccccgtcagcagaggaccacagtggtgcacggggacttcaggctcgacaacctggtgtttcatccagaagagccagaggtgcttgctgtccttgactgggaactttctaccttgggcgacccccttgctgatgtggcctacagctgcctggctcattacctgccatccagttttcccgtgctgagaggtattaatgactgtgacttgacacagctgggaatccctgctgcagaggagtatttcaggatgtactgtctccaaatggggctccctcccactgagaactggaacttctatatggctttttcctttttccgtgtggctgcaatcctacagggagtctacaagcgatcactcacagggcaagcaagctccacatatgcggaacaaactggaaagctgaccgaatttgtgtctaacctggcgtgggatttcgcagtcaaagaagggttccgggttttcaaagagatgcccttcacaaatccgttaacaaggtcctaccacacgtgggccaggccccagtcccagtggtgccccacaggcagcaggagttatagctccgttccagaagcttccccagctcatacctcaaggggaggtctggttatctctccagagagcctctctccacctgtcagagagctgtatcaccggctgaagcacttcatggagcaacgtgtgtaccctgcagagccagagctgcagagtcaccaggcctcagcagccaggtggagcccctccccactgatcgaagacctcaaggtaaagcagccatggtgaggtggtaagaccccaataccatggcataccctccccgaccccaccgggctcacctgaaccatcccaggcagtgaagatacaggagctccgagttgaatgatctttgcttccatcgtctcagaaagagccagctcttcatgactcagtttccatctcttgctcttgctgtgcctgtgtcacaggcagatggctcaggtgtgactgcacagcccaggcagtggaatgcttggccttagaaagccagggcaggttaggcctatctgatgggtatttgaattatgtaaatttgaaacagtgctgtatcagctaataaatctctctctagagaacccgtaatatcacagctagagggccagatccactgtgagctgagtttctgtgttgtctcccagtgctgtcacttcagctgataaacagaaacacccgctgttccttatcacgtgaaccttggattgtgttagttttgaaattacttgagatcttcaggagcataatgcaatcatcatctacttttctttttttctctttttttttgagacggagtcttgctctgtgcaacttccgcctcccagg

SEQ ID NO: 104282 - DNA, 589 bp, Homo sapiens
  Payload ID: 487
  Gene Symbol: ACAD10
  Gene Name: acyl-CoA dehydrogenase family, member 10
  ENST ID: ENST00000552965
  CDS Start-End: 550-589
aggaggtcggagcggaaggacgtcgtggagattgcttgcgctggggtgccacacttaggctgagctgcaggttttcgcacagtcgcgagttaacctctgcttgctccagaggcctcgtcctaatccacctcggctgacggcgcgggatccctggctccgcgagggtttcaccatgttggtcagacttgtctcgaactcctgaccttgtgatccgcccacttcggcctcccaaagtgctgggatgacaggcgtgagccaccgcgcccggcccccccaaaggcatttttcgtctctactaagccctcacacaaaatatacaagtgtgtatcggatatttggattagggatgctcaacctctacagttttttagtcctagctgggcgccgtgactcacacctgtaattccagcactttgggaggctgagcttatagaaaagtcaaaagaagttacagtgatctcccgttatacctttcatctagactcactattaatgtctggccatgtttggttttctctatacacgagtgtatatagcctcagcctcaccatgtgtgtcaggagctgtttccagtccccccgtctccagt

SEQ ID NO: 104283 - DNA, 678 bp, Homo sapiens
  Payload ID: 487
  Gene Symbol: ACAD10
  Gene Name: acyl-CoA dehydrogenase family, member 10
  ENST ID: ENST00000552706
  CDS Start-End: 1-678
gttaatgacccagagactgcagtaaaggaattagaagctctcttgggttttacattgagagtaggtgttccaaacactcggcctgtgaaaaagacgatggaaattccgaaagattccttgcagaagtacctcaaagacttactgggtatccagaccacaggcccattggaactacttcagtttgatcacgggcagtcaaatccaacttactacatcaggctggctaatcgtgatctagttctgaggaagaagcccccagggacactccttccatctgcccatgccatagagagggagttcaggattatgaaagcccttgcaaatgctggagtacctgtccctaacgttcttgatctctgtgaagattcaagtgtcattggcacccccttctatgtgatggagtactgcccaggtctcatctacaaagacccttccctgccaggcttggagcccagccacagacgagccatatacactgccatgaacacagtcctgtgcaaaattcacagtgtggatctgcaggctgtgggacttgaagactatgggaagcaaggctcgacaacctggtgtttcatccagaagagccagaggtgcttgctgtccttgactgggaactttctaccttgggcgacccccttgctgatgtggcctacagctgcctggctcattacctgccat

SEQ ID NO: 104284 - DNA, 703 bp, Homo sapiens
  Payload ID: 487
  Gene Symbol: ACAD10
  Gene Name: acyl-CoA dehydrogenase family, member 10
  ENST ID: ENST00000515283
  CDS Start-End: 266-703
gtcggagcggaaggacgtcgtggagattgcttgcgctggggtgccacacttaggctgagctgcaggttttcgcacagtcgcgagttaacctctgcttgctccagaggcctcgtcctaatccacctcggctgacggcgcgggatccctggctccgcgagggcaagcaagctccacatatgcggaacaaactggaaagctgaccgaatttgtgtctaacctggcgtgggatttcgcagtcaaagaagggttccgggttttcaaagagatgcccttcacaaatccgttaacaaggtcctaccacacgtgggccaggccccagtcccagtggtgccccacaggcagcaggagttatagctccgttccagaagcttccccagctcatacctcaaggggaggtctggttatctctccagagagcctctctccacctgtcagagagctgtatcaccggctgaagcacttcatggagcaacgtgtgtaccctgcagagccagagctgcagagtcaccaggcctcagcagccaggtggagcccctccccactgatcgaagacctcaaggagaaagccaaagctgaaggactttggaaccttttcctacccttagaggctgatcccgagaaaaaatacggagcaggactgaccaatgtggaatatgcacatctgtgtgagctcatgggcacgtccctgtatgcccccgaggta

SEQ ID NO: 104285 - DNA, 4142 bp, Homo sapiens
  Payload ID: 488
  Gene Symbol: ACAD11
  Gene Name: acyl-CoA dehydrogenase family, member 11
  Uniprot ID: Q709F0
  ENST ID: ENST00000264990
  CDS Start-End: 973-3315
gcctccgaccggcgacgcaggttacctgtagggattcgaatccaccacctctgagctcatcttctcgatgcggacccggccgccccctccgtcgccgctcctcgggacctgcagactcctctcctgggcaagttcccgctccagctcctggacccgctgctgcaggcgctccacagactccgccatggctgggactccggccgccaacgctcccagcccgggccttcgccgccgccttcgccccacgttgctcggctgggcccgcgaggggtacgtggggaggcacctcgccgctgccttcctagcccagagccctggggacgtgcacccagcgcctcacagacagacacgtctccgagactcccacaggccttcctcggagccgcttccggtgcgtcgcagacatcgctccccctcatcaaaaacctggctctttcggcttccttcctcgctgggccggctaaacccggccgcagcagcaccggggtgataagtgtccagggcaggaggccagcgatgttgccttgctaaccgggtatctaagagaaacagggtctttttattcttaggctcgacagtctgacggccctttttctgaacgggaccctgcaggtcttccgcctgctgttgcattaaatttgggggtggaagaggcttctgcgttgttccttacccgcaacgatgaccatggctttgccttctttaaaattgaggcctccaactctgacgctgactggagaattgaaacccgaacacacattgggctcttttggcacttgactagagctaaaacctcgggattcagcgggcaagcgttgctcagcaacggcgcgtaggctgtgtgcggttggctggagccagaccccaccccggcctcggcccatgctctagaggggacgttgccccaatcctgaaggacttcggcactcgagacctgtggatgccgcgttgctgtggcctgcgggggtgatcatgaagccaggtgctactggcgagtccgatttggccgaagtgctgccccagcacaagttcgacagcaagtccctggaggcctacctaaaccagcacttgtctggctttggggccgaacgtgaggctacgctgaccattgcccagtacagagcaggaaagtccaatccaaccttttatctccagaagggctttcaaacatatgtgctcaggaaaaaaccaccaggttcacttcttcctaaagcacatcagattgatagagaatttaaagtccagaaagccttgttttcaattggattccccgttcccaagcctatactgtactgcagtgatacttctgtcattggaacagaattttacgtaatggaacatgtgcagggtcgaatcttccgtgatttaacaattcctggacttagcccagcagaacgttcagccatatatgtggccacggtagaaacattggctcagttacattccttgaatatacagtcactgcagctggaaggatatggtataggtgctgggtactgcaaaagacaggtatcaacctggacaaagcaatatcaagctgcagctcatcaggacatccctgccatgcaacagctatcggagtggctaatgaagaacttgcccgataatgacaatgaagagaatttgattcatggagatttcagactagataacatagttttccaccctaaagagtgtcgagttatagcagtgctggattgggagctgtcaaccattggtcatcctttgtcagacttagctcatttttccctgttctacttttggccaaggacagttccaatgataaatcaaggttcttatagtgaaaactcagggataccatcaatggaagaactgatttcaatatattgccgctgcaggggaattaattctattcttcctaactggaatttctttcttgccctttcatattttaagatggctggaatagcacagggagtatatagcagatatcttctgggaaataattcatctgaggatagctttttatttgccaatattgtgcaacctctggcagaaactggactacaactctccaaacgaactttcagtactgtactaccacagattgatactactggacagttgtttgtacagactcggaaaggtcaggaagttcttattaaggtgaagcatttcatgaaacaacacattcttccagctgaaaaggaggtaactgagttctatgttcaaaatgaaaattcagtggacaagtggggaaaacctttagtgattgataaactcaaggaaatggccaaagtcgagggtctctggaacttgtttttgccagctgtcagcggactcagccacgtggactatgccttgattgctgaagaaacaggaaaatgcttttttgctccagatgtctttaactgccaagcaccagacacagggaatatggaggttctgcacctgtatggaagtgaggaacagaagaaacagtggcttgagcctcttcttcaagggaacattacctcttgcttctgtatgacagaacctgatgtagcttcaagtgatgccacgaatattgaatgcagcatccaacgagatgaagatagctatgtaattaacggcaaaaaatggtggagcagtggagctgggaatcccaagtgcaaaattgcaattgttttgggaagaactcaaaatacttctctctccagacacaaacagcacagcatgattcttgttcccatgaacacacctggagtaaaaataataaggcctttgtcagtttttggctacacagataattttcatggaggacattttgagatccattttaatcaagtgcgagttcctgccacaaatctaatactaggtgaaggtaggggatttgaaatttcccaaggccgccttggacctggcagaatccaccactgtatgagaacagtaggtttggcggaacgcgctttgcagatcatgtgtgagcgggcaacacaaaggatagctttcaagaagaagttgtatgcacatgaggttgtggctcactggattgctgaaagccgcattgccattgagaagatccgcttgttgactctgaaagctgctcacagcatggacactctgggcagtgctggcgctaagaaagagattgcaatgatcaaagtggctgccccacgggctgtcagcaaaatcgttgactgggccatccaggtgtgcggaggtgctggtgtttcccaggattaccctctggctaacatgtatgctataacccgagttttgcgtttagcagatggacctgacgaagttcatctttcagcaatcgcaacaatggagctgcgggaccaagccaaaagactgacagccaagatataaggagggtggcactgccacatcccactggcagaaactctcctttatacaaacttcattggctccaacatttgaatctcatatttttgtagcagtttgagcacagggttaattattcatttgtggtaaagattatagcatctattttgatcagtgggttttattatttcaagggtcacacagggttaagttcagtaagaaatgctgtagctgttgtcattcaatctagtgcctccttgaggccaggagttcaggaccagcctgggcaacatagcgagacccccattgctacaaaaaatttaaaaatgaaacaagtgtggtggcacatgcttgtagtcctagctacttgggaggctgaggcaggaggattgcttgagtctaggagtttgaggttacagtaagctgtgatcgtgacatggcctccagcctgggtgaccgagtgagactgtttctaaaaataaaaacaaaaaataaatttcttcttgaggtggggtggaggtggggagcaagaatttgacctggctctgatccctggtgtgttgtgtgggcctctttaacgtttgccactgagccttaacctcactgtacttcactgtacttcacacgcattggtgttaacattttaatcttagaagaccctgacccactgagggtttgttgtgagaattgctgaagccacgtagaagcaccttgaaatctgtaaaaccacaagaaagtactttataaaaggtatccttatttgaagtggataaatcttgtaactcgaaaagttgtgatttagaagacaggattgtttttgaacattaggaattaaaggctatatctggtcc

SEQ ID NO: 104286 - DNA, 2940 bp, Homo sapiens
  Payload ID: 488
  Gene Symbol: ACAD11
  Gene Name: acyl-CoA dehydrogenase family, member 11
  ENST ID: ENST00000485198
  CDS Start-End: 316-1617
ctgcgttgttccttacccgcaacgatgaccatggctttgccttctttaaaattgaggcctccaactctgacgctgactggagaattgaaacccgaacacacattgggctcttttggcacttgactagagctaaaacctcgggattcagcgggcaagcgttgctcagcaacggcgcgtaggctgtgtgcggttggctggagccagaccccaccccggcctcggcccatgctctagaggggacgttgccccaatcctgaaggacttcggcactcgagacctgtggatgccgcgttgctgtggcctgcgggggtgatcatgaagccaggtgctactggcgagtccgatttggccgaagtgctgccccagcacaagttcgacagcaagtccctggaggcctacctaaaccagcacttgtctggctttggggccgaacgtgaggctacgctgaccattgcccagtacagagcaggaaagtccaatccaaccttttatctccagaagggctttcaaacatatgtgctcaggaaaaaaccaccaggttcacttcttcctaaagcacatcagattgatagagaatttaaagtccagaaagccttgttttcaattggattccccgttcccaagcctatactgtactgcagtgatacttctgtcattggaacagaattttacgtaatggaacatgtgcagggtcgaatcttccgtgatttaacaattcctggacttagcccagcagaacgttcagccatatatgtggccacggtagaaacattggctcagttacattccttgaatatacagtcactgcagctggaaggatatggtataggtgctgggtactgcaaaagacaggtatcaacctggacaaagcaatatcaagctgcagctcatcaggacatccctgccatgcaacagctatcggagtggctaatgaagaacttgcccgataatgacaatgaagagaatttgattcatggagatttcagactagataacatagttttccaccctaaagagtgtcgagttatagcagtgctggattgggagctgtcaaccattggtcatcctttgtcagacttagctcatttttccctgttctacttttggccaaggacagttccaatgataaatcaaggttcttatagtgaaaactcagggataccatcaatggaagaactgatttcaatatattgccgctgcaggggaattaattctattcttcctaactggaatttctttcttgccctttcatattttaagatggctggaatagcacagggagtatatagcagatatcttctgggaaataattcatctgaggatagctttttatttgccaatattgtgcaacctctggcagaaactggactacaactctccaaacgaactttcagtactgtactaccacagattgatactactggacagttgtttgtacagactcggaaaggtcaggaagttcttattaaggtgaagcatttcatgaaacaacacattcttccagctgaaaagacacagggaatatggaggttctgcacctgtatggaagtgaggaacagaagaaacagtggcttgagcctcttcttcaagggaacattacctcttgcttctgtatgacagaacctgatgtagcttcaagtgatgccacgaatattgaatgcagcatccaacgagatgaagatagctatgtaattaacggcaaaaaatggtggagcagtggagctgggaatcccaagtgcaaaattgcaattgttttgggaagaactcaaaatacttctctctccagacacaaacagcacagcatgattcttgttcccatgaacacacctggagtaaaaataataaggcctttgtcagtttttggctacacagataattttcatggaggacattttgagatccattttaatcaagtgcgagttcctgccacaaatctaatactaggtgaaggtaggggatttgaaatttcccaaggccgccttggacctggcagaatccaccactgtatgagaacagtaggtttggcggaacgcgctttgcagatcatgtgtgagcgggcaacacaaaggatagctttcaagaagaagttgtatgcacatgaggttgtggctcactggattgctgaaagccgcattgccattgagaagatccgcttgttgactctgaaagctgctcacagcatggacactctgggcagtgctggcgctaagaaagagattgcaatgatcaaagtggctgccccacgggctgtcagcaaaatcgttgactgggccatccaggtgtgcggaggtgctggtgtttcccaggattaccctctggctaacatgtatgctataacccgagttttgcgtttagcagatggacctgacgaagttcatctttcagcaatcgcaacaatggagctgcgggaccaagccaaaagactgacagccaagatataaggagggtggcactgccacatcccactggcagaaactctcctttatacaaacttcattggctccaacatttgaatctcatatttttgtagcagtttgagcacagggttaattattcatttgtggtaaagattatagcatctattttgatcagtgggttttattatttcaagggtcacacagggttaagttcagtaagaaatgctgtagctgttgtcattcaatctagtgcctccttgaggccaggagttcaggaccagcctgggcaacatagcgagacccccattgctacaaaaaatttaaaaatgaaacaagtgtggtggcacatgcttgtagtcctagctacttgggaggctgaggcaggaggattgcttgagtctaggagtttgaggttacagtaagctgtgatcgtgacatggcctccagcctgggtgaccgagtgagactgtttctaaaaataaaaacaaaaaataaatttcttcttgaggtggggtggaggtgg

SEQ ID NO: 104287 - DNA, 1891 bp, Homo sapiens
  Payload ID: 488
  Gene Symbol: ACAD11
  Gene Name: acyl-CoA dehydrogenase family, member 11
  ENST ID: ENST00000481970
  CDS Start-End: 94-1524
cccatgctctagaggggacgttgccccaatcctgaaggacttcggcactcgagacctgtggatgccgcgttgctgtggcctgcgggggtgatcatgaagccaggtgctactggcgagtccgatttggccgaagtgctgccccagcacaagttcgacagcaagtccctggaggcctacctaaaccagcacttgtctggctttggggccgaacgtgaggctacgctgaccattgcccagtacagagcaggaaagtccaatccaaccttttatctccagaagggctttcaaacatatgtgctcaggaaaaaaccaccaggttcacttcttcctaaagcacatcagattgatagagaatttaaagtccagaaagccttgttttcaattggattccccgttcccaagcctatactgtactgcagtgatacttctgtcattggaacagaattttacgtaatggaacatgtgcagggtcgaatcttccgtgatttaacaattcctggacttagcccagcagaacgttcagccatatatgtggccacggtagaaacattggctcagttacattccttgaatatacagtcactgcagctggaaggatatggtataggtgctgggtactgcaaaagacaggtatcaacctggacaaagcaatatcaagctgcagctcatcaggacatccctgccatgcaacagctatcggagtggctaatgaagaacttgcccgataatgacaatgaagagaatttgattcatggagatttcagactagataacatagttttccaccctaaagagtgtcgagttatagcagtgctggattgggagctgtcaaccattggtcatcctttgtcagacttagctcatttttccctgttctacttttggccaaggacagttccaatgataaatcaaggttcttatagtgaaaactcagggataccatcaatggaagaactgatttcaatatattgccgctgcaggggaattaattctattcttcctaactggaatttctttcttgccctttcatattttaagatggctggaatagcacagggagtatatagcagatatcttctgggaaataattcatctgaggatagctttttatttgccaatattgtgcaacctctggcagaaactggactacaactctccaaacgaactttcagtactgtactaccacagattgatactactggacagttgtttgtacagactcggaaaggtcaggaagttcttattaaggtgaagcatttcatgaaacaacacattcttccagctgaaaaggaggtaactgagttctatgttcaaaatgaaaattcagtggacaagtggggaaaacctttagtgattgataaactcaaggaaatggccaaagtcgagggtctctggaacttgtttttgccagctgtcagcggactcagccacgtggactatgccttgattgctgaagaaacaggaaaatgcttttttgctccagatgtctttaactgccaagcaccaggttactacattaattgaaaacataattttttctaatattttgatcagtgtttaaaatttctatatatgataagaatgtgtttttatacaaagttattgacttatgaatttagctataattttacttttcagttactttgatttaaatataagaaatggatttgaaattttcattggactattcttttgttaaatatcattacaattaagagtattggtgaaaaaaattagccaccaaagggattggtcgtgtaaggatcatggatcatggatccatgggaattggatatttctattactagttggaatggatagagagtttcaaatcttttggttagcctcactattcattcaccaaatgaataaaccattcatttaccaatta

SEQ ID NO: 104288 - DNA, 695 bp, Homo sapiens
  Payload ID: 488
  Gene Symbol: ACAD11
  Gene Name: acyl-CoA dehydrogenase family, member 11
  ENST ID: ENST00000510100
  CDS Start-End: 1-468
ggactcagccacgtggactatgccttgattgctgaagaaacaggaaaatgcttttttgctccagatgtctttaactgccaagcaccagacacagggaatatggaggttctgcacctgtatggaagtgaggaacagaagaaacagtggcttgagcctcttcttcaagggaacattacctcttgcttctgtatgacagaacctgatgtagcttcaagtgatgccacgaatattgaatgcagcatccaacgagatgaagatagctatgtaattaacggcaaaaaatggtggagcagtggagctgggaatcccaagtgcaaaattgcaattgttttgggaagaactcaaaatacttctctctccagatcacagcctgcatcagactatgttggtgtacgtcttttacacagttcccattccagtcatcactgcttacatgactacatgaaaacatcaaaaagacaattgtgattctgcttattatctgttttatttttcttcttagcaaactttttctaatacaatttttcttttgactagacacaaacagcacagcatgattcttgttcccatgaacacacctggagtaaaaataataaggcctttgtcagtttttggctacacagataattttcatggaggacattttgagatccattttaatcaagtgcgagttcctgccacaaatctaatactag

SEQ ID NO: 104289 - DNA, 2249 bp, Homo sapiens
  Payload ID: 489
  Gene Symbol: ACAD8
  Gene Name: acyl-CoA dehydrogenase family, member 8
  Uniprot ID: Q9UKU7
  ENST ID: ENST00000281182
  CDS Start-End: 107-1354
agggtgcagtgggacaggcgttgccgggtcgcaggtcccgccagtgcgagcgcaacggaggtcgaaggcgttcagactcttagctgaacgcggagctgcggcggctatgctgtggagcggctgccggcgtttcggggcgcgcctcggctgcctgcccggcggtctccgggtcctcgtccagaccggccaccggagcttgacctcctgcatcgacccttccatgggacttaatgaagagcagaaagaatttcaaaaagtggcctttgactttgctgcccgagagatggctccaaatatggcagagtgggaccagaaggagctgttcccagtggatgtgatgcggaaggcagcccagctaggcttcggaggggtctacatacaaacagatgtgggcgggtctgggctgtcacgtcttgatacctctgtcatttttgaagccttggctacaggctgcaccagcaccacagcctatataagcatccacaacatgtgtgcctggatgattgatagcttcggaaatgaggaacagaggcacaaattttgcccaccgctctgtaccatggagaagtttgcttcctactgcctcactgaaccaggaagtgggagtgatgctgcctctcttctgacctccgctaagaaacagggagatcattacatcctcaatggctccaaggccttcatcagtggtgctggtgagtcagacatctatgtggtcatgtgccgaacaggaggaccaggccccaagggcatctcatgcatagttgttgagaaggggacccctggcctcagctttggcaagaaggagaaaaaggtggggtggaactcccagccaacacgagctgtgatcttcgaagactgtgctgtccctgtggccaacagaattgggagcgaggggcagggcttcctcattgccgtgagaggactgaacggagggaggatcaatattgcttcctgctccctgggggctgcccacgcctctgtcatcctcacccgagaccacctcaatgtccggaagcagtttggagagcctctggccagtaaccagtacttgcaattcacactggctgatatggcaacaaggctggtggccgcgcggctgatggtccgcaatgcagcagtggctctgcaggaggagaggaaggatgcagtggccttgtgctccatggccaagctctttgctacagatgaatgctttgccatctgcaaccaggccttgcagatgcacgggggctacggctacctgaaggattacgctgttcagcagtacgtgcgggactccagggtccaccagattctagaaggtagcaatgaagtgatgaggatactgatctctagaagcctgcttcaggagtagaacccacacttgttctggcctggtgttcagtgcgactgcagtcagtgttgagtggtgccatgtgggccgctctattccaaaggaatcatggattagacccaagggctgagctcctctagggcaggacctgcaccctgtgtgttggcaccagcatcgggtcttggactggggcagaatccccagtggaaccggaagagctggactgatgagaaacatcagaagaacacatactaccttgttttcctaatgccagaagggtgaccagtgaagattcaccgtcaaaccatgaaagtcctttcttggatccactttatcttgattagtctgcattttactagttcactggatccctcctctaggggcctggggactttcactgatgctcttcctgattctagagcaaaggtgtgggaaggggaaatggaggaatgccctcctgtctgtgtcgttctctgtgccacagctacagatgcagaaggtttctctggatagcacacctctgaatgtaaatcatgataaaatggatatttggaaacttactcctaagctgtgatttagggtgtatttctacttctggactgcctcaatatcaagggctgagacttttgaattttgaatattcgttgggtttcatgttaagaagcctgtggtctaggagtgctattcagtgtttcttttcctgataaacactttgaatattttttttgtgtttttgtttccttttctgaagctgttcctccttttaaatatttttaatcacattgataaaatctatccttcaccacctctggttctactatagttgatttttattttaaatgtttaattgtatttgattaaacacttaactggattttggaataataaaactctcgtccaatttggcttttaaaaa

SEQ ID NO: 104290 - DNA, 1797 bp, Homo sapiens
  Payload ID: 489
  Gene Symbol: ACAD8
  Gene Name: acyl-CoA dehydrogenase family, member 8
  Uniprot ID: Q9UKU7
  ENST ID: ENST00000374752
  CDS Start-End: 41-907
ggcgttcagactcttagctgaacgcggagctgcggcggctatgctgtggagcggctgccggcgtttcggggcgcgcctcggctgcctgcccggcggtctccgggtcctcgtccagaccggccaccggagcttgacctcctgcatcgaccgaagtgggagtgatgctgcctctcttctgacctccgctaagaaacagggagatcattacatcctcaatggctccaaggccttcatcagtggtgctggtgagtcagacatctatgtggtcatgtgccgaacaggaggaccaggccccaagggcatctcatgcatagttgttgagaaggggacccctggcctcagctttggcaagaaggagaaaaaggtggggtggaactcccagccaacacgagctgtgatcttcgaagactgtgctgtccctgtggccaacagaattgggagcgaggggcagggcttcctcattgccgtgagaggactgaacggagggaggatcaatattgcttcctgctccctgggggctgcccacgcctctgtcatcctcacccgagaccacctcaatgtccggaagcagtttggagagcctctggccagtaaccagtacttgcaattcacactggctgatatggcaacaaggctggtggccgcgcggctgatggtccgcaatgcagcagtggctctgcaggaggagaggaaggatgcagtggccttgtgctccatggccaagctctttgctacagatgaatgctttgccatctgcaaccaggccttgcagatgcacgggggctacggctacctgaaggattacgctgttcagcagtacgtgcgggactccagggtccaccagattctagaaggtagcaatgaagtgatgaggatactgatctctagaagcctgcttcaggagtagaacccacacttgttctggcctggtgttcagtgcgactgcagtcagtgttgagtggtgccatgtgggccgctctattccaaaggaatcatggattagacccaagggctgagctcctctagggcaggacctgcaccctgtgtgttggcaccagcatcgggtcttggactggggcagaatccccagtggaaccggaagagctggactgatgagaaacatcagaagaacacatactaccttgttttcctaatgccagaagggtgaccagtgaagattcaccgtcaaaccatgaaagtcctttcttggatccactttatcttgattagtctgcattttactagttcactggatccctcctctaggggcctggggactttcactgatgctcttcctgattctagagcaaaggtgtgggaaggggaaatggaggaatgccctcctgtctgtgtcgttctctgtgccacagctacagatgcagaaggtttctctggatagcacacctctgaatgtaaatcatgataaaatggatatttggaaacttactcctaagctgtgatttagggtgtatttctacttctggactgcctcaatatcaagggctgagacttttgaattttgaatattcgttgggtttcatgttaagaagcctgtggtctaggagtgctattcagtgtttcttttcctgataaacactttgaatattttttttgtgtttttgtttccttttctgaagctgttcctccttttaaatatttttaatcacattgataaaatctatccttcaccacctctggttctactatagttgatttttattttaaatgtttaattgtatttgattaaacacttaactggattttggaataataaaactctcgtccaatttggctttt

SEQ ID NO: 104291 - DNA, 1189 bp, Homo sapiens
  Payload ID: 489
  Gene Symbol: ACAD8
  Gene Name: acyl-CoA dehydrogenase family, member 8
  ENST ID: ENST00000524426
  CDS Start-End: 44-274
gaaggcgttcagactcttagctgaacgcggagctgcggcggctatgctgtggagcggctgccggcgtttcggggcgcgcctcggctgcctgcccggcggtctccgggtcctcgtccagaccggccaccggagcttgacctcctgcatcgacccttccatgggacttaatgaagagcagaaagaatttcaaaaagtggcctttgactttgctgcccgagagatggctccaaatatggcagagtgggaccagaagcatgtgtgcctggatgattgatagcttcggaaatgaggaacagaggcacaaattttgcccaccgctctgtaccatggagaagtttgcttcctactgcctcactgaaccaggaagtgggagtgatgctgcctctcttctgacctccgctaagaaacagggagatcattacatcctcaatggctccaaggccttcatcagtggtgctggtgagtcagacatctatgtggtcatgtgccgaacaggaggaccaggccccaagggcatctcatgcatagttgttgagaaggggacccctggcctcagctttggcaagaaggagaaaaaggtggggtggaactcccagccaacacgagctgtgatcttcgaagactgtgctgtccctgtggccaacagaattgggagcgaggggcagggcttcctcattgccgtgagaggactgaacggagggaggatcaatattgcttcctgctccctgggggctgcccacgcctctgtcatcctcacccgagaccacctcaatgtccggaagcagtttggagagcctctggccagtaaccagaaaaagcaagagactttgaagctttggatcacttagaaaaggcgcctccgagatgtcttaccgaggctcctgcaccaggtgctggtctaagcccctcagtcttgtctggttctctgctccctgtgctgcagtacttgcaattcacactggctgatatggcaacaaggctggtggccgcgcggctgatggtccgcaatgcagcagtggctctgcaggaggagaggaaggatgcagtggccttgtgctccatggccaagctctttgctacagatgaatgctttgccatctgcaaccaggccttgcagatgcacgggggctacggctacctgaaggattacgctgttcagcagtacgtgcgggactccagggtccaccag

SEQ ID NO: 104292 - DNA, 1336 bp, Homo sapiens
  Payload ID: 489
  Gene Symbol: ACAD8
  Gene Name: acyl-CoA dehydrogenase family, member 8
  ENST ID: ENST00000526026
  CDS Start-End: 54-263
aacggaggtcgaaggcgttcagactcttagctgaacgcggagctgcggcggctatgctgtggagcggctgccggcgtttcggggcgcgcctcggctgcctgcccggcggtctccgggtcctcgtccagaccggccaccggagcttgacctcctgcatcgaccgagctgttcccagtggatgtgatgcggaaggcagcccagctaggcttcggaggggtctacatacaaacagatgtgggcgggtctgggctgtcacgtcttgatacctctgtcatttttgaagccttggctacaggctgcaccagcaccacagcctatataagcatccacaacatgtgtgcctggatgattgatagcttcggaaatgaggaacagaggcacaaattttgcccaccgctctgtaccatggagaagtttgcttcctactgcctcactgaaccaggaagtgggagtgatgctgcctctcttctgacctccgctaagaaacagggagatcattacatcctcaatggctccaaggccttcatcagtggtgctggtgagtcagacatctatgtggtcatgtgccgaacaggaggaccaggccccaagggcatctcatgcatagttgttgagaaggggacccctggcctcagctttggcaagaaggagaaaaaggtggggtggaactcccagccaacacgagctgtgatcttcgaagactgtgctgtccctgtggccaacagaattgggagcgaggggcagggcttcctcattgccgtgagaggactgaacggagggaggatcaatattgcttcctgctccctgggggctgcccacgcctctgtcatcctcacccgagaccacctcaatgtccggaagcagtttggagagcctctggccagtaaccagtacttgcaattcacactggctgatatggcaacaaggctggtggccgcgcggctgatggtccgcaatgcagcagtggctctgcaggaggagaggaaggatgcagtggccttgtgctccatggccaagctctttgctacagatgaatgctttgccatctgcaaccaggccttgcagatgcacgggggctacggctacctgaaggattacgctgttcagcagtacgtgcgggactccagggtccaccagattctagaagagctgttctggcaggggcctggagtccagagccgcagcttcgtccctttcggggggcctcagatcgctctgctgctgcccttttcctctggagatctgcgagaagggtgaactgagataatggatgagaaagcatgttgaaaaccacagccggggcttttctctaaggttatcgagtacgtggttctca

SEQ ID NO: 104293 - DNA, 2454 bp, Homo sapiens
  Payload ID: 490
  Gene Symbol: ACAD9
  Gene Name: acyl-CoA dehydrogenase family, member 9
  Uniprot ID: Q9H845
  ENST ID: ENST00000308982
  CDS Start-End: 82-1947
agtaacgtcatcagacgtgtgtgtgtccctgcggcgctaagaaggggagactgaggctgaggctggggaacatcgggcagcatgagcggctgcgggctcttcctgcgcaccacggctgcggctcgtgcctgccggggtctggtggtctctaccgcgaaccggcggctactgcgcaccagcccgcctgtacgagctttcgccaaagagcttttcctaggcaaaatcaagaagaaagaagttttcccatttccagaagttagccaagatgaacttaatgaaatcaatcagttcttgggacccgtggaaaaattcttcactgaagaggtggactcccgaaaaattgaccaggaagggaaaatcccagatgaaactttggagaaattgaagagcctagggctttttgggctgcaagtcccagaagaatatggtggcctgggcttctccaacaccatgtactcaagactaggggagatcatcagcatggatgggtccatcactgtgaccctggcagcgcaccaggctattggcctcaaggggatcatcttggctggcactgaggagcagaaagccaaatacttgcctaaactggcgtccggggagcacattgcagccttctgcctcacggagccagccagtgggagcgatgcagcctcaatccggagcagagccacactaagtgaagacaagaagcactacatcctcaatggctccaaggtctggattactaatggaggactggccaatatttttactgtgtttgcaaagactgaggtcgttgattctgatggatcagtgaaagacaaaatcacagcattcatagtagaaagagactttggtggagtcactaatgggaaacccgaagataaattaggcattcggggctccaacacttgtgaagtccattttgaaaacaccaagatacctgtggaaaacatccttggagaggtcggagatgggtttaaggtggccatgaacatcctcaacagcggccggttcagcatgggcagcgtcgtggctgggctgctcaagagattgattgaaatgactgctgagtacgcctgcacaaggaaacagtttaacaagaggctcagtgaatttggattgattcaggagaaatttgcactgatggctcagaaggcttacgtcatggagagtatgacctacctcacagcagggatgctggaccaacctggctttcccgactgctccatcgaggcagccatggtgaaggtgttcagctccgaggccgcctggcagtgtgtgagtgaggcgctgcagatcctcgggggcttgggctacacaagggactatccgtacgagcgcatactgcgtgacacccgcatcctcctcatcttcgagggaaccaatgagattctccggatgtacatcgccctgacgggtctgcagcatgccggccgcatcctgactaccaggatccatgagcttaaacaggccaaagtgagcacagtcatggataccgttggccggaggcttcgggactccctgggccgaactgtggacctggggctgacaggcaaccatggagttgtgcaccccagtcttgcggacagtgccaacaagtttgaggagaacacctactgcttcggccggaccgtggagacactgctgctccgctttggcaagaccatcatggaggagcagctggtactgaagcgggtggccaacatcctcatcaacctgtatggcatgacggccgtgctgtcgcgggccagccgctccatccgcattgggctccgcaaccacgaccacgaggttctcttggccaacaccttctgcgtggaagcttacttgcagaatctcttcagcctctctcagctggacaagtatgctccagaaaacctagatgagcagattaagaaagtgtcccagcagatccttgagaagcgagcctatatctgtgcccaccctctggacaggacatgctgaggcaggggacagtgtcccctgctaccgcccgcccctacccatggcccgttgctggatgactgttactcttttttcagaaggtgttgggattatcacaggttaagccttttgttccccgtctgcacctgaagggttgtcgcctggcctgggagagcctcttccaggttttgacctgcaggcagtgctctctaacaggaccatcacagcttctgaactgagccggagagagagaatggaattgctgacccctggaactggcgggtattctggtcattgaggagacaccatagtggaaactggggcttatgctgctgcctccagggtgtgaggtgggtggggacctgtgtcaggtgtggatagccatttctgctcaaccacacattctctaagaaacagcttgaaagctctgtctgggtcattcatttaaactagaagcagaggcacttaaaacatgtaccaggaaccatttaacaaagaatataaaatgtcacaatctgtgtactgtta

SEQ ID NO: 104294 - DNA, 831 bp, Homo sapiens
  Payload ID: 490
  Gene Symbol: ACAD9
  Gene Name: acyl-CoA dehydrogenase family, member 9
  ENST ID: ENST00000514643
  CDS Start-End: 89-388
gcgggccagtaacgtcatcagacgtgtgtgtgtccctgcggcgctaagaaggggagactgaggctgaggctggggaacatcgggcagcatgagcggctgcgggctcttcctgcgcaccacggctgcggctcgtgcctgccggggtctggtggtctctaccgcgaaccggcggctactgcgcaccagcccgcctgtacgagctttcgccaaagagcttttcctaggcaaaatcaagaagaagttttcccatttccagaagttagccaagatgaacttaatgaaatcaatcagttcttgggacccgtggaaaaattcttcactgaagaggtggactcccgaaaaattgaccaggaagggaaaatcccagatgaaactttggagaaattgaagagcctagggctttttgggctgcaagtcccagaagaatatggtggcctgggcttctccaacaccatgtactcaagactaggggagatcatcagcatggatgggtccatcactgtgaccctggcagcgcaccaggctattggcctcaaggggatcatcttggctggcactgaggagcagaaagccaaatacttgcctaaactggcgtccggggagcacattgcagccttctgcctcacggagccagccagtgggagcgatgcagcctcaatccggagcagagccacactaagtgaagacaagaagcactacatcctcaatggctccaaggtctggattactaatggaggactggccaatatttttactgtgtttgcaaagactgaggtcgttgattctgatggatcagtgaaagacaaaatcacagcattcatagtagaaaga

SEQ ID NO: 104295 - DNA, 1872 bp, Homo sapiens
  Payload ID: 490
  Gene Symbol: ACAD9
  Gene Name: acyl-CoA dehydrogenase family, member 9
  ENST ID: ENST00000508971
  CDS Start-End: 1-1155
gtgaaagacaaaatcacagcattcatagtagaaagagactttggtggagtcactaatgggaaacccgaagataaattaggcattcggggctccaacacttgtgaagtccattttgaaaacaccaagatacctgtggaaaacatccttggagaggtcggagatgggtttaaggtggccatgaacatcctcaacagcggccggttcagcatgggcagcgtcgtggctgggctgctcaagagattgattgaaatgactgctgagtacgcctgcacaaggaaacagtttaacaagaggctcagtgaatttggattgattcaggagaaatttgcactgatggctcagaaggcttacgtcatggagagtatgacctacctcacagcagggatgctggaccaacctggctttcccgactgctccatcgaggcagccatggtgaaggtgttcagctccgaggccgcctggcagtgtgtgagtgaggcgctgcagatcctcgggggcttgggctacacaagggactatccgtacgagcgcatactgcgtgacacccgcatcctcctcatcttcgagggaaccaatgagattctccggatgtacatcgccctgacgggtctgcagcatgccggccgcatcctgactaccaggatccatgagcttaaacaggccaaagtgagcacagtcatggataccgttggccggaggcttcgggactccctgggccgaactgtggacctggggctgacaggcaaccatggagttgtgcaccccagtcttgcggacagtgccaacaagtttgaggagaacacctactgcttcggccggaccgtggagacactgctgctccgctttggcaagaccatcatggaggagcagctggtactgaagcgggtggccaacatcctcatcaacctgtatggcatgacggccgtgctgtcgcgggccagccgctccatccgcattgggctccgcaaccacgaccacgaggttctcttggccaacaccttctgcgtggaagcttacttgcagaatctcttcagcctctctcagctggacaagtatgctccagaaaacctagatgagcagattaagaaagtgtcccagcagatccttgagaagcgagcctatatctgtgcccaccctctggacaggacatgctgaggcaggggacagtgtcccctgctaccgcccgcccctacccatggcccgttgctggatgactgttactcttttttcagaaggtgttgggattatcacaggaccatcacagcttctgaactgagccggagagagagaatggaattgctgacccctggaactggcgggtattctggtcattgaggagacaccatagtggaaactggggcttatgctgctgcctccagggtgtgagggataaagaggaagaggacttggagggactggtacagcaagacctacgtttcctgtctctgccttaccccaaagaaagaactgtcagtatctttgccgctggaaggtcccagtgaagcccagagcctctgcccccagctcttggctggacacctagagatcagtcatggctctttgatgggtggcagcttgagatcctgaaagctgctttcggtgtcgctctgaagacctgtcacttggaatcccctggctgtgagccaggcctggcgggatttcttctgggctttcttctcctcttccttcaagtccaggggctccaccatggctgagaggtaatcctgtgtggaggattcacatttagtgtggaacagaacacctctcaacatctgagccttgtctacttcccctagctgattggctttcatctgtatagttgagatcccccactgacctccaggcaggcatggtcagaataaagaactcatg

SEQ ID NO: 104296 - DNA, 583 bp, Homo sapiens
  Payload ID: 490
  Gene Symbol: ACAD9
  Gene Name: acyl-CoA dehydrogenase family, member 9
  ENST ID: ENST00000514336
  CDS Start-End: 64-583
gtgtgtgtccctgcggcgctaagaaggggagactgaggctgaggctggggaacatcgggcagcatgagcggctgcgggctcttcctgcgcaccacggctgcggctcgtgcctgccggggtctggtggtctctaccgcgaaccggcggctactgcgcaccagcccgcctgtacgagctttcgccaaagagcttttcctaggcaaaatcaagaagaaagaagttttcccatttccagaagttagccaagatgaacttaatgaaatcaatcagttcttgggacccgtggaaaaattcttcactgaagaggcttatatttgtttaatcaagattttcctcttggcagtggactcccgaaaaattgaccaggaagggaaaatcccagatgaaactttggagaaattgaagagcctagggctttttgggctgcaagtcccagaagaatatggtggcctgggcttctccaacaccatgtactcaagactaggggagatcatcagcatggatgggtccatcactgtgaccctggcagcgcaccaggctattggcctcaaggggatcatcttggctggcactgaggagcaga

SEQ ID NO: 104297 - DNA, 2431 bp, Homo sapiens
  Payload ID: 490
  Gene Symbol: ACAD9
  Gene Name: acyl-CoA dehydrogenase family, member 9
  ENST ID: ENST00000511227
  CDS Start-End: 70-351
agacgtgtgtgtgtccctgcggcgctaagaaggggagactgaggctgaggctggggaacatcgggcagcatgagcggctgcgggctcttcctgcgcaccacggctgcggctcgtgcctgccggggtctggtggtctctaccgcgaaccggcggctactgcgcaccagcccgcctgtacgagctttcgccaaagagcttttcctaggcaaaatcaagaaggtaacgcgagccctgggcgaacccttgctgtctggctcccgcttttcaccctcagctgcaagactggtgttgaactttgtgagattccccaaacctgccagagagatacaccctgcggccgaggcgtgttaacactccggattcctgagttccaggaaaaccttcccagagaaaggaaagaagttttcccatttccagaagttagccaagatgaacttaatgaaatcaatcagttcttgggacccgtggaaaaattcttcactgaagaggtggactcccgaaaaattgaccaggaagggaaaatcccagatgaaactttggagaaattgaagagcctagggctttttgggctgcaagtcccagaagaatatggtggcctgggcttctccaacaccatgtactcaagactaggggagatcatcagcatggatgggtccatcactgtgaccctggcagcgcaccaggctattggcctcaaggggatcatcttggctggcactgaggagcagaaagccaaatacttgcctaaactggcgtccggggagcacattgcagccttctgcctcacggagccagccagtgggagcgatgcagcctcaatccggagcagagccacactaagtgaagacaagaagcactacatcctcaatggctccaaggtctggattactaatggaggactggccaatatttttactgtgtttgcaaagactgaggtcgttgattctgatggatcagtgaaagacaaaatcacagcattcatagtagaaagagactttggtggagtcactaatgggaaacccgaagataaattaggcattcggggctccaacacttgtgaagtccattttgaaaacaccaagatacctgtggaaaacatccttggagaggtcggagatgggtttaaggtggccatgaacatcctcaacagcggccggttcagcatgggcagcgtcgtggctgggctgctcaagagattgattgaaatgactgctgagtacgcctgcacaaggaaacagtttaacaagaggctcagtgaatttggattgattcaggagaaatttgcactgatggctcagaaggcttacgtcatggagagtatgacctacctcacagcagggatgctggaccaacctggctttcccgactgctccatcgaggcagccatggtgaaggtgttcagctccgaggccgcctggcagtgtgtgagtgaggcgctgcagatcctcgggggcttgggctacacaagggactatccgtacgagcgcatactgcgtgacacccgcatcctcctcatcttcgagggaaccaatgagattctccggatgtacatcgccctgacgggtctgcagcatgccggccgcatcctgactaccaggatccatgagcttaaacaggccaaagtgagcacagtcatggataccgttggccggaggcttcgggactccctgggccgaactgtggacctggggctgacaggcaaccatggagttgtgcaccccagtcttgcggacagtgccaacaagtttgaggagaacacctactgcttcggccggaccgtggagacactgctgctccgctttggcaagaccatcatggaggagcagctggtactgaagcgggtggccaacatcctcatcaacctgtatggcatgacggccgtgctgtcgcgggccagccgctccatccgcattgggctccgcaaccacgaccacgaggttctcttggccaacaccttctgcgtggaagcttacttgcagaatctcttcagcctctctcagctggacaagtatgctccagaaaacctagatgagcagattaagaaagtgtcccagcagatccttgagaagcgagcctatatctgtgcccaccctctggacaggacatgctgaggcaggggacagtgtcccctgctaccgcccgcccctacccatggcccgttgctggatgactgttactcttttttcagaaggtgttgggattatcacaggttaagccttttgttccccgtctgcacctgaagggttgtcgcctggcctgggagagcctcttccaggttttgacctgcaggcagtgctctctaacaggaccatcacagcttctgaactgagccggagagagagaatggaattgctgacccctggaactggcgggtattctggtcattgaggagacaccatagtggaaactggggcttatgctgctgcctcca

SEQ ID NO: 104298 - DNA, 2401 bp, Homo sapiens
  Payload ID: 490
  Gene Symbol: ACAD9
  Gene Name: acyl-CoA dehydrogenase family, member 9
  ENST ID: ENST00000505867
  CDS Start-End: 47-328
gctaagaaggggagactgaggctgaggctggggaacatcgggcagcatgagcggctgcgggctcttcctgcgcaccacggctgcggctcgtgcctgccggggtctggtggtctctaccgcgaaccggcggctactgcgcaccagcccgcctgtacgagctttcgccaaagagcttttcctaggcaaaatcaagaaggtaacgcgagccctgggcgaacccttgctgtctggctcccgcttttcaccctcagctgcaagactggtgttgaactttgtgagattccccaaacctgccagagagatacaccctgcggccgaggcgtgttaacactccggattcctgagttccaggaaaaccttcccagagaaaggtggactcccgaaaaattgaccaggaagggaaaatcccagatgaaactttggagaaattgaagagcctagggctttttgggctgcaagtcccagaagaatatggtggcctgggcttctccaacaccatgtactcaagactaggggagatcatcagcatggatgggtccatcactgtgaccctggcagcgcaccaggctattggcctcaaggggatcatcttggctggcactgaggagcagaaagccaaatacttgcctaaactggcgtccggggagcacattgcagccttctgcctcacggagccagccagtgggagcgatgcagcctcaatccggagcagagccacactaagtgaagacaagaagcactacatcctcaatggctccaaggtctggattactaatggaggactggccaatatttttactgtgtttgcaaagactgaggtcgttgattctgatggatcagtgaaagacaaaatcacagcattcatagtagaaagagactttggtggagtcactaatgggaaacccgaagataaattaggcattcggggctccaacacttgtgaagtccattttgaaaacaccaagatacctgtggaaaacatccttggagaggtcggagatgggtttaaggtggccatgaacatcctcaacagcggccggttcagcatgggcagcgtcgtggctgggctgctcaagagattgattgaaatgactgctgagtacgcctgcacaaggaaacagtttaacaagaggctcagtgaatttggattgattcaggagaaatttgcactgatggctcagaaggcttacgtcatggagagtatgacctacctcacagcagggatgctggaccaacctggctttcccgactgctccatcgaggcagccatggtgaaggtgttcagctccgaggccgcctggcagtgtgtgagtgaggcgctgcagatcctcgggggcttgggctacacaagggactatccgtacgagcgcatactgcgtgacacccgcatcctcctcatcttcgagggaaccaatgagattctccggatgtacatcgccctgacgggtctgcagcatgccggccgcatcctgactaccaggatccatgagcttaaacaggccaaagtgagcacagtcatggataccgttggccggaggcttcgggactccctgggccgaactgtggacctggggctgacaggcaaccatggagttgtgcaccccagtcttgcggacagtgccaacaagtttgaggagaacacctactgcttcggccggaccgtggagacactgctgctccgctttggcaagaccatcatggaggagcagctggtactgaagcgggtggccaacatcctcatcaacctgtatggcatgacggccgtgctgtcgcgggccagccgctccatccgcattgggctccgcaaccacgaccacgaggttctcttggccaacaccttctgcgtggaagcttacttgcagaatctcttcagcctctctcagctggacaagtatgctccagaaaacctagatgagcagattaagaaagtgtcccagcagatccttgagaagcgagcctatatctgtgcccaccctctggacaggacatgctgaggcaggggacagtgtcccctgctaccgcccgcccctacccatggcccgttgctggatgactgttactcttttttcagaaggtgttgggattatcacaggttaagccttttgttccccgtctgcacctgaagggttgtcgcctggcctgggagagcctcttccaggttttgacctgcaggcagtgctctctaacaggaccatcacagcttctgaactgagccggagagagagaatggaattgctgacccctggaactggcgggtattctggtcattgaggagacaccatagtggaaactggggcttatgctgctgcctccagggtgtgaggtgggtggggacctgtgtcaggtgtggatagccatttctgctcaaccacacattctctaagaaacagcttgaaagctc

SEQ ID NO: 104299 - DNA, 546 bp, Homo sapiens
  Payload ID: 490
  Gene Symbol: ACAD9
  Gene Name: acyl-CoA dehydrogenase family, member 9
  ENST ID: ENST00000515429
  CDS Start-End: 64-345
gtgtgtgtccctgcggcgctaagaaggggagactgaggctgaggctggggaacatcgggcagcatgagcggctgcgggctcttcctgcgcaccacggctgcggctcgtgcctgccggggtctggtggtctctaccgcgaaccggcggctactgcgcaccagcccgcctgtacgagctttcgccaaagagcttttcctaggcaaaatcaagaaggtaacgcgagccctgggcgaacccttgctgtctggctcccgcttttcaccctcagctgcaagactggtgttgaactttgtgagattccccaaacctgccagagagatacaccctgcggccgaggcgtgttaacactccggattcctgagttccaggaaaaccttcccagagaaaggaaagaagttttcccatttccagaagttagccaagatgaacttaatgaaatcaatcagttcttgggacccgtggaaaaattcttcactgaagaggattttcctcttggcagtggactcccgaaaaattgaccaggaagggaaaatcccagatgaaact
